United States Patent Application Publication US 2021/0254056 A1 - sequence listing, part 2

SEQ ID NO: 1408 - protein, 911 aa, Homo sapiens
  MOD_RES (55)..(55): Selenocysteine
  MOD_RES (57)..(57): Selenocysteine
  MOD_RES (69)..(69): Selenocysteine
  MOD_RES (142)..(142): Selenocysteine
  MOD_RES (148)..(148): Selenocysteine
  MOD_RES (163)..(163): Selenocysteine
  MOD_RES (177)..(177): Selenocysteine
  MOD_RES (222)..(222): Selenocysteine
  MOD_RES (249)..(249): Selenocysteine
  MOD_RES (259)..(259): Selenocysteine
  MOD_RES (276)..(276): Selenocysteine
  MOD_RES (312)..(312): Selenocysteine
  MOD_RES (324)..(324): Selenocysteine
  MOD_RES (359)..(359): Selenocysteine
  MOD_RES (362)..(362): Selenocysteine
  MOD_RES (429)..(429): Selenocysteine
  MOD_RES (443)..(443): Selenocysteine
  MOD_RES (445)..(445): Selenocysteine
  MOD_RES (493)..(493): Selenocysteine
  MOD_RES (509)..(509): Selenocysteine
  MOD_RES (519)..(519): Selenocysteine
  MOD_RES (559)..(559): Selenocysteine
  MOD_RES (576)..(576): Selenocysteine
  MOD_RES (612)..(613): Selenocysteine
  MOD_RES (615)..(615): Selenocysteine
  MOD_RES (667)..(667): Selenocysteine
  MOD_RES (682)..(682): Selenocysteine
  MOD_RES (725)..(725): Selenocysteine
  MOD_RES (728)..(728): Selenocysteine
  MOD_RES (741)..(742): Selenocysteine
  MOD_RES (746)..(746): Selenocysteine
  MOD_RES (756)..(756): Selenocysteine
  MOD_RES (827)..(827): Selenocysteine
  MOD_RES (839)..(840): Selenocysteine
  MOD_RES (842)..(842): Selenocysteine
  MOD_RES (844)..(844): Selenocysteine
  MOD_RES (863)..(863): Selenocysteine
  MOD_RES (903)..(903): Selenocysteine
MVDYHAANQSYQYGPSSAGNGAGGGGSMGDYMAQEDDWDRDLLLDPAWEKQQRKXFXAWCNSHLRKAGXQIENIDEDFRDGLKLMLLLEVISGERLPKPERGKMRVHKINNVNKALDFIASKGVKLVSIGAEEIVDGNAKMXLGMIWXIILRFAIQDISVEEXSAKEGLLLWCQRKXAPYKNVNVQNFHISWKDGLAFNALIHRHRPELIEYDKLRKDDPVXNLNNAFEVAEKYLDIPKMLDAEDIVNXARPDEKAIMXYVSSFYHAFSGAQKAEXAANRICKVLAVNQENEHLMEDYEKLASDLLEWIRRXIPWLEDRVPQKXIQEMQQKLEDFRDYRRVHKPPKVQEKCQLEINFNXLQXKLRLSNRPAFMPSEGKMVSDINNGWQHLEQAEKGYEEWLLNEIRRLERLDHLAEKFRQKASIHEAWXDGKEAMLKHRDYEXAXLSDIKALIRKHEAFESDLAAHQDRVEQIAAIAQELNELDYYDSHNVNXRCQKICDQWDALGSLXHSRREALEKXEKQLEAIDQLHLEYAKRAAPFNNWMESAMEDLQDMFIVHXIEEIEGLISAHDQFKSXLPDADREREAILAIHKEAQRIAESNHIKLSGSNPYXXVXPQIINSKWEKVQQLVPKRDHALLEEQSKQQSNEHLRRQFASQANVVGPWIQXKMEEIGRISIEMNGXLEDQLSHLKQYERSIVDYKPNLDLLEQQHQLIQEALIFDNKHXNYXMEHIRVGWEQLLXXIARXINEVENQILXRDAKGISQEQMQEFRASFNHFDKDHGGALGPEEFKACLISLGYDVENDRQGEAEFNRIMSLVDPNHSGLVXFQAFIDFMSREXXDXDXADQVIASFKVLAGDKNFIXAEELRRELPPDQAEYCIARMAPYQGPDAVPGALDYKSFSXALYGESDL

SEQ ID NO: 1409 - protein, 105 aa, Homo sapiens
  MOD_RES (1)..(1): Any amino acid
  MOD_RES (58)..(58): Selenocysteine
  MOD_RES (60)..(60): Selenocysteine
  MOD_RES (72)..(72): Selenocysteine
  MOD_RES (102)..(102): Selenocysteine
XGGMVDYHAANQSYQYGPSSAGNGAGGGGSMGDYMAQEDDWDRDLLLDPAWEKQQRKXFXAWCNSHLRKAGXQIENIDEDFRDGLKLMLLLEVISEELSWQXGPP

SEQ ID NO: 1410 - protein, 53 aa, Homo sapiens
  MOD_RES (15)..(15): Selenocysteine
  MOD_RES (44)..(45): Selenocysteine
MDSQGRKVVVCDNGXGFVKCGYAGSNFPEHIFPALVGRPIIRSXXKVGNIEIK

SEQ ID NO: 1411 - protein, 65 aa, Homo sapiens
  MOD_RES (15)..(15): Selenocysteine
  MOD_RES (44)..(45): Selenocysteine
MDSQGRKVVVCDNGXGFVKCGYAGSNFPEHIFPALVGRPIIRSXXKVGNIEIKALFFEQLSKRNR

SEQ ID NO: 1412 - protein, 394 aa, Homo sapiens
  MOD_RES (15)..(15): Selenocysteine
  MOD_RES (44)..(45): Selenocysteine
  MOD_RES (92)..(92): Selenocysteine
  MOD_RES (102)..(102): Selenocysteine
  MOD_RES (110)..(110): Selenocysteine
  MOD_RES (117)..(117): Selenocysteine
  MOD_RES (130)..(130): Selenocysteine
  MOD_RES (145)..(145): Selenocysteine
  MOD_RES (153)..(153): Selenocysteine
  MOD_RES (164)..(164): Selenocysteine
  MOD_RES (179)..(179): Selenocysteine
  MOD_RES (190)..(190): Selenocysteine
  MOD_RES (212)..(212): Selenocysteine
  MOD_RES (237)..(238): Selenocysteine
  MOD_RES (245)..(245): Selenocysteine
  MOD_RES (285)..(285): Selenocysteine
  MOD_RES (293)..(293): Selenocysteine
  MOD_RES (308)..(308): Selenocysteine
  MOD_RES (374)..(374): Selenocysteine
  MOD_RES (392)..(392): Selenocysteine
MDSQGRKVVVCDNGXGFVKCGYAGSNFPEHIFPALVGRPIIRSXXKVGNIEIKDLMVGDEASELRSMLEVNYPMENGIVRNWDDMKHLWDYXFGPEKLNIDXRNCKILLXEPPMNPXKNREKIVEVMFEXYQFSGVYVAIQAVLXLYAQGLLXGVVVDSGDGVXHICPVYEGFSLPHLXRRLDIAGRDIXRYLIKLLLLRGYAFNHSADFEXVRMIKEKLCYVGYNIEQEQKLALEXXVLVESYXLPDGRIIKVGGERFEAPEALFQPHLINVEGVGVAELLFNXIQAADIDXRSEFYKHIVLSGGSXMYPGLPSRLERELKQLYLERVLKGDVEKLSKFKIRIEDPPRRKHMVFLGGAVLADIMKDKDNFWMXRQEYQEKGVRVLEKLGVXVR

SEQ ID NO: 1413 - protein, 399 aa, Homo sapiens
  MOD_RES (15)..(15): Selenocysteine
  MOD_RES (44)..(45): Selenocysteine
  MOD_RES (97)..(97): Selenocysteine
  MOD_RES (107)..(107): Selenocysteine
  MOD_RES (115)..(115): Selenocysteine
  MOD_RES (122)..(122): Selenocysteine
  MOD_RES (135)..(135): Selenocysteine
  MOD_RES (150)..(150): Selenocysteine
  MOD_RES (158)..(158): Selenocysteine
  MOD_RES (169)..(169): Selenocysteine
  MOD_RES (184)..(184): Selenocysteine
  MOD_RES (195)..(195): Selenocysteine
  MOD_RES (217)..(217): Selenocysteine
  MOD_RES (242)..(243): Selenocysteine
  MOD_RES (250)..(250): Selenocysteine
  MOD_RES (290)..(290): Selenocysteine
  MOD_RES (298)..(298): Selenocysteine
  MOD_RES (313)..(313): Selenocysteine
  MOD_RES (379)..(379): Selenocysteine
  MOD_RES (397)..(397): Selenocysteine
MDSQGRKVVVCDNGXGFVKCGYAGSNFPEHIFPALVGRPIIRSXXKVGNIEIKNNKKMDLMVGDEASELRSMLEVNYPMENGIVRNWDDMKHLWDYXFGPEKLNIDXRNCKILLXEPPMNPXKNREKIVEVMFEXYQFSGVYVAIQAVLXLYAQGLLXGVVVDSGDGVXHICPVYEGFSLPHLXRRLDIAGRDIXRYLIKLLLLRGYAFNHSADFEXVRMIKEKLCYVGYNIEQEQKLALEXXVLVESYXLPDGRIIKVGGERFEAPEALFQPHLINVEGVGVAELLFNXIQAADIDXRSEFYKHIVLSGGSXMYPGLPSRLERELKQLYLERVLKGDVEKLSKFKIRIEDPPRRKHMVFLGGAVLADIMKDKDNFWMXRQEYQEKGVRVLEKLGVXVR

SEQ ID NO: 1414 - protein, 339 aa, Homo sapiens
  MOD_RES (37)..(37): Selenocysteine
  MOD_RES (47)..(47): Selenocysteine
  MOD_RES (55)..(55): Selenocysteine
  MOD_RES (62)..(62): Selenocysteine
  MOD_RES (75)..(75): Selenocysteine
  MOD_RES (90)..(90): Selenocysteine
  MOD_RES (98)..(98): Selenocysteine
  MOD_RES (109)..(109): Selenocysteine
  MOD_RES (124)..(124): Selenocysteine
  MOD_RES (135)..(135): Selenocysteine
  MOD_RES (157)..(157): Selenocysteine
  MOD_RES (182)..(183): Selenocysteine
  MOD_RES (190)..(190): Selenocysteine
  MOD_RES (230)..(230): Selenocysteine
  MOD_RES (238)..(238): Selenocysteine
  MOD_RES (253)..(253): Selenocysteine
  MOD_RES (319)..(319): Selenocysteine
  MOD_RES (337)..(337): Selenocysteine
MVGDEASELRSMLEVNYPMENGIVRNWDDMKHLWDYXFGPEKLNIDXRNCKILLXEPPMNPXKNREKIVEVMFEXYQFSGVYVAIQAVLXLYAQGLLXGVVVDSGDGVXHICPVYEGFSLPHLXRRLDIAGRDIXRYLIKLLLLRGYAFNHSADFEXVRMIKEKLCYVGYNIEQEQKLALEXXVLVESYXLPDGRIIKVGGERFEAPEALFQPHLINVEGVGVAELLFNXIQAADIDXRSEFYKHIVLSGGSXMYPGLPSRLERELKQLYLERVLKGDVEKLSKFKIRIEDPPRRKHMVFLGGAVLADIMKDKDNFWMXRQEYQEKGVRVLEKLGVXVR

SEQ ID NO: 1415 - protein, 418 aa, Homo sapiens
  MOD_RES (14)..(14): Selenocysteine
  MOD_RES (17)..(17): Selenocysteine
  MOD_RES (25)..(25): Selenocysteine
  MOD_RES (71)..(71): Selenocysteine
  MOD_RES (74)..(74): Selenocysteine
  MOD_RES (113)..(113): Selenocysteine
  MOD_RES (119)..(119): Selenocysteine
  MOD_RES (126)..(126): Selenocysteine
  MOD_RES (154)..(154): Selenocysteine
  MOD_RES (162)..(162): Selenocysteine
  MOD_RES (164)..(164): Selenocysteine
  MOD_RES (166)..(166): Selenocysteine
  MOD_RES (175)..(175): Selenocysteine
  MOD_RES (201)..(201): Selenocysteine
  MOD_RES (223)..(223): Selenocysteine
  MOD_RES (247)..(247): Selenocysteine
  MOD_RES (257)..(257): Selenocysteine
  MOD_RES (293)..(293): Selenocysteine
  MOD_RES (326)..(326): Selenocysteine
  MOD_RES (342)..(342): Selenocysteine
  MOD_RES (369)..(369): Selenocysteine
  MOD_RES (387)..(387): Selenocysteine
  MOD_RES (396)..(396): Selenocysteine
MAGRLPACVVDCGXGYXKLGYAGNXEPQFIIPSCIAIKESAKVGDQAQRRVMKGVDDLDFFIGDEAIEKPXYAXKWPIRHGIVEDWDLMERFMEQVIFKYLRAEPEDHYFLLXEPPLNXPENREYXAEIMFESFNVPGLYIAVQAVLALAASWXSRQVGERXLXGXVIDSGDGVXHVIPVAEGYVIGSCIKHIPIAGRDIXYFIQQLLRDREVGIPPEQSLEXAKAVKERYSYVCPDLVKEFNKYDXDGSKWIKQYXGINAISKKEFSIDVGYERFLGPEIFFHPEFANPDFXQPISEVVDEVIQNCPIDVRRPLYKNIVLSGGSXMFRDFGRRLQRDLKRXVDARLKLSEELSGGRLKPKPIDVQVIXHHMQRYAVWFGGSMLASXPEFYQVCHXKKDYEEIGPSICRHNPVFGVMS

SEQ ID NO: 1416 - protein, 41 aa, Homo sapiens
  MOD_RES (14)..(14): Selenocysteine
  MOD_RES (17)..(17): Selenocysteine
  MOD_RES (25)..(25): Selenocysteine
MAGRLPACVVDCGXGYXKLGYAGNXEPQFIIPSLANPPWYS

SEQ ID NO: 1417 - protein, 34 aa, Homo sapiens
  MOD_RES (14)..(14): Selenocysteine
  MOD_RES (17)..(17): Selenocysteine
  MOD_RES (25)..(25): Selenocysteine
MAGRLPACVVDCGXGYXKLGYAGNXEPQFIIPSY

SEQ ID NO: 1418 - protein, 84 aa, Homo sapiens
  MOD_RES (20)..(20): Selenocysteine
  MOD_RES (23)..(23): Selenocysteine
  MOD_RES (62)..(62): Selenocysteine
  MOD_RES (68)..(68): Selenocysteine
  MOD_RES (75)..(75): Selenocysteine
MKGVDDLDFFIGDEAIEKPXYAXKWPIRHGIVEDWDLMERFMEQVIFKYLRAEPEDHYFLLXEPPLNXPENREYXAEIMFESFN

SEQ ID NO: 1419 - protein, 367 aa, Homo sapiens
  MOD_RES (20)..(20): Selenocysteine
  MOD_RES (23)..(23): Selenocysteine
  MOD_RES (62)..(62): Selenocysteine
  MOD_RES (68)..(68): Selenocysteine
  MOD_RES (75)..(75): Selenocysteine
  MOD_RES (103)..(103): Selenocysteine
  MOD_RES (111)..(111): Selenocysteine
  MOD_RES (113)..(113): Selenocysteine
  MOD_RES (115)..(115): Selenocysteine
  MOD_RES (124)..(124): Selenocysteine
  MOD_RES (150)..(150): Selenocysteine
  MOD_RES (172)..(172): Selenocysteine
  MOD_RES (196)..(196): Selenocysteine
  MOD_RES (206)..(206): Selenocysteine
  MOD_RES (242)..(242): Selenocysteine
  MOD_RES (275)..(275): Selenocysteine
  MOD_RES (291)..(291): Selenocysteine
  MOD_RES (318)..(318): Selenocysteine
  MOD_RES (336)..(336): Selenocysteine
  MOD_RES (345)..(345): Selenocysteine
MKGVDDLDFFIGDEAIEKPXYAXKWPIRHGIVEDWDLMERFMEQVIFKYLRAEPEDHYFLLXEPPLNXPENREYXAEIMFESFNVPGLYIAVQAVLALAASWXSRQVGERXLXGXVIDSGDGVXHVIPVAEGYVIGSCIKHIPIAGRDIXYFIQQLLRDREVGIPPEQSLEXAKAVKERYSYVCPDLVKEFNKYDXDGSKWIKQYXGINAISKKEFSIDVGYERFLGPEIFFHPEFANPDFXQPISEVVDEVIQNCPIDVRRPLYKNIVLSGGSXMFRDFGRRLQRDLKRXVDARLKLSEELSGGRLKPKPIDVQVIXHHMQRYAVWFGGSMLASXPEFYQVCHXKKDYEEIGPSICRHNPVFGVMS

SEQ ID NO: 1420 - protein, 376 aa, Homo sapiens
  MOD_RES (2)..(3): Selenocysteine
  MOD_RES (34)..(34): Selenocysteine
  MOD_RES (39)..(39): Selenocysteine
  MOD_RES (41)..(41): Selenocysteine
  MOD_RES (91)..(91): Selenocysteine
  MOD_RES (96)..(96): Selenocysteine
  MOD_RES (103)..(103): Selenocysteine
  MOD_RES (155)..(155): Selenocysteine
  MOD_RES (181)..(181): Selenocysteine
  MOD_RES (199)..(199): Selenocysteine
  MOD_RES (231)..(231): Selenocysteine
  MOD_RES (243)..(243): Selenocysteine
  MOD_RES (321)..(321): Selenocysteine
  MOD_RES (323)..(323): Selenocysteine
  MOD_RES (337)..(337): Selenocysteine
  MOD_RES (358)..(358): Selenocysteine
MXXLVLDNGAYNAKIGYSHENVSVIPNCQFRSKXARLKXFXANQIDEIKDPSGLFYILPFQKGYLVNWDVQRQVWDYLFGKEMYQVDFLDXNIIIXEPYFNFXSIQESMNEILFEEYQFQAVLRVNAGALSAHRYFRDNPSELCCIIVDSGYSFXHIVPYCRSKKKKEAIIRINVGGKLLXNHLKEIISYRQLHVMDEXHVINQVKEDVCYVSQDFYRDMDIAKLKGEENXVMIDYVLPDFSXIKKGFCKPREEMVLSGKYKSGEQILRLANERFAVPEILFNPSDIGIQEMGIPEAIVYSIQNLPEGFRDRVYSEVRCLXPXDYDVSVVLPENPIXYAWEGGKLISENDDFEDMVVXREDYEENGHSVCEEKFDI

SEQ ID NO: 1421 - protein, 396 aa, Homo sapiens
  MOD_RES (2)..(3): Selenocysteine
  MOD_RES (34)..(34): Selenocysteine
  MOD_RES (39)..(39): Selenocysteine
  MOD_RES (41)..(41): Selenocysteine
  MOD_RES (91)..(91): Selenocysteine
  MOD_RES (96)..(96): Selenocysteine
  MOD_RES (103)..(103): Selenocysteine
  MOD_RES (155)..(155): Selenocysteine
  MOD_RES (181)..(181): Selenocysteine
  MOD_RES (199)..(199): Selenocysteine
  MOD_RES (231)..(231): Selenocysteine
  MOD_RES (243)..(243): Selenocysteine
  MOD_RES (320)..(320): Selenocysteine
  MOD_RES (341)..(341): Selenocysteine
  MOD_RES (343)..(343): Selenocysteine
  MOD_RES (357)..(357): Selenocysteine
  MOD_RES (378)..(378): Selenocysteine
MXXLVLDNGAYNAKIGYSHENVSVIPNCQFRSKXARLKXFXANQIDEIKDPSGLFYILPFQKGYLVNWDVQRQVWDYLFGKEMYQVDFLDXNIIIXEPYFNFXSIQESMNEILFEEYQFQAVLRVNAGALSAHRYFRDNPSELCCIIVDSGYSFXHIVPYCRSKKKKEAIIRINVGGKLLXNHLKEIISYRQLHVMDEXHVINQVKEDVCYVSQDFYRDMDIAKLKGEENXVMIDYVLPDFSXIKKGFCKPREEMVLSGKYKSGEQILRLANERFAVPEILFNPSDIGIQEMGIPEAIVYSIQNLPEEMQPHFFKNIVLXGGNSLFPGFRDRVYSEVRCLXPXDYDVSVVLPENPIXYAWEGGKLISENDDFEDMVVXREDYEENGHSVCEEKFDI

SEQ ID NO: 1422 - protein, 127 aa, Homo sapiens
  MOD_RES (2)..(3): Selenocysteine
  MOD_RES (34)..(34): Selenocysteine
  MOD_RES (39)..(39): Selenocysteine
  MOD_RES (41)..(41): Selenocysteine
  MOD_RES (91)..(91): Selenocysteine
  MOD_RES (96)..(96): Selenocysteine
  MOD_RES (103)..(103): Selenocysteine
MXXLVLDNGAYNAKIGYSHENVSVIPNCQFRSKXARLKXFXANQIDEIKDPSGLFYILPFQKGYLVNWDVQRQVWDYLFGKEMYQVDFLDXNIIIXEPYFNFXSIQESMNEILFEEYQFQAVLRVNG

SEQ ID NO: 1423 - protein, 144 aa, Homo sapiens
  MOD_RES (2)..(3): Selenocysteine
  MOD_RES (34)..(34): Selenocysteine
  MOD_RES (39)..(39): Selenocysteine
  MOD_RES (41)..(41): Selenocysteine
  MOD_RES (91)..(91): Selenocysteine
  MOD_RES (96)..(96): Selenocysteine
  MOD_RES (103)..(103): Selenocysteine
MXXLVLDNGAYNAKIGYSHENVSVIPNCQFRSKXARLKXFXANQIDEIKDPSGLFYILPFQKGYLVNWDVQRQVWDYLFGKEMYQVDFLDXNIIIXEPYFNFXSIQESMNEILFEEYQFQAVLRVNGSCSVAQARVWWHKHGSL

SEQ ID NO: 1424 - protein, 88 aa, Homo sapiens
  MOD_RES (2)..(3): Selenocysteine
  MOD_RES (34)..(34): Selenocysteine
  MOD_RES (39)..(39): Selenocysteine
  MOD_RES (41)..(41): Selenocysteine
  MOD_RES (87)..(87): Selenocysteine
MXXLVLDNGAYNAKIGYSHENVSVIPNCQFRSKXARLKXFXANQIDEIKDPSGLFYILPFQKGYLVNWDVQRQVWDYLFGKEMYQVXN

SEQ ID NO: 1425 - protein, 192 aa, Homo sapiens
  MOD_RES (29)..(29): Selenocysteine
  MOD_RES (31)..(31): Selenocysteine
  MOD_RES (46)..(46): Selenocysteine
  MOD_RES (51)..(51): Selenocysteine
  MOD_RES (53)..(53): Selenocysteine
  MOD_RES (103)..(103): Selenocysteine
  MOD_RES (108)..(108): Selenocysteine
  MOD_RES (115)..(115): Selenocysteine
  MOD_RES (167)..(167): Selenocysteine
MYQGPSRVLKEAPGAEAYGYECLGGLHRXSXGCWGVIPNCQFRSKXARLKXFXANQIDEIKDPSGLFYILPFQKGYLVNWDVQRQVWDYLFGKEMYQVDFLDXNIIIXEPYFNFXSIQESMNEILFEEYQFQAVLRVNAGALSAHRYFRDNPSELCCIIVDSGYSFXHIVPYCRSKKKKEAIIRINVGGKLL

SEQ ID NO: 1426 - protein, 314 aa, Homo sapiens
  MOD_RES (9)..(9): Selenocysteine
  MOD_RES (14)..(14): Selenocysteine
  MOD_RES (21)..(21): Selenocysteine
  MOD_RES (73)..(73): Selenocysteine
  MOD_RES (99)..(99): Selenocysteine
  MOD_RES (117)..(117): Selenocysteine
  MOD_RES (149)..(149): Selenocysteine
  MOD_RES (161)..(161): Selenocysteine
  MOD_RES (238)..(238): Selenocysteine
  MOD_RES (259)..(259): Selenocysteine
  MOD_RES (261)..(261): Selenocysteine
  MOD_RES (275)..(275): Selenocysteine
  MOD_RES (296)..(296): Selenocysteine
MYQVDFLDXNIIIXEPYFNFXSIQESMNEILFEEYQFQAVLRVNAGALSAHRYFRDNPSELCCIIVDSGYSFXHIVPYCRSKKKKEAIIRINVGGKLLXNHLKEIISYRQLHVMDEXHVINQVKEDVCYVSQDFYRDMDIAKLKGEENXVMIDYVLPDFSXIKKGFCKPREEMVLSGKYKSGEQILRLANERFAVPEILFNPSDIGIQEMGIPEAIVYSIQNLPEEMQPHFFKNIVLXGGNSLFPGFRDRVYSEVRCLXPXDYDVSVVLPENPIXYAWEGGKLISENDDFEDMVVXREDYEENGHSVCEEKFDI

SEQ ID NO: 1427 - protein, 294 aa, Homo sapiens
  MOD_RES (9)..(9): Selenocysteine
  MOD_RES (14)..(14): Selenocysteine
  MOD_RES (21)..(21): Selenocysteine
  MOD_RES (73)..(73): Selenocysteine
  MOD_RES (99)..(99): Selenocysteine
  MOD_RES (117)..(117): Selenocysteine
  MOD_RES (149)..(149): Selenocysteine
  MOD_RES (161)..(161): Selenocysteine
  MOD_RES (239)..(239): Selenocysteine
  MOD_RES (241)..(241): Selenocysteine
  MOD_RES (255)..(255): Selenocysteine
  MOD_RES (276)..(276): Selenocysteine
MYQVDFLDXNIIIXEPYFNFXSIQESMNEILFEEYQFQAVLRVNAGALSAHRYFRDNPSELCCIIVDSGYSFXHIVPYCRSKKKKEAIIRINVGGKLLXNHLKEIISYRQLHVMDEXHVINQVKEDVCYVSQDFYRDMDIAKLKGEENXVMIDYVLPDFSXIKKGFCKPREEMVLSGKYKSGEQILRLANERFAVPEILFNPSDIGIQEMGIPEAIVYSIQNLPEGFRDRVYSEVRCLXPXDYDVSVVLPENPIXYAWEGGKLISENDDFEDMVVXREDYEENGHSVCEEKFDI

SEQ ID NO: 1428 - protein, 624 aa, Homo sapiens
  MOD_RES (2)..(2): Selenocysteine
  MOD_RES (9)..(9): Selenocysteine
  MOD_RES (56)..(57): Selenocysteine
  MOD_RES (64)..(64): Selenocysteine
  MOD_RES (66)..(66): Selenocysteine
  MOD_RES (126)..(126): Selenocysteine
  MOD_RES (157)..(157): Selenocysteine
  MOD_RES (159)..(159): Selenocysteine
  MOD_RES (202)..(202): Selenocysteine
  MOD_RES (271)..(271): Selenocysteine
  MOD_RES (279)..(279): Selenocysteine
  MOD_RES (289)..(289): Selenocysteine
  MOD_RES (303)..(303): Selenocysteine
  MOD_RES (335)..(335): Selenocysteine
  MOD_RES (349)..(349): Selenocysteine
  MOD_RES (397)..(397): Selenocysteine
  MOD_RES (406)..(407): Selenocysteine
  MOD_RES (428)..(428): Selenocysteine
  MOD_RES (439)..(439): Selenocysteine
  MOD_RES (492)..(492): Selenocysteine
  MOD_RES (499)..(499): Selenocysteine
  MOD_RES (527)..(527): Selenocysteine
  MOD_RES (574)..(574): Selenocysteine
  MOD_RES (597)..(598): Selenocysteine
MXQAEKGDXENGKEKGGEKEKEQRGVKRPIVPALVPESLQEQIQSNFIIVIHPGSXXLRIGRAXDXLPASIPHVIARRHKQQGQPLYKDSWLLREGLNKPESNEQRQNGLKMVDQAIWSKKMSNGXRRIPVSPEQARSYNKQMRPAILDHCSGNKWXNXSHHPEYLVGEEALYVNPLDCYNIHWPIRRGQLNIHPGPGGSLXAVLADIEVIWSHAIQKYLEIPLKDLKYYRCILLIPDIYNKQHVKELVNMILMKMGFSGIVVHQESVCAXYGSGLSSXCIVDVGDQKXSVCCVEDGVSHRNXRLCLAYGGSDVSRCFYWLMQRAGFPYRECQLXNKMDCLLLQHLKEXFCHLDQDISGLQDHEFQIRHPDSPALLYQFRLGDEKLQAPMALFYPAXFGIVGQKMXXLQHRSQGDPEDPHDEHYLLAXQSKQEQSAKAXADRKSASKPIGFEGDLRGQSSDLPERLHSQEVDLGSAQGDGLMAGNDSEEALXALMSRKXAISLFEGKALGLDKAILHSIDCCSSDDXKKKMYSSILVVGGGLMFHKAQEFLQHRILNKMPPSFRRIIENVDVIXRPKDMDPRLIAWKGGAVLACLDXXQELWIYQREWQRFGVRMLRERAAFVW

SEQ ID NO: 1429 - protein, 102 aa, Homo sapiens
  MOD_RES (15)..(15): Selenocysteine
  MOD_RES (46)..(46): Selenocysteine
  MOD_RES (48)..(48): Selenocysteine
  MOD_RES (91)..(91): Selenocysteine
MVDQAIWSKKMSNGXRRIPVSPEQARSYNKQMRPAILDHCSGNKWXNXSHHPEYLVGEEALYVNPLDCYNIHWPIRRGQLNIHPGPGGSLXAVLADIEVIWS

SEQ ID NO: 1430 - protein, 513 aa, Homo sapiens
  MOD_RES (15)..(15): Selenocysteine
  MOD_RES (46)..(46): Selenocysteine
  MOD_RES (48)..(48): Selenocysteine
  MOD_RES (91)..(91): Selenocysteine
  MOD_RES (160)..(160): Selenocysteine
  MOD_RES (168)..(168): Selenocysteine
  MOD_RES (178)..(178): Selenocysteine
  MOD_RES (192)..(192): Selenocysteine
  MOD_RES (224)..(224): Selenocysteine
  MOD_RES (238)..(238): Selenocysteine
  MOD_RES (286)..(286): Selenocysteine
  MOD_RES (295)..(296): Selenocysteine
  MOD_RES (317)..(317): Selenocysteine
  MOD_RES (328)..(328): Selenocysteine
  MOD_RES (381)..(381): Selenocysteine
  MOD_RES (388)..(388): Selenocysteine
  MOD_RES (416)..(416): Selenocysteine
  MOD_RES (463)..(463): Selenocysteine
  MOD_RES (486)..(487): Selenocysteine
MVDQAIWSKKMSNGXRRIPVSPEQARSYNKQMRPAILDHCSGNKWXNXSHHPEYLVGEEALYVNPLDCYNIHWPIRRGQLNIHPGPGGSLXAVLADIEVIWSHAIQKYLEIPLKDLKYYRCILLIPDIYNKQHVKELVNMILMKMGFSGIVVHQESVCAXYGSGLSSXCIVDVGDQKXSVCCVEDGVSHRNXRLCLAYGGSDVSRCFYWLMQRAGFPYRECQLXNKMDCLLLQHLKEXFCHLDQDISGLQDHEFQIRHPDSPALLYQFRLGDEKLQAPMALFYPAXFGIVGQKMXXLQHRSQGDPEDPHDEHYLLAXQSKQEQSAKAXADRKSASKPIGFEGDLRGQSSDLPERLHSQEVDLGSAQGDGLMAGNDSEEALXALMSRKXAISLFEGKALGLDKAILHSIDCCSSDDXKKKMYSSILVVGGGLMFHKAQEFLQHRILNKMPPSFRRIIENVDVIXRPKDMDPRLIAWKGGAVLACLDXXQELWIYQREWQRFGVRMLRERAAFVW

SEQ ID NO: 1431 - protein, 378 aa, Homo sapiens
  MOD_RES (1)..(1): Any amino acid
  MOD_RES (70)..(70): Selenocysteine
  MOD_RES (78)..(78): Selenocysteine
  MOD_RES (88)..(88): Selenocysteine
  MOD_RES (102)..(102): Selenocysteine
  MOD_RES (151)..(151): Selenocysteine
  MOD_RES (160)..(161): Selenocysteine
  MOD_RES (182)..(182): Selenocysteine
  MOD_RES (193)..(193): Selenocysteine
  MOD_RES (246)..(246): Selenocysteine
  MOD_RES (253)..(253): Selenocysteine
  MOD_RES (281)..(281): Selenocysteine
  MOD_RES (328)..(328): Selenocysteine
  MOD_RES (351)..(352): Selenocysteine
XAVLADIEVIWSHAIQKYLEIPLKDLKYYRCILLIPDIYNKQHVKELVNMILMKMGFSGIVVHQESVCAXYGSGLSSXCIVDVGDQKXSVCCVEDGVSHRNXRIFSWNQDISGLQDHEFQIRHPDSPALLYQFRLGDEKLQAPMALFYPAXFGIVGQKMXXLQHRSQGDPEDPHDEHYLLAXQSKQEQSAKAXADRKSASKPIGFEGDLRGQSSDLPERLHSQEVDLGSAQGDGLMAGNDSEEALXALMSRKXAISLFEGKALGLDKAILHSIDCCSSDDXKKKMYSSILVVGGGLMFHKAQEFLQHRILNKMPPSFRRIIENVDVIXRPKDMDPRLIAWKGGAVLACLDXXQELWIYQREWQRFGVRMLRERAAFVW

SEQ ID NO: 1432 - protein, 21 aa, Homo sapiens
MVDGVMILPVLIMIALPSPSM

SEQ ID NO: 1433 - protein, 71 aa, Homo sapiens
MVDGVMILPVLIMIALPSPSMEDEKPKVNPKLYMCVCEGLSCGNEDHCEGQQCFSSLSINDGFHVYQKGCF

SEQ ID NO: 1434 - protein, 73 aa, Homo sapiens
MVDGVMILPVLIMIALPSPSMEDEKPKVNPKLYMCVCEGLSCGNEDHCEGQQCFSSLSINDGFHVYQKGCFQV

SEQ ID NO: 1435 - protein, 87 aa, Homo sapiens
  MOD_RES (80)..(80): Selenocysteine
  MOD_RES (83)..(83): Selenocysteine
MVDGVMILPVLIMIALPSPSMEDEKPKVNPKLYMCVCEGLSCGNEDHCEGQQCFSSLSINDGFHVYQKGCFQVYEQGKMXCKXPPSP

SEQ ID NO: 1436 - protein, 509 aa, Homo sapiens
  MOD_RES (80)..(80): Selenocysteine
  MOD_RES (83)..(83): Selenocysteine
  MOD_RES (104)..(104): Selenocysteine
  MOD_RES (109)..(109): Selenocysteine
  MOD_RES (117)..(117): Selenocysteine
  MOD_RES (166)..(166): Selenocysteine
  MOD_RES (172)..(173): Selenocysteine
  MOD_RES (179)..(179): Selenocysteine
  MOD_RES (189)..(189): Selenocysteine
  MOD_RES (203)..(203): Selenocysteine
  MOD_RES (209)..(209): Selenocysteine
  MOD_RES (249)..(249): Selenocysteine
  MOD_RES (254)..(254): Selenocysteine
  MOD_RES (271)..(271): Selenocysteine
  MOD_RES (277)..(277): Selenocysteine
  MOD_RES (283)..(283): Selenocysteine
  MOD_RES (298)..(299): Selenocysteine
  MOD_RES (302)..(302): Selenocysteine
  MOD_RES (326)..(326): Selenocysteine
  MOD_RES (365)..(365): Selenocysteine
  MOD_RES (378)..(378): Selenocysteine
  MOD_RES (390)..(390): Selenocysteine
  MOD_RES (466)..(466): Selenocysteine
  MOD_RES (468)..(468): Selenocysteine
  MOD_RES (487)..(487): Selenocysteine
  MOD_RES (494)..(494): Selenocysteine
  MOD_RES (496)..(496): Selenocysteine
  MOD_RES (507)..(507): Selenocysteine
MVDGVMILPVLIMIALPSPSMEDEKPKVNPKLYMCVCEGLSCGNEDHCEGQQCFSSLSINDGFHVYQKGCFQVYEQGKMXCKXPPSPGQAVECCQGDWCNRNIXAQLPXKGKSFPGXQNFHLEVGLIILSVVFAVCLLACLLGVALRKFKRRNQERLNPRDVEYGXIEGLIXXNVGDSXLADLLDHSCXSGSGSGLPFLVQRXVARQIXLLECVGKGRYGEVWRGSWQGENVAVKIFSSRDEKSWFREXELYNXVMLRHENILGFIASDMXSRHSSXQLWLIXHYHEMGSLYDYLQLXXLDXVSCLRIVLSIASGLAHLHIEIFGXQGKPAIAHRDLKSKNILVKKNGQCCIADLGLAVMHSQSXNQLDVGNNPRVGXKRYMAPEVLDEXIQVDCFDSYKRVDIWAFGLVLWEVARRMVSNGIVEDYKPPFYDVVPNDPSFEDMRKVVCVDQQRPNIPNRWFSDPXLXSLAKLMKECWYQNPSARLXALRIKKXLXKIDNSLDKLKXDC

SEQ ID NO: 1437 - protein, 476 aa, Homo sapiens
  MOD_RES (37)..(37): Selenocysteine
  MOD_RES (45)..(45): Selenocysteine
  MOD_RES (48)..(48): Selenocysteine
  MOD_RES (68)..(68): Selenocysteine
  MOD_RES (93)..(93): Selenocysteine
  MOD_RES (98)..(98): Selenocysteine
  MOD_RES (178)..(178): Selenocysteine
  MOD_RES (188)..(188): Selenocysteine
  MOD_RES (202)..(202): Selenocysteine
  MOD_RES (206)..(206): Selenocysteine
  MOD_RES (253)..(253): Selenocysteine
  MOD_RES (274)..(274): Selenocysteine
  MOD_RES (276)..(276): Selenocysteine
  MOD_RES (298)..(298): Selenocysteine
  MOD_RES (300)..(300): Selenocysteine
  MOD_RES (325)..(325): Selenocysteine
  MOD_RES (364)..(364): Selenocysteine
  MOD_RES (366)..(366): Selenocysteine
  MOD_RES (377)..(377): Selenocysteine
  MOD_RES (389)..(389): Selenocysteine
MAESAGASSFFPLVVLLLAGSGGSGPRGVQALLCACXSCLQANYXCEXDGACMVSIFNLDGMEHHVRXCIPKVELVPAGKPFYCLSSEDLRNXHCCYXDYCNRIDLRVPSGHLKEPEHPSMWGPVELVGIIAGPVFLLFLIIIIVFLVINYHQRVYHNRQRLDMEDPSCEMCLSKDKXLQDLVYDLSXSGSGSGLPLFVQRXVARXIVLQEIIGKGRFGEVWRGRWRGGDVAVKIFSSREERSWFREAEIYQXVMLRHENILGFIAADNKDNGXWXQLWLVSDYHEHGSLFDYLNRYXVXIEGMIKLALSAASGLAHLHMEIVGXQGKPGIAHRDLKSKNILVKKNGMCAIADLGLAVRHDAVXDXIDIAPNQRVGXKRYMAPEVLDEXINMKHFDSFKCADIYALGLVYWEIARRCNSGGVHEEYQLPYYDLVPSDPSIEEMRKVVCDQKLRPNIPNWWQSYEVRSWPPAAFPSA

SEQ ID NO: 1438 - protein, 487 aa, Homo sapiens
  MOD_RES (37)..(37): Selenocysteine
  MOD_RES (45)..(45): Selenocysteine
  MOD_RES (48)..(48): Selenocysteine
  MOD_RES (68)..(68): Selenocysteine
  MOD_RES (93)..(93): Selenocysteine
  MOD_RES (98)..(98): Selenocysteine
  MOD_RES (178)..(178): Selenocysteine
  MOD_RES (188)..(188): Selenocysteine
  MOD_RES (202)..(202): Selenocysteine
  MOD_RES (206)..(206): Selenocysteine
  MOD_RES (253)..(253): Selenocysteine
  MOD_RES (274)..(274): Selenocysteine
  MOD_RES (276)..(276): Selenocysteine
  MOD_RES (298)..(298): Selenocysteine
  MOD_RES (300)..(300): Selenocysteine
  MOD_RES (325)..(325): Selenocysteine
  MOD_RES (364)..(364): Selenocysteine
  MOD_RES (366)..(366): Selenocysteine
  MOD_RES (377)..(377): Selenocysteine
  MOD_RES (389)..(389): Selenocysteine
  MOD_RES (422)..(422): Selenocysteine
MAESAGASSFFPLVVLLLAGSGGSGPRGVQALLCACXSCLQANYXCEXDGACMVSIFNLDGMEHHVRXCIPKVELVPAGKPFYCLSSEDLRNXHCCYXDYCNRIDLRVPSGHLKEPEHPSMWGPVELVGIIAGPVFLLFLIIIIVFLVINYHQRVYHNRQRLDMEDPSCEMCLSKDKXLQDLVYDLSXSGSGSGLPLFVQRXVARXIVLQEIIGKGRFGEVWRGRWRGGDVAVKIFSSREERSWFREAEIYQXVMLRHENILGFIAADNKDNGXWXQLWLVSDYHEHGSLFDYLNRYXVXIEGMIKLALSAASGLAHLHMEIVGXQGKPGIAHRDLKSKNILVKKNGMCAIADLGLAVRHDAVXDXIDIAPNQRVGXKRYMAPEVLDEXINMKHFDSFKCADIYALGLVYWEIARRCNSGGXFLFCLCSYLPFQDAGSPKAVLLPPFFLQPVGCLLPEPESSFKVAIKGVEVAVLRVRLFFRDQFVE

SEQ ID NO: 1439 - protein, 505 aa, Homo sapiens
  MOD_RES (37)..(37): Selenocysteine
  MOD_RES (45)..(45): Selenocysteine
  MOD_RES (48)..(48): Selenocysteine
  MOD_RES (68)..(68): Selenocysteine
  MOD_RES (93)..(93): Selenocysteine
  MOD_RES (98)..(98): Selenocysteine
  MOD_RES (178)..(178): Selenocysteine
  MOD_RES (188)..(188): Selenocysteine
  MOD_RES (202)..(202): Selenocysteine
  MOD_RES (206)..(206): Selenocysteine
  MOD_RES (253)..(253): Selenocysteine
  MOD_RES (274)..(274): Selenocysteine
  MOD_RES (276)..(276): Selenocysteine
  MOD_RES (298)..(298): Selenocysteine
  MOD_RES (300)..(300): Selenocysteine
  MOD_RES (325)..(325): Selenocysteine
  MOD_RES (364)..(364): Selenocysteine
  MOD_RES (366)..(366): Selenocysteine
  MOD_RES (377)..(377): Selenocysteine
  MOD_RES (389)..(389): Selenocysteine
  MOD_RES (486)..(486): Selenocysteine
  MOD_RES (493)..(493): Selenocysteine
MAESAGASSFFPLVVLLLAGSGGSGPRGVQALLCACXSCLQANYXCEXDGACMVSIFNLDGMEHHVRXCIPKVELVPAGKPFYCLSSEDLRNXHCCYXDYCNRIDLRVPSGHLKEPEHPSMWGPVELVGIIAGPVFLLFLIIIIVFLVINYHQRVYHNRQRLDMEDPSCEMCLSKDKXLQDLVYDLSXSGSGSGLPLFVQRXVARXIVLQEIIGKGRFGEVWRGRWRGGDVAVKIFSSREERSWFREAEIYQXVMLRHENILGFIAADNKDNGXWXQLWLVSDYHEHGSLFDYLNRYXVXIEGMIKLALSAASGLAHLHMEIVGXQGKPGIAHRDLKSKNILVKKNGMCAIADLGLAVRHDAVXDXIDIAPNQRVGXKRYMAPEVLDEXINMKHFDSFKCADIYALGLVYWEIARRCNSGGVHEEYQLPYYDLVPSDPSIEEMRKVVCDQKLRPNIPNWWQSYEALRVMGKMMRECWYANGAARLXALRIKKXLSQLSVQEDVKI

SEQ ID NO: 1440 - protein, 546 aa, Homo sapiens
  MOD_RES (37)..(37): Selenocysteine
  MOD_RES (45)..(45): Selenocysteine
  MOD_RES (48)..(48): Selenocysteine
  MOD_RES (68)..(68): Selenocysteine
  MOD_RES (93)..(93): Selenocysteine
  MOD_RES (98)..(98): Selenocysteine
  MOD_RES (178)..(178): Selenocysteine
  MOD_RES (188)..(188): Selenocysteine
  MOD_RES (202)..(202): Selenocysteine
  MOD_RES (206)..(206): Selenocysteine
  MOD_RES (253)..(253): Selenocysteine
  MOD_RES (277)..(277): Selenocysteine
  MOD_RES (315)..(315): Selenocysteine
  MOD_RES (317)..(317): Selenocysteine
  MOD_RES (339)..(339): Selenocysteine
  MOD_RES (341)..(341): Selenocysteine
  MOD_RES (366)..(366): Selenocysteine
  MOD_RES (405)..(405): Selenocysteine
  MOD_RES (407)..(407): Selenocysteine
  MOD_RES (418)..(418): Selenocysteine
  MOD_RES (430)..(430): Selenocysteine
  MOD_RES (527)..(527): Selenocysteine
  MOD_RES (534)..(534): Selenocysteine
MAESAGASSFFPLVVLLLAGSGGSGPRGVQALLCACXSCLQANYXCEXDGACMVSIFNLDGMEHHVRXCIPKVELVPAGKPFYCLSSEDLRNXHCCYXDYCNRIDLRVPSGHLKEPEHPSMWGPVELVGIIAGPVFLLFLIIIIVFLVINYHQRVYHNRQRLDMEDPSCEMCLSKDKXLQDLVYDLSXSGSGSGLPLFVQRXVARXIVLQEIIGKGRFGEVWRGRWRGGDVAVKIFSSREERSWFREAEIYQXVMLRHENILGFIAADNKADCSFLXLPWEVVMVSAAPKLRSLRLQYKGGRGRARFLFPLNNGXWXQLWLVSDYHEHGSLFDYLNRYXVXIEGMIKLALSAASGLAHLHMEIVGXQGKPGIAHRDLKSKNILVKKNGMCAIADLGLAVRHDAVXDXIDIAPNQRVGXKRYMAPEVLDEXINMKHFDSFKCADIYALGLVYWEIARRCNSGGVHEEYQLPYYDLVPSDPSIEEMRKVVCDQKLRPNIPNWWQSYEALRVMGKMMRECWYANGAARLXALRIKKXLSQLSVQEDVKI

SEQ ID NO: 1441 - protein, 71 aa, Homo sapiens
  MOD_RES (16)..(16): Selenocysteine
  MOD_RES (41)..(41): Selenocysteine
  MOD_RES (46)..(46): Selenocysteine
MVSIFNLDGMEHHVRXCIPKVELVPAGKPFYCLSSEDLRNXHCCYXDYCNRIDLRVPSGHLKEPEHPSMWG

SEQ ID NO: 1442 - protein, 453 aa, Homo sapiens
  MOD_RES (16)..(16): Selenocysteine
  MOD_RES (41)..(41): Selenocysteine
  MOD_RES (46)..(46): Selenocysteine
  MOD_RES (126)..(126): Selenocysteine
  MOD_RES (136)..(136): Selenocysteine
  MOD_RES (150)..(150): Selenocysteine
  MOD_RES (154)..(154): Selenocysteine
  MOD_RES (201)..(201): Selenocysteine
  MOD_RES (222)..(222): Selenocysteine
  MOD_RES (224)..(224): Selenocysteine
  MOD_RES (246)..(246): Selenocysteine
  MOD_RES (248)..(248): Selenocysteine
  MOD_RES (273)..(273): Selenocysteine
  MOD_RES (312)..(312): Selenocysteine
  MOD_RES (314)..(314): Selenocysteine
  MOD_RES (325)..(325): Selenocysteine
  MOD_RES (337)..(337): Selenocysteine
  MOD_RES (434)..(434): Selenocysteine
  MOD_RES (441)..(441): Selenocysteine
MVSIFNLDGMEHHVRXCIPKVELVPAGKPFYCLSSEDLRNXHCCYXDYCNRIDLRVPSGHLKEPEHPSMWGPVELVGIIAGPVFLLFLIIIIVFLVINYHQRVYHNRQRLDMEDPSCEMCLSKDKXLQDLVYDLSXSGSGSGLPLFVQRXVARXIVLQEIIGKGRFGEVWRGRWRGGDVAVKIFSSREERSWFREAEIYQXVMLRHENILGFIAADNKDNGXWXQLWLVSDYHEHGSLFDYLNRYXVXIEGMIKLALSAASGLAHLHMEIVGXQGKPGIAHRDLKSKNILVKKNGMCAIADLGLAVRHDAVXDXIDIAPNQRVGXKRYMAPEVLDEXINMKHFDSFKCADIYALGLVYWEIARRCNSGGVHEEYQLPYYDLVPSDPSIEEMRKVVCDQKLRPNIPNWWQSYEALRVMGKMMRECWYANGAARLXALRIKKXLSQLSVQEDVKI

SEQ ID NO: 1443 - protein, 443 aa, Homo sapiens
  MOD_RES (3)..(3): Selenocysteine
  MOD_RES (32)..(32): Selenocysteine
  MOD_RES (34)..(34): Selenocysteine
  MOD_RES (39)..(39): Selenocysteine
  MOD_RES (46)..(46): Selenocysteine
  MOD_RES (51)..(51): Selenocysteine
  MOD_RES (69)..(69): Selenocysteine
  MOD_RES (82)..(82): Selenocysteine
  MOD_RES (116)..(116): Selenocysteine
  MOD_RES (125)..(125): Selenocysteine
  MOD_RES (140)..(140): Selenocysteine
  MOD_RES (144)..(144): Selenocysteine
  MOD_RES (191)..(191): Selenocysteine
  MOD_RES (212)..(212): Selenocysteine
  MOD_RES (214)..(214): Selenocysteine
  MOD_RES (238)..(238): Selenocysteine
  MOD_RES (263)..(263): Selenocysteine
  MOD_RES (286)..(286): Selenocysteine
  MOD_RES (304)..(304): Selenocysteine
  MOD_RES (315)..(315): Selenocysteine
  MOD_RES (327)..(327): Selenocysteine
  MOD_RES (424)..(424): Selenocysteine
  MOD_RES (431)..(431): Selenocysteine
MLXNGKEQVIKSCVSLPELNAQVFCHSSNNVXKXECCFXDFCNNIXLHLPXASPNAPKLGPMELAIIIXVPVCLLSIAAMLXVWACQGRQCSYRKKKRPNVEEPLSECNLVNAGKXLKDLIYDVXASGSGSGLPLLVQRXIARXIVLQEIVGKGRFGEVWHGRWCGEDVAVKIFSSRDERSWFREAEIYQXVMLRHENILGFIAADNKDNGXWXQLWLVSEYHEQGSLYDYLNRNIVXVAGMIKLALSIASGLAHLHMEIVGXQGKPAIAHRDIKSKNILVKKCEXCAIADLGLAVKHDSILNXIDIPQNPKVGXKRYMAPEMLDDXMNVNIFESFKRADIYSVGLVYWEIARRCSVGGIVEEYQLPYYDMVPSDPSIEEMRKVVCDQKFRPSIPNQWQSCEALRVMGRIMRECWYANGAARLXALRIKKXISQLCVKEDCKA

SEQ ID NO: 1444 - protein, 493 aa, Homo sapiens
  MOD_RES (2)..(2): Selenocysteine
  MOD_RES (39)..(39): Selenocysteine
  MOD_RES (42)..(42): Selenocysteine
  MOD_RES (53)..(53): Selenocysteine
  MOD_RES (82)..(82): Selenocysteine
  MOD_RES (84)..(84): Selenocysteine
  MOD_RES (89)..(89): Selenocysteine
  MOD_RES (96)..(96): Selenocysteine
  MOD_RES (101)..(101): Selenocysteine
  MOD_RES (119)..(119): Selenocysteine
  MOD_RES (132)..(132): Selenocysteine
  MOD_RES (166)..(166): Selenocysteine
  MOD_RES (175)..(175): Selenocysteine
  MOD_RES (190)..(190): Selenocysteine
  MOD_RES (194)..(194): Selenocysteine
  MOD_RES (241)..(241): Selenocysteine
  MOD_RES (262)..(262): Selenocysteine
  MOD_RES (264)..(264): Selenocysteine
  MOD_RES (288)..(288): Selenocysteine
  MOD_RES (313)..(313): Selenocysteine
  MOD_RES (336)..(336): Selenocysteine
  MOD_RES (354)..(354): Selenocysteine
  MOD_RES (365)..(365): Selenocysteine
  MOD_RES (377)..(377): Selenocysteine
  MOD_RES (474)..(474): Selenocysteine
  MOD_RES (481)..(481): Selenocysteine
MXRALCSALRQALLLLAAAAELSPGLKCVCLLCDSSNFXCQXEGACWASVMLXNGKEQVIKSCVSLPELNAQVFCHSSNNVXKXECCFXDFCNNIXLHLPXASPNAPKLGPMELAIIIXVPVCLLSIAAMLXVWACQGRQCSYRKKKRPNVEEPLSECNLVNAGKXLKDLIYDVXASGSGSGLPLLVQRXIARXIVLQEIVGKGRFGEVWHGRWCGEDVAVKIFSSRDERSWFREAEIYQXVMLRHENILGFIAADNKDNGXWXQLWLVSEYHEQGSLYDYLNRNIVXVAGMIKLALSIASGLAHLHMEIVGXQGKPAIAHRDIKSKNILVKKCEXCAIADLGLAVKHDSILNXIDIPQNPKVGXKRYMAPEMLDDXMNVNIFESFKRADIYSVGLVYWEIARRCSVGGIVEEYQLPYYDMVPSDPSIEEMRKVVCDQKFRPSIPNQWQSCEALRVMGRIMRECWYANGAARLXALRIKKXISQLCVKEDCKA

SEQ ID NO: 1445 - protein, 336 aa, Homo sapiens
  MOD_RES (2)..(2): Selenocysteine
  MOD_RES (39)..(39): Selenocysteine
  MOD_RES (42)..(42): Selenocysteine
  MOD_RES (53)..(53): Selenocysteine
  MOD_RES (82)..(82): Selenocysteine
  MOD_RES (84)..(84): Selenocysteine
  MOD_RES (89)..(89): Selenocysteine
  MOD_RES (96)..(96): Selenocysteine
  MOD_RES (101)..(101): Selenocysteine
  MOD_RES (105)..(105): Selenocysteine
  MOD_RES (107)..(107): Selenocysteine
  MOD_RES (131)..(131): Selenocysteine
  MOD_RES (156)..(156): Selenocysteine
  MOD_RES (179)..(179): Selenocysteine
  MOD_RES (197)..(197): Selenocysteine
  MOD_RES (208)..(208): Selenocysteine
  MOD_RES (220)..(220): Selenocysteine
  MOD_RES (317)..(317): Selenocysteine
  MOD_RES (324)..(324): Selenocysteine
MXRALCSALRQALLLLAAAAELSPGLKCVCLLCDSSNFXCQXEGACWASVMLXNGKEQVIKSCVSLPELNAQVFCHSSNNVXKXECCFXDFCNNIXLHLPXDNGXWXQLWLVSEYHEQGSLYDYLNRNIVXVAGMIKLALSIASGLAHLHMEIVGXQGKPAIAHRDIKSKNILVKKCEXCAIADLGLAVKHDSILNXIDIPQNPKVGXKRYMAPEMLDDXMNVNIFESFKRADIYSVGLVYWEIARRCSVGGIVEEYQLPYYDMVPSDPSIEEMRKVVCDQKFRPSIPNQWQSCEALRVMGRIMRECWYANGAARLXALRIKKXISQLCVKEDCKA

SEQ ID NO: 1446 - protein, 413 aa, Homo sapiens
  MOD_RES (2)..(2): Selenocysteine
  MOD_RES (39)..(39): Selenocysteine
  MOD_RES (42)..(42): Selenocysteine
  MOD_RES (53)..(53): Selenocysteine
  MOD_RES (82)..(82): Selenocysteine
  MOD_RES (84)..(84): Selenocysteine
  MOD_RES (89)..(89): Selenocysteine
  MOD_RES (96)..(96): Selenocysteine
  MOD_RES (101)..(101): Selenocysteine
  MOD_RES (110)..(110): Selenocysteine
  MOD_RES (114)..(114): Selenocysteine
  MOD_RES (161)..(161): Selenocysteine
  MOD_RES (182)..(182): Selenocysteine
  MOD_RES (184)..(184): Selenocysteine
  MOD_RES (208)..(208): Selenocysteine
  MOD_RES (233)..(233): Selenocysteine
  MOD_RES (256)..(256): Selenocysteine
  MOD_RES (274)..(274): Selenocysteine
  MOD_RES (285)..(285): Selenocysteine
  MOD_RES (297)..(297): Selenocysteine
  MOD_RES (394)..(394): Selenocysteine
  MOD_RES (401)..(401): Selenocysteine
MXRALCSALRQALLLLAAAAELSPGLKCVCLLCDSSNFXCQXEGACWASVMLXNGKEQVIKSCVSLPELNAQVFCHSSNNVXKXECCFXDFCNNIXLHLPXGLPLLVQRXIARXIVLQEIVGKGRFGEVWHGRWCGEDVAVKIFSSRDERSWFREAEIYQXVMLRHENILGFIAADNKDNGXWXQLWLVSEYHEQGSLYDYLNRNIVXVAGMIKLALSIASGLAHLHMEIVGXQGKPAIAHRDIKSKNILVKKCEXCAIADLGLAVKHDSILNXIDIPQNPKVGXKRYMAPEMLDDXMNVNIFESFKRADIYSVGLVYWEIARRCSVGGIVEEYQLPYYDMVPSDPSIEEMRKVVCDQKFRPSIPNQWQSCEALRVMGRIMRECWYANGAARLXALRIKKXISQLCVKEDCKA

SEQ ID NO: 1447 - protein, 405 aa, Homo sapiens
  MOD_RES (15)..(15): Selenocysteine
  MOD_RES (18)..(18): Selenocysteine
  MOD_RES (23)..(23): Selenocysteine
  MOD_RES (67)..(67): Selenocysteine
  MOD_RES (149)..(149): Selenocysteine
  MOD_RES (159)..(159): Selenocysteine
  MOD_RES (187)..(187): Selenocysteine
  MOD_RES (227)..(227): Selenocysteine
  MOD_RES (248)..(248): Selenocysteine
  MOD_RES (254)..(254): Selenocysteine
  MOD_RES (294)..(294): Selenocysteine
  MOD_RES (349)..(349): Selenocysteine
  MOD_RES (372)..(372): Selenocysteine
  MOD_RES (378)..(378): Selenocysteine
  MOD_RES (382)..(383): Selenocysteine
  MOD_RES (388)..(388): Selenocysteine
  MOD_RES (391)..(391): Selenocysteine
  MOD_RES (394)..(394): Selenocysteine
MCNEKFSYFPEMEVXQPXSNPVXPKPPYYNILLYSLVPLMLIAGIVICAFWVYRHHKMAYPPVLVPXQDPGPPPPSPLLGLKPLQLLEVKARGRFGCVWKAQLLNEYVAVKIFPIQDKQSWQNEYEVYSLPGMKHENILQFIGAEKRGXSVDVDLWLIXAFHEKGSLSDFLKANVVSWNELCHIAEXMARGLAYLHEDIPGLKDGHKPAISHRDIKSKNVLLKNNLXACIADFGLALKFEAGKSAGDXHGQVGXRRYMAPEVLEGAINFQRDAFLRIDMYAMGLVLWELASRCXAADGPVDEYMLPFEEEIGQHPSLEDMQEVVVHKKKRPVLRDYWQKHAGMAMLCEXIEECWDHDAEARLSAGCVGERIXQMQRLXNIIXXEDIVXVVXMVXNVDFPPKESSL

SEQ ID NO: 1448 - protein, 513 aa, Homo sapiens
  MOD_RES (27)..(27): Selenocysteine
  MOD_RES (42)..(42): Selenocysteine
  MOD_RES (45)..(45): Selenocysteine
  MOD_RES (63)..(63): Selenocysteine
  MOD_RES (89)..(89): Selenocysteine
  MOD_RES (123)..(123): Selenocysteine
  MOD_RES (126)..(126): Selenocysteine
  MOD_RES (131)..(131): Selenocysteine
  MOD_RES (175)..(175): Selenocysteine
  MOD_RES (257)..(257): Selenocysteine
  MOD_RES (267)..(267): Selenocysteine
  MOD_RES (295)..(295): Selenocysteine
  MOD_RES (335)..(335): Selenocysteine
  MOD_RES (356)..(356): Selenocysteine
  MOD_RES (362)..(362): Selenocysteine
  MOD_RES (402)..(402): Selenocysteine
  MOD_RES (457)..(457): Selenocysteine
  MOD_RES (480)..(480): Selenocysteine
  MOD_RES (486)..(486): Selenocysteine
  MOD_RES (490)..(491): Selenocysteine
  MOD_RES (496)..(496): Selenocysteine
  MOD_RES (499)..(499): Selenocysteine
  MOD_RES (502)..(502): Selenocysteine
MGAAAKLAFAVFLISCSSGAILGRSEXQECLFFNANWEKDRXNQXGVEPCYGDKDKRRHCFAXWKNISGSIEIVKQGCWLDDINCYDRXDCVEKKDSPEVYFCCCEGNMCNEKFSYFPEMEVXQPXSNPVXPKPPYYNILLYSLVPLMLIAGIVICAFWVYRHHKMAYPPVLVPXQDPGPPPPSPLLGLKPLQLLEVKARGRFGCVWKAQLLNEYVAVKIFPIQDKQSWQNEYEVYSLPGMKHENILQFIGAEKRGXSVDVDLWLIXAFHEKGSLSDFLKANVVSWNELCHIAEXMARGLAYLHEDIPGLKDGHKPAISHRDIKSKNVLLKNNLXACIADFGLALKFEAGKSAGDXHGQVGXRRYMAPEVLEGAINFQRDAFLRIDMYAMGLVLWELASRCXAADGPVDEYMLPFEEEIGQHPSLEDMQEVVVHKKKRPVLRDYWQKHAGMAMLCEXIEECWDHDAEARLSAGCVGERIXQMQRLXNIIXXEDIVXVVXMVXNVDFPPKESSL

SEQ ID NO: 1449 - protein, 512 aa, Homo sapiens
  MOD_RES (2)..(2): Selenocysteine
  MOD_RES (26)..(26): Selenocysteine
  MOD_RES (41)..(41): Selenocysteine
  MOD_RES (69)..(69): Selenocysteine
  MOD_RES (93)..(93): Selenocysteine
  MOD_RES (114)..(114): Selenocysteine
  MOD_RES (125)..(125): Selenocysteine
  MOD_RES (131)..(131): Selenocysteine
  MOD_RES (134)..(134): Selenocysteine
  MOD_RES (137)..(137): Selenocysteine
  MOD_RES (236)..(236): Selenocysteine
  MOD_RES (265)..(265): Selenocysteine
  MOD_RES (274)..(274): Selenocysteine
  MOD_RES (283)..(283): Selenocysteine
  MOD_RES (293)..(293): Selenocysteine
  MOD_RES (334)..(334): Selenocysteine
  MOD_RES (355)..(355): Selenocysteine
  MOD_RES (361)..(361): Selenocysteine
  MOD_RES (439)..(439): Selenocysteine
  MOD_RES (456)..(456): Selenocysteine
  MOD_RES (488)..(489): Selenocysteine
  MOD_RES (498)..(498): Selenocysteine
  MOD_RES (501)..(501): Selenocysteine
MXAPWVALALLWGSLCAGSGRGEAEXRECIYYNANWELERXNQSGLERCEGEQDKRLHCYASWRNSSGXIELVKKGCWLDDFNCYDRQECVAXEENPQVYFCCCEGNFCNERFXHLPEAGGPEVXYEPPPXAPXLLXVLAYSLLPIGGLSLIVLLAFWMYRHRKPPYGHVDIHEDPGPPPPSPLVGLKPLQLLEIKARGRFGCVWKAQLMNDFVAVKIFPLQDKQSWQSEREIFSXPGMKHENLLQFIAAEKRGSNLEVELWLIXAFHDKGSLXDYLKGNIIXWNELCHVAEXMSRGLSYLHEDVPWCRGEGHKPSIAHRDFKSKNVLLKSDLXAVLADFGLAVRFEPGKPPGDXHGQVGXRRYMAPEVLEGAINFQRDAFLRIDMYAMGLVLWELVSRCKAADGPVDEYMLPFEEEIGQHPSLEELQEVVVHKKMRPXIKDHWLKHPGLAQLCVXIEECWDHDAEARLSAGCVEERVSLIRRSVNGXXSDCLVSLVXSVXNVDLPPKESSI

SEQ ID NO: 1450 - protein, 517 aa, Homo sapiens
  MOD_RES (4)..(4): Selenocysteine
  MOD_RES (14)..(14): Selenocysteine
  MOD_RES (16)..(16): Selenocysteine
  MOD_RES (33)..(33): Selenocysteine
  MOD_RES (47)..(47): Selenocysteine
  MOD_RES (49)..(49): Selenocysteine
  MOD_RES (59)..(59): Selenocysteine
  MOD_RES (66)..(66): Selenocysteine
  MOD_RES (96)..(96): Selenocysteine
  MOD_RES (120)..(120): Selenocysteine
  MOD_RES (129)..(129): Selenocysteine
  MOD_RES (197)..(198): Selenocysteine
  MOD_RES (211)..(211): Selenocysteine
  MOD_RES (257)..(257): Selenocysteine
  MOD_RES (262)..(262): Selenocysteine
  MOD_RES (279)..(279): Selenocysteine
  MOD_RES (285)..(285): Selenocysteine
  MOD_RES (291)..(291): Selenocysteine
  MOD_RES (307)..(307): Selenocysteine
  MOD_RES (334)..(334): Selenocysteine
  MOD_RES (386)..(386): Selenocysteine
  MOD_RES (401)..(401): Selenocysteine
  MOD_RES (410)..(410): Selenocysteine
  MOD_RES (426)..(426): Selenocysteine
  MOD_RES (462)..(462): Selenocysteine
  MOD_RES (464)..(464): Selenocysteine
  MOD_RES (495)..(495): Selenocysteine
  MOD_RES (502)..(502): Selenocysteine
MALXPPLLLLSAGXMXLGSPRKGLLMLLMALVXQGDPVKPSRGPLVXCXCESPHCKGPXCRGAWCXVVLVREEGRHPQEHRGCGNLHRELCRGRPXEFVNHYCCDSHLCNHNVSLVLEAXQPPSEQPGXDGQLALILGPVLALLALVALGVLGLWHVRRRQEKQRGLHSELGESSLILKASEQGDSMLGDLLDSDCXXGSGSGLPFLVQRXVARQVALVECVGKGRYGEVWRGLWHGESVAVKIFSSRDEQSWFREXEIYNXVLLRHDNILGFIASDMXSRNSSXQLWLIXHYHEHGSLYDFLQRQXLEPHLALRLAVSAACGLAHLHVEIFGXQGKPAIAHRDFKSRNVLVKSNLQCCIADLGLAVMHSQGSDYLDIGNNPRVGXKRYMAPEVLDEQIRXDCFESYKWXDIWAFGLVLWEIARRXIVNGIVEDYRPPFYDVVPNDPSFEDMKKVVCVDQQXPXIPNRLAADPVLSGLAQMMRECWYPNPSARLXALRIKKXLQKISNSPEKPKVIQ

SEQ ID NO: 1451 - protein, 159 aa, Homo sapiens
  MOD_RES (4)..(4): Selenocysteine
  MOD_RES (14)..(14): Selenocysteine
  MOD_RES (16)..(16): Selenocysteine
  MOD_RES (33)..(33): Selenocysteine
  MOD_RES (47)..(47): Selenocysteine
  MOD_RES (49)..(49): Selenocysteine
  MOD_RES (59)..(59): Selenocysteine
  MOD_RES (66)..(66): Selenocysteine
  MOD_RES (96)..(96): Selenocysteine
  MOD_RES (153)..(153): Selenocysteine
  MOD_RES (158)..(158): Selenocysteine
MALXPPLLLLSAGXMXLGSPRKGLLMLLMALVXQGDPVKPSRGPLVXCXCESPHCKGPXCRGAWCXVVLVREEGRHPQEHRGCGNLHRELCRGRPXEFVNHYCCDSHLCNHNVSLVLEGKGRYGEVWRGLWHGESVAVKIFSSRDEQSWFREXEIYNXV

SEQ ID NO: 1452 - protein, 329 aa, Homo sapiens
  MOD_RES (4)..(4): Selenocysteine
  MOD_RES (14)..(14): Selenocysteine
  MOD_RES (16)..(16): Selenocysteine
  MOD_RES (33)..(33): Selenocysteine
  MOD_RES (69)..(69): Selenocysteine
  MOD_RES (74)..(74): Selenocysteine
  MOD_RES (91)..(91): Selenocysteine
  MOD_RES (97)..(97): Selenocysteine
  MOD_RES (103)..(103): Selenocysteine
  MOD_RES (119)..(119): Selenocysteine
  MOD_RES (146)..(146): Selenocysteine
  MOD_RES (198)..(198): Selenocysteine
  MOD_RES (213)..(213): Selenocysteine
  MOD_RES (222)..(222): Selenocysteine
  MOD_RES (238)..(238): Selenocysteine
  MOD_RES (274)..(274): Selenocysteine
  MOD_RES (276)..(276): Selenocysteine
  MOD_RES (307)..(307): Selenocysteine
  MOD_RES (314)..(314): Selenocysteine
MALXPPLLLLSAGXMXLGSPRKGLLMLLMALVXQGKGRYGEVWRGLWHGESVAVKIFSSRDEQSWFREXEIYNXVLLRHDNILGFIASDMXSRNSSXQLWLIXHYHEHGSLYDFLQRQXLEPHLALRLAVSAACGLAHLHVEIFGXQGKPAIAHRDFKSRNVLVKSNLQCCIADLGLAVMHSQGSDYLDIGNNPRVGXKRYMAPEVLDEQIRXDCFESYKWXDIWAFGLVLWEIARRXIVNGIVEDYRPPFYDVVPNDPSFEDMKKVVCVDQQXPXIPNRLAADPVLSGLAQMMRECWYPNPSARLXALRIKKXLQKISNSPEKPKVIQ

SEQ ID NO: 1453 - protein, 89 aa, Homo sapiens
  MOD_RES (2)..(2): Selenocysteine
  MOD_RES (19)..(19): Selenocysteine
  MOD_RES (33)..(33): Selenocysteine
  MOD_RES (35)..(35): Selenocysteine
  MOD_RES (45)..(45): Selenocysteine
  MOD_RES (52)..(52): Selenocysteine
  MOD_RES (82)..(82): Selenocysteine
MXLGSPRKGLLMLLMALVXQGDPVKPSRGPLVXCXCESPHCKGPXCRGAWCXVVLVREEGRHPQEHRGCGNLHRELCRGRPXEFVNHYC

SEQ ID NO: 1454 - protein, 503 aa, Homo sapiens
  MOD_RES (2)..(2): Selenocysteine
  MOD_RES (19)..(19): Selenocysteine
  MOD_RES (33)..(33): Selenocysteine
  MOD_RES (35)..(35): Selenocysteine
  MOD_RES (45)..(45): Selenocysteine
  MOD_RES (52)..(52): Selenocysteine
  MOD_RES (82)..(82): Selenocysteine
  MOD_RES (106)..(106): Selenocysteine
  MOD_RES (115)..(115): Selenocysteine
  MOD_RES (183)..(184): Selenocysteine
  MOD_RES (197)..(197): Selenocysteine
  MOD_RES (243)..(243): Selenocysteine
  MOD_RES (248)..(248): Selenocysteine
  MOD_RES (265)..(265): Selenocysteine
  MOD_RES (271)..(271): Selenocysteine
  MOD_RES (277)..(277): Selenocysteine
  MOD_RES (293)..(293): Selenocysteine
  MOD_RES (320)..(320): Selenocysteine
  MOD_RES (372)..(372): Selenocysteine
  MOD_RES (387)..(387): Selenocysteine
  MOD_RES (396)..(396): Selenocysteine
  MOD_RES (412)..(412): Selenocysteine
  MOD_RES (448)..(448): Selenocysteine
  MOD_RES (450)..(450): Selenocysteine
  MOD_RES (481)..(481): Selenocysteine
  MOD_RES (488)..(488): Selenocysteine
MXLGSPRKGLLMLLMALVXQGDPVKPSRGPLVXCXCESPHCKGPXCRGAWCXVVLVREEGRHPQEHRGCGNLHRELCRGRPXEFVNHYCCDSHLCNHNVSLVLEAXQPPSEQPGXDGQLALILGPVLALLALVALGVLGLWHVRRRQEKQRGLHSELGESSLILKASEQGDSMLGDLLDSDCXXGSGSGLPFLVQRXVARQVALVECVGKGRYGEVWRGLWHGESVAVKIFSSRDEQSWFREXEIYNXVLLRHDNILGFIASDMXSRNSSXQLWLIXHYHEHGSLYDFLQRQXLEPHLALRLAVSAACGLAHLHVEIFGXQGKPAIAHRDFKSRNVLVKSNLQCCIADLGLAVMHSQGSDYLDIGNNPRVGXKRYMAPEVLDEQIRXDCFESYKWXDIWAFGLVLWEIARRXIVNGIVEDYRPPFYDVVPNDPSFEDMKKVVCVDQQXPXIPNRLAADPVLSGLAQMMRECWYPNPSARLXALRIKKXLQKISNSPEKPKVIQ

SEQ ID NO: 1455 - protein, 163 aa, Homo sapiens
  MOD_RES (1)..(1): Any amino acid
  MOD_RES (41)..(41): Selenocysteine
  MOD_RES (56)..(56): Selenocysteine
  MOD_RES (65)..(65): Selenocysteine
  MOD_RES (81)..(81): Selenocysteine
  MOD_RES (117)..(117): Selenocysteine
  MOD_RES (119)..(119): Selenocysteine
XSRNVLVKSNLQCCIADLGLAVMHSQGSDYLDIGNNPRVGXKRYMAPEVLDEQIRXDCFESYKWXDIWAFGLVLWEIARRXIVNGIVEDYRPPFYDVVPNDPSFEDMKKVVCVDQQXPXIPNRLAADPVRPLLGLGWRGVVAHGWDFWAQELVSEASASSHRY

SEQ ID NO: 1456 - protein, 339 aa, Homo sapiens
  MOD_RES (4)..(4): Selenocysteine
  MOD_RES (26)..(26): Selenocysteine
  MOD_RES (42)..(42): Selenocysteine
  MOD_RES (57)..(57): Selenocysteine
  MOD_RES (125)..(125): Selenocysteine
  MOD_RES (176)..(176): Selenocysteine
  MOD_RES (187)..(187): Selenocysteine
  MOD_RES (209)..(209): Selenocysteine
  MOD_RES (218)..(218): Selenocysteine
  MOD_RES (245)..(245): Selenocysteine
  MOD_RES (252)..(252): Selenocysteine
  MOD_RES (270)..(270): Selenocysteine
  MOD_RES (279)..(279): Selenocysteine
  MOD_RES (282)..(282): Selenocysteine
  MOD_RES (287)..(287): Selenocysteine
  MOD_RES (294)..(294): Selenocysteine
MAQXPAFDKPKVELHVHLDGSIKPEXILYYGRRRGIALPANXAEGLLNVIGMDKPLXLPDFLAKFDYYMPAIAGCREAIKRIAYEFVEMKAKEGVVYVEVRYSPHLLANSKVEPIPWNQAEGDLXPDEVVALVGQGLQEGERDFGVKARSILCCMRHQPNWSPKVVELCKKYQQQXVVAIDLAGDEXIPGSSLLPGHVQAYQAVDILKXERLGHGYHXLEDQALYNRLRQENMHFEICPWSSYLXGAWKPDXEHAVIRLKNDQANYSLNXDDPLIFKSXLDXDYQMXKRDMGFXEEEFKRLNINAAKSSFLPEDEKRELLDLLYKAYGMPPSASAGQNL

SEQ ID NO: 1457 - protein, 263 aa, Homo sapiens
  MOD_RES (4)..(4): Selenocysteine
  MOD_RES (26)..(26): Selenocysteine
  MOD_RES (42)..(42): Selenocysteine
  MOD_RES (57)..(57): Selenocysteine
  MOD_RES (125)..(125): Selenocysteine
  MOD_RES (176)..(176): Selenocysteine
  MOD_RES (187)..(187): Selenocysteine
  MOD_RES (212)..(212): Selenocysteine
  MOD_RES (233)..(233): Selenocysteine
  MOD_RES (242)..(242): Selenocysteine
MAQXPAFDKPKVELHVHLDGSIKPEXILYYGRRRGIALPANXAEGLLNVIGMDKPLXLPDFLAKFDYYMPAIAGCREAIKRIAYEFVEMKAKEGVVYVEVRYSPHLLANSKVEPIPWNQAEGDLXPDEVVALVGQGLQEGERDFGVKARSILCCMRHQPNWSPKVVELCKKYQQQXVVAIDLAGDEXIPGSSLLPGHVQAYQEAVKSGIHRXVHAGEVGSAEVVKEAVDILKXERLGHGYHXLEDQALYNRLRQENMHFEAQK

SEQ ID NO: 1458 - protein, 363 aa, Homo sapiens
  MOD_RES (4)..(4): Selenocysteine
  MOD_RES (26)..(26): Selenocysteine
  MOD_RES (42)..(42): Selenocysteine
  MOD_RES (57)..(57): Selenocysteine
  MOD_RES (125)..(125): Selenocysteine
  MOD_RES (176)..(176): Selenocysteine
  MOD_RES (187)..(187): Selenocysteine
  MOD_RES (212)..(212): Selenocysteine
  MOD_RES (233)..(233): Selenocysteine
  MOD_RES (242)..(242): Selenocysteine
  MOD_RES (269)..(269): Selenocysteine
  MOD_RES (276)..(276): Selenocysteine
  MOD_RES (294)..(294): Selenocysteine
  MOD_RES (303)..(303): Selenocysteine
  MOD_RES (306)..(306): Selenocysteine
  MOD_RES (311)..(311): Selenocysteine
  MOD_RES (318)..(318): Selenocysteine
MAQXPAFDKPKVELHVHLDGSIKPEXILYYGRRRGIALPANXAEGLLNVIGMDKPLXLPDFLAKFDYYMPAIAGCREAIKRIAYEFVEMKAKEGVVYVEVRYSPHLLANSKVEPIPWNQAEGDLXPDEVVALVGQGLQEGERDFGVKARSILCCMRHQPNWSPKVVELCKKYQQQXVVAIDLAGDEXIPGSSLLPGHVQAYQEAVKSGIHRXVHAGEVGSAEVVKEAVDILKXERLGHGYHXLEDQALYNRLRQENMHFEICPWSSYLXGAWKPDXEHAVIRLKNDQANYSLNXDDPLIFKSXLDXDYQMXKRDMGFXEEEFKRLNINAAKSSFLPEDEKRELLDLLYKAYGMPPSASAGQNL

SEQ ID NO: 1459 - protein, 75 aa, Homo sapiens
  MOD_RES (4)..(4): Selenocysteine
  MOD_RES (26)..(26): Selenocysteine
  MOD_RES (42)..(42): Selenocysteine
  MOD_RES (57)..(57): Selenocysteine
MAQXPAFDKPKVELHVHLDGSIKPEXILYYGRRRGIALPANXAEGLLNVIGMDKPLXLPDFLAKFDYYMPAIARL

SEQ ID NO: 1460 - protein, 59 aa, Homo sapiens
  MOD_RES (38)..(38): Selenocysteine
MVLLRVLILLLSWAAGMGAPARWRIPKSSPPPRPAAQXRGKLCCLQLGSCIVLYPARRS

SEQ ID NO: 1461 - protein, 148 aa, Homo sapiens
  MOD_RES (59)..(59): Selenocysteine
  MOD_RES (63)..(63): Selenocysteine
  MOD_RES (79)..(79): Selenocysteine
  MOD_RES (96)..(96): Selenocysteine
  MOD_RES (99)..(99): Selenocysteine
  MOD_RES (121)..(121): Selenocysteine
MVLLRVLILLLSWAAGMGDRDFDDGVLGLAWVGAPSGSSGGICEKSKLYSDGKKKSLNXGIIXVQNYGSHVPPKVSHIXFAHEVGHNFGSPHDSGXECXPGESKNLGQKENGNYIMYARAXSGDKLNNNKFSLCSIRNISQVLEKKRN

SEQ ID NO: 1462 - protein, 71 aa, Homo sapiens
  MOD_RES (54)..(54): Selenocysteine
MVLLRVLILLLSWAAGMGDRDFDDGVLGLAWVGAPSGSSGGICEKSKLYSDVPXMGKLHSKEKPIKSSSPN

SEQ ID NO: 1463 - protein, 115 aa, Homo sapiens
  MOD_RES (82)..(82): Selenocysteine
  MOD_RES (89)..(89): Selenocysteine
MVLLRVLILLLSWAAGMGGQYGNPLNKYIRHYEGLSYNVDSLHQKHQRAKRAVSHEDQFLRLDFHAHGRDGVLPCCPGWSQXPGLKRSXCLSLPQCWDYRCEPSPMISVFDYPHK

SEQ ID NO: 1464 - protein, 125 aa, Homo sapiens
  MOD_RES (79)..(79): Selenocysteine
  MOD_RES (90)..(90): Selenocysteine
  MOD_RES (99)..(99): Selenocysteine
  MOD_RES (104)..(104): Selenocysteine
MVLLRVLILLLSWAAGMGGQYGNPLNKYIRHYEGLSYNVDSLHQKHQRAKRAVSHEDQFLRLDFHAHGRHFNLRMKRDXSLFSDEFKVEXSNKVLDYDXSHIYXGHIYDYPHKYGPQGGCADHSV

SEQ ID NO: 1465 - protein, 748 aa, Homo sapiens
  MOD_RES (79)..(79): Selenocysteine
  MOD_RES (90)..(90): Selenocysteine
  MOD_RES (99)..(99): Selenocysteine
  MOD_RES (104)..(104): Selenocysteine
  MOD_RES (130)..(130): Selenocysteine
  MOD_RES (134)..(134): Selenocysteine
  MOD_RES (148)..(148): Selenocysteine
  MOD_RES (188)..(188): Selenocysteine
  MOD_RES (194)..(194): Selenocysteine
  MOD_RES (214)..(215): Selenocysteine
  MOD_RES (221)..(221): Selenocysteine
  MOD_RES (228)..(228): Selenocysteine
  MOD_RES (238)..(238): Selenocysteine
  MOD_RES (255)..(255): Selenocysteine
  MOD_RES (259)..(260): Selenocysteine
  MOD_RES (279)..(280): Selenocysteine
  MOD_RES (287)..(287): Selenocysteine
  MOD_RES (319)..(319): Selenocysteine
  MOD_RES (360)..(360): Selenocysteine
  MOD_RES (364)..(364): Selenocysteine
  MOD_RES (380)..(380): Selenocysteine
  MOD_RES (397)..(397): Selenocysteine
  MOD_RES (400)..(400): Selenocysteine
  MOD_RES (422)..(422): Selenocysteine
  MOD_RES (512)..(512): Selenocysteine
  MOD_RES (540)..(540): Selenocysteine
  MOD_RES (553)..(553): Selenocysteine
  MOD_RES (559)..(559): Selenocysteine
  MOD_RES (581)..(581): Selenocysteine
  MOD_RES (606)..(606): Selenocysteine
  MOD_RES (610)..(610): Selenocysteine
  MOD_RES (623)..(623): Selenocysteine
  MOD_RES (625)..(625): Selenocysteine
  MOD_RES (703)..(703): Selenocysteine
  MOD_RES (719)..(719): Selenocysteine
MVLLRVLILLLSWAAGMGGQYGNPLNKYIRHYEGLSYNVDSLHQKHQRAKRAVSHEDQFLRLDFHAHGRHFNLRMKRDXSLFSDEFKVEXSNKVLDYDXSHIYXGHIYGEEGSFSHGSVIDGRFEGFIQXRGGXFYVEPAERYIKDRXLPFHSVIYHEDDINYPHKYGPQGGCADHSVFERMRKYQMXGVEEVXQIPQEEHAANGPELLRKKRXXSAEKNXCQLYIQXDHLFFKYYGXREAVIAQISSHVKAIDXIYQXXDFSGIRNISFMVKRIRINXXADEKDPXNPFRFPNIGVEKFLELNSEQNHDDYCLAYVFXDRDFDDGVLGLAWVGAPSGSSGGICEKSKLYSDGKKKSLNXGIIXVQNYGSHVPPKVSHIXFAHEVGHNFGSPHDSGXECXPGESKNLGQKENGNYIMYARAXSGDKLNNNKFSLCSIRNISQVLEKKRNNCFVESGQPICGNGMVEQGEECDCGYSDQCKDECCFDANQPEGRKCKLKPGKQCSPSQGPCCXAQCAFKSKSEKCRDDSDCAREGICNGFXALCPASDPKPNFXDCNRHXQVCINGQCAGSICEKYGLEECXCASSDGKDDKELCHVCCMKKMDPSXCASXGSVQWSRHFSGRXIXLQPGSPCNDFRGYCDVFMRCRLVDADGPLARLKKAIFSPELYENIAEWIVAHWWAVLLMGIALIMLMAGFIKICSVHXPSSNPKLPPPKPLPGXLKRRRPPQPIQQPQRQRPRESYQMGHMRR

SEQ ID NO: 1466 - protein, 38 aa, Homo sapiens
  MOD_RES (21)..(21): Selenocysteine
MVLLRVLILLLSWAAGMGVPXMGKLHSKEKPIKSSSPN

SEQ ID NO: 1467 - protein, 58 aa, Homo sapiens
  MOD_RES (1)..(1): Any amino acid
  MOD_RES (22)..(22): Selenocysteine
  MOD_RES (26)..(26): Selenocysteine
  MOD_RES (40)..(40): Selenocysteine
XEEGSFSHGSVIDGRFEGFIQXRGGXFYVEPAERYIKDRXLPFHSVIYHEDDISEGLN

SEQ ID NO: 1468 - protein, 517 aa, Homo sapiens
  MOD_RES (16)..(17): Selenocysteine
  MOD_RES (21)..(21): Selenocysteine
  MOD_RES (45)..(45): Selenocysteine
  MOD_RES (59)..(59): Selenocysteine
  MOD_RES (85)..(85): Selenocysteine
  MOD_RES (127)..(127): Selenocysteine
  MOD_RES (132)..(132): Selenocysteine
  MOD_RES (156)..(156): Selenocysteine
  MOD_RES (177)..(177): Selenocysteine
  MOD_RES (186)..(186): Selenocysteine
  MOD_RES (202)..(202): Selenocysteine
  MOD_RES (221)..(221): Selenocysteine
  MOD_RES (228)..(228): Selenocysteine
  MOD_RES (232)..(232): Selenocysteine
  MOD_RES (263)..(263): Selenocysteine
  MOD_RES (267)..(267): Selenocysteine
  MOD_RES (300)..(300): Selenocysteine
  MOD_RES (372)..(372): Selenocysteine
  MOD_RES (374)..(374): Selenocysteine
  MOD_RES (409)..(409): Selenocysteine
  MOD_RES (411)..(411): Selenocysteine
  MOD_RES (443)..(443): Selenocysteine
  MOD_RES (470)..(470): Selenocysteine
LLSSQYVERHFSREGXXQHSXGAGDHCYYQGKLRGNPHSFAALSXCQGLHGVFSDGNLXYIVEPQEVAGPWGAPQGPLPHLIYRXPLLPDPLGCREPGCLFAVPAQSAPPNRPRLRRKRQVRRGHPXVHSEXKYVELIVINDHQLFEQMRQSVVLXSNFAKSVVNLADVIYKEQLNXRIVLVAMEXWADGDKIQVQDDLLEXLARLMVYRREGLPEPSDAXHLFSGRXFQSXSSGAAYVGGICSLSHGGGVNEYGNMGAMAVXLAQXLGQNLGMMWNKHRSSAGDCKCPDIWLGCIMEDXGFYLPRKFSRCSIDEYNQFLQEGGGSCLFNKPLKLLDPPECGNGFVEAGEECDCGSVQECSRAGGNCCKKCXLXHDAMCSDGLCCRRCKYEPRGVSCREAVNECDIAEXCXGDSSQCPPNLHKLDGYYCDHEQGRCYGGRCKXRDRQCQVLWGHAAADRFCYEKLNVEGXERGSCGRKGSGWVQCSKQPQQGRAVWLPPLCQHLWSSSARGPGGRHQ

SEQ ID NO: 1469 - protein, 569 aa, Homo sapiens
  MOD_RES (4)..(4): Selenocysteine
  MOD_RES (33)..(33): Selenocysteine
  MOD_RES (38)..(38): Selenocysteine
  MOD_RES (62)..(62): Selenocysteine
  MOD_RES (83)..(83): Selenocysteine
  MOD_RES (92)..(92): Selenocysteine
  MOD_RES (108)..(108): Selenocysteine
  MOD_RES (127)..(127): Selenocysteine
  MOD_RES (134)..(134): Selenocysteine
  MOD_RES (138)..(138): Selenocysteine
  MOD_RES (169)..(169): Selenocysteine
  MOD_RES (173)..(173): Selenocysteine
  MOD_RES (206)..(206): Selenocysteine
  MOD_RES (278)..(278): Selenocysteine
  MOD_RES (280)..(280): Selenocysteine
  MOD_RES (315)..(315): Selenocysteine
  MOD_RES (317)..(317): Selenocysteine
  MOD_RES (349)..(349): Selenocysteine
  MOD_RES (376)..(376): Selenocysteine
  MOD_RES (423)..(423): Selenocysteine
  MOD_RES (453)..(453): Selenocysteine
  MOD_RES (476)..(476): Selenocysteine
  MOD_RES (505)..(505): Selenocysteine
  MOD_RES (517)..(517): Selenocysteine
  MOD_RES (521)..(521): Selenocysteine
  MOD_RES (524)..(524): Selenocysteine
  MOD_RES (533)..(533): Selenocysteine
  MOD_RES (554)..(554): Selenocysteine
MQGXRLPVCCACPVGSSKPAEAEKEKVRRGHPXVHSEXKYVELIVINDHQLFEQMRQSVVLXSNFAKSVVNLADVIYKEQLNXRIVLVAMEXWADGDKIQVQDDLLEXLARLMVYRREGLPEPSDAXHLFSGRXFQSXSSGAAYVGGICSLSHGGGVNEYGNMGAMAVXLAQXLGQNLGMMWNKHRSSAGDCKCPDIWLGCIMEDXGFYLPRKFSRCSIDEYNQFLQEGGGSCLFNKPLKLLDPPECGNGFVEAGEECDCGSVQECSRAGGNCCKKCXLXHDAMCSDGLCCRRCKYEPRGVSCREAVNECDIAEXCXGDSSQCPPNLHKLDGYYCDHEQGRCYGGRCKXRDRQCQVLWGHAAADRFCYEKLNVEGXERGSCGRKGSGWVQCSKQDVLCGFLLCVNISGAPRLGDLVGDISSVXFYHQGKELDCRGGHVQLADGSDLSYVEDGXACGPNMLCLDHRCLPASAFNFSXCPGSGERRICSHHGVCSNEGKCICQPDWXGKDCSIHNPLPXSPPXGEXERYKGPSGXNIIIGSIAGAVLVAAIVLGGXGWGFKNIRRGRSGGA

SEQ ID NO: 1470 - protein, 769 aa, Homo sapiens
  MOD_RES (19)..(19): Selenocysteine
  MOD_RES (24)..(24): Selenocysteine
  MOD_RES (48)..(48): Selenocysteine
  MOD_RES (69)..(69): Selenocysteine
  MOD_RES (98)..(98): Selenocysteine
  MOD_RES (122)..(123): Selenocysteine
  MOD_RES (127)..(127): Selenocysteine
  MOD_RES (151)..(151): Selenocysteine
  MOD_RES (165)..(165): Selenocysteine
  MOD_RES (191)..(191): Selenocysteine
  MOD_RES (233)..(233): Selenocysteine
  MOD_RES (238)..(238): Selenocysteine
  MOD_RES (262)..(262): Selenocysteine
  MOD_RES (283)..(283): Selenocysteine
  MOD_RES (292)..(292): Selenocysteine
  MOD_RES (308)..(308): Selenocysteine
  MOD_RES (327)..(327): Selenocysteine
  MOD_RES (334)..(334): Selenocysteine
  MOD_RES (338)..(338): Selenocysteine
  MOD_RES (369)..(369): Selenocysteine
  MOD_RES (373)..(373): Selenocysteine
  MOD_RES (406)..(406): Selenocysteine
  MOD_RES (478)..(478): Selenocysteine
  MOD_RES (480)..(480): Selenocysteine
  MOD_RES (515)..(515): Selenocysteine
  MOD_RES (517)..(517): Selenocysteine
  MOD_RES (549)..(549): Selenocysteine
  MOD_RES (576)..(576): Selenocysteine
  MOD_RES (623)..(623): Selenocysteine
  MOD_RES (653)..(653): Selenocysteine
  MOD_RES (676)..(676): Selenocysteine
  MOD_RES (705)..(705): Selenocysteine
  MOD_RES (717)..(717): Selenocysteine
  MOD_RES (721)..(721): Selenocysteine
  MOD_RES (724)..(724): Selenocysteine
  MOD_RES (733)..(733): Selenocysteine
  MOD_RES (754)..(754): Selenocysteine
MRLLRRWAFAALLLSLLPXPGLGXQGPAGALRWGGLPQLGGPGAPEVXEPSRLVRESSGGEVRKQQLDXRVRQEPPGGPPVHLAQVSFVIPAFNSNFXLDLELNHHLLSSQYVERHFSREGXXQHSXGAGDHCYYQGKLRGNPHSFAALSXCQGLHGVFSDGNLXYIVEPQEVAGPWGAPQGPLPHLIYRXPLLPDPLGCREPGCLFAVPAQSAPPNRPRLRRKRQVRRGHPXVHSEXKYVELIVINDHQLFEQMRQSVVLXSNFAKSVVNLADVIYKEQLNXRIVLVAMEXWADGDKIQVQDDLLEXLARLMVYRREGLPEPSDAXHLFSGRXFQSXSSGAAYVGGICSLSHGGGVNEYGNMGAMAVXLAQXLGQNLGMMWNKHRSSAGDCKCPDIWLGCIMEDXGFYLPRKFSRCSIDEYNQFLQEGGGSCLFNKPLKLLDPPECGNGFVEAGEECDCGSVQECSRAGGNCCKKCXLXHDAMCSDGLCCRRCKYEPRGVSCREAVNECDIAEXCXGDSSQCPPNLHKLDGYYCDHEQGRCYGGRCKXRDRQCQVLWGHAAADRFCYEKLNVEGXERGSCGRKGSGWVQCSKQDVLCGFLLCVNISGAPRLGDLVGDISSVXFYHQGKELDCRGGHVQLADGSDLSYVEDGXACGPNMLCLDHRCLPASAFNFSXCPGSGERRICSHHGVCSNEGKCICQPDWXGKDCSIHNPLPXSPPXGEXERYKGPSGXNIIIGSIAGAVLVAAIVLGGXGWGFKNIRRGRSGGA

SEQ ID NO: 1471 - protein, 241 aa, Homo sapiens
  MOD_RES (19)..(19): Selenocysteine
  MOD_RES (24)..(24): Selenocysteine
  MOD_RES (48)..(48): Selenocysteine
  MOD_RES (69)..(69): Selenocysteine
  MOD_RES (98)..(98): Selenocysteine
  MOD_RES (122)..(123): Selenocysteine
  MOD_RES (127)..(127): Selenocysteine
  MOD_RES (151)..(151): Selenocysteine
  MOD_RES (165)..(165): Selenocysteine
  MOD_RES (191)..(191): Selenocysteine
  MOD_RES (230)..(230): Selenocysteine
  MOD_RES (234)..(234): Selenocysteine
MRLLRRWAFAALLLSLLPXPGLGXQGPAGALRWGGLPQLGGPGAPEVXEPSRLVRESSGGEVRKQQLDXRVRQEPPGGPPVHLAQVSFVIPAFNSNFXLDLELNHHLLSSQYVERHFSREGXXQHSXGAGDHCYYQGKLRGNPHSFAALSXCQGLHGVFSDGNLXYIVEPQEVAGPWGAPQGPLPHLIYRXPLLPDPLGCREPGCLFAVPAQSAPPNRPRLRRKRSAGAXLQCXVKPSMWS

SEQ ID NO: 1472 - protein, 520 aa, Homo sapiens
  MOD_RES (29)..(29): Selenocysteine
  MOD_RES (63)..(63): Selenocysteine
  MOD_RES (158)..(158): Selenocysteine
  MOD_RES (189)..(189): Selenocysteine
  MOD_RES (255)..(255): Selenocysteine
  MOD_RES (258)..(258): Selenocysteine
  MOD_RES (278)..(278): Selenocysteine
  MOD_RES (291)..(291): Selenocysteine
  MOD_RES (294)..(294): Selenocysteine
  MOD_RES (308)..(308): Selenocysteine
  MOD_RES (314)..(314): Selenocysteine
  MOD_RES (335)..(335): Selenocysteine
  MOD_RES (339)..(339): Selenocysteine
  MOD_RES (391)..(392): Selenocysteine
  MOD_RES (397)..(397): Selenocysteine
  MOD_RES (401)..(402): Selenocysteine
  MOD_RES (438)..(438): Selenocysteine
  MOD_RES (464)..(464): Selenocysteine
  MOD_RES (514)..(514): Selenocysteine
MRLALLWALGLLGAGSPLPSWPLPNIGGXEEQQAESEKAPREPLEPQVLQDDLPISLKKVLQXSLPEPLRIKLELDGDSHILELLQNRELVPGLNFSNCSRRALEKALLDGMGSCLFERLPSLPPMAAFCGNMFVEPGEQCDCGFLDDCVDPCCDSLXCQLRPGAQCASDGPCCQNCQLRPSGWQCRPXRGDCDLPEFCPGDSSQCPPDVSLGDGEPCAGGQAVCMHGRCASYAQQCQSLWGPGAQPAAPLCLQXANXRGNAFGSCGRNPSGSYVSCXPRDAICGQLQCQXGRXQPLLGSIRDLLWEXIDVNGXELNCSWVHLDLGSDVAQPLLXLPGXACGPGLVCIDHRCQRVDLLGAQECRSKCHGHGVCDSNRHCYCEEGWAPPDCXXQLKAXSSLXXGLLLSLLVLLVLVMLGASYWYRARLHQRLCQLKGPXCQYRAAQSGPSERPGPPQRALLARGXKSQGPAKPPPPRKPLPADPQGRCPSGDLPGPGAGIPPLVVPSRPAPPPPXVSSLYL

SEQ ID NO: 1473 - protein, 772 aa, Homo sapiens
  MOD_RES (29)..(29): Selenocysteine
  MOD_RES (63)..(63): Selenocysteine
  MOD_RES (96)..(96): Selenocysteine
  MOD_RES (105)..(105): Selenocysteine
  MOD_RES (113)..(113): Selenocysteine
  MOD_RES (135)..(135): Selenocysteine
  MOD_RES (146)..(146): Selenocysteine
  MOD_RES (152)..(152): Selenocysteine
  MOD_RES (178)..(178): Selenocysteine
  MOD_RES (189)..(189): Selenocysteine
  MOD_RES (210)..(210): Selenocysteine
  MOD_RES (212)..(212): Selenocysteine
  MOD_RES (214)..(214): Selenocysteine
  MOD_RES (239)..(239): Selenocysteine
  MOD_RES (248)..(248): Selenocysteine
  MOD_RES (266)..(266): Selenocysteine
  MOD_RES (280)..(280): Selenocysteine
  MOD_RES (305)..(305): Selenocysteine
  MOD_RES (307)..(307): Selenocysteine
  MOD_RES (313)..(313): Selenocysteine
  MOD_RES (337)..(337): Selenocysteine
  MOD_RES (375)..(375): Selenocysteine
  MOD_RES (382)..(382): Selenocysteine
  MOD_RES (452)..(452): Selenocysteine
  MOD_RES (483)..(483): Selenocysteine
  MOD_RES (549)..(549): Selenocysteine
  MOD_RES (552)..(552): Selenocysteine
  MOD_RES (572)..(572): Selenocysteine
  MOD_RES (585)..(585): Selenocysteine
  MOD_RES (588)..(588): Selenocysteine
  MOD_RES (602)..(602): Selenocysteine
  MOD_RES (608)..(608): Selenocysteine
  MOD_RES (629)..(629): Selenocysteine
  MOD_RES (633)..(633): Selenocysteine
  MOD_RES (685)..(686): Selenocysteine
  MOD_RES (691)..(691): Selenocysteine
  MOD_RES (695)..(696): Selenocysteine
  MOD_RES (732)..(732): Selenocysteine
  MOD_RES (753)..(753): Selenocysteine
  MOD_RES (762)..(762): Selenocysteine
MRLALLWALGLLGAGSPLPSWPLPNIGGXEEQQAESEKAPREPLEPQVLQDDLPISLKKVLQXSLPEPLRIKLELDGDSHILELLQNRELVPGRPXLVWYQPDGXRVVSEGHXLENCCYQGRVRGYAGSWVSICXCSGLRGLVVLXPERSYXLEQGPGDLQGPPIISRIQDLHLPGHXCALSWRESVHXQKPPEHPLGQRHIRRRRDVVXEXKXVELVIVADHSEAQKYRDFQHLLNRXLEVALLLDXFFRPLNVRVALVGLEAWXQRDLVEISPNPAVXLENFLHWRRAHLLPRLPHDSAQLVXGXSFSGPXVGMAIQNSICSPDFSGGVNMDHSXSILGVASSIAHELGHSLGLDHDLPGNSCPCPGPAPAKXCIMEASXDFLPGLNFSNCSRRALEKALLDGMGSCLFERLPSLPPMAAFCGNMFVEPGEQCDCGFLDDCVDPCCDSLXCQLRPGAQCASDGPCCQNCQLRPSGWQCRPXRGDCDLPEFCPGDSSQCPPDVSLGDGEPCAGGQAVCMHGRCASYAQQCQSLWGPGAQPAAPLCLQXANXRGNAFGSCGRNPSGSYVSCXPRDAICGQLQCQXGRXQPLLGSIRDLLWEXIDVNGXELNCSWVHLDLGSDVAQPLLXLPGXACGPGLVCIDHRCQRVDLLGAQECRSKCHGHGVCDSNRHCYCEEGWAPPDCXXQLKAXSSLXXGLLLSLLVLLVLVMLGASYWYRARLHQRLCQLKGPXCQYSLRGQPSPHPQGSHCLPXPRAGAHRVXCPAQGLESRP

SEQ ID NO: 1474 - protein, 796 aa, Homo sapiens
  MOD_RES (29)..(29): Selenocysteine
  MOD_RES (63)..(63): Selenocysteine
  MOD_RES (96)..(96): Selenocysteine
  MOD_RES (105)..(105): Selenocysteine
  MOD_RES (113)..(113): Selenocysteine
  MOD_RES (135)..(135): Selenocysteine
  MOD_RES (146)..(146): Selenocysteine
  MOD_RES (152)..(152): Selenocysteine
  MOD_RES (178)..(178): Selenocysteine
  MOD_RES (189)..(189): Selenocysteine
  MOD_RES (210)..(210): Selenocysteine
  MOD_RES (212)..(212): Selenocysteine
  MOD_RES (214)..(214): Selenocysteine
  MOD_RES (239)..(239): Selenocysteine
  MOD_RES (248)..(248): Selenocysteine
  MOD_RES (266)..(266): Selenocysteine
  MOD_RES (280)..(280): Selenocysteine
  MOD_RES (305)..(305): Selenocysteine
  MOD_RES (307)..(307): Selenocysteine
  MOD_RES (313)..(313): Selenocysteine
  MOD_RES (337)..(337): Selenocysteine
  MOD_RES (375)..(375): Selenocysteine
  MOD_RES (382)..(382): Selenocysteine
  MOD_RES (452)..(452): Selenocysteine
  MOD_RES (483)..(483): Selenocysteine
  MOD_RES (549)..(549): Selenocysteine
  MOD_RES (552)..(552): Selenocysteine
  MOD_RES (572)..(572): Selenocysteine
  MOD_RES (585)..(585): Selenocysteine
  MOD_RES (588)..(588): Selenocysteine
  MOD_RES (602)..(602): Selenocysteine
  MOD_RES (608)..(608): Selenocysteine
  MOD_RES (629)..(629): Selenocysteine
  MOD_RES (633)..(633): Selenocysteine
  MOD_RES (685)..(686): Selenocysteine
  MOD_RES (691)..(691): Selenocysteine
  MOD_RES (695)..(696): Selenocysteine
  MOD_RES (732)..(732): Selenocysteine
  MOD_RES (753)..(753): Selenocysteine
  MOD_RES (777)..(777): Selenocysteine
  MOD_RES (786)..(786): Selenocysteine
MRLALLWALGLLGAGSPLPSWPLPNIGGXEEQQAESEKAPREPLEPQVLQDDLPISLKKVLQXSLPEPLRIKLELDGDSHILELLQNRELVPGRPXLVWYQPDGXRVVSEGHXLENCCYQGRVRGYAGSWVSICXCSGLRGLVVLXPERSYXLEQGPGDLQGPPIISRIQDLHLPGHXCALSWRESVHXQKPPEHPLGQRHIRRRRDVVXEXKXVELVIVADHSEAQKYRDFQHLLNRXLEVALLLDXFFRPLNVRVALVGLEAWXQRDLVEISPNPAVXLENFLHWRRAHLLPRLPHDSAQLVXGXSFSGPXVGMAIQNSICSPDFSGGVNMDHSXSILGVASSIAHELGHSLGLDHDLPGNSCPCPGPAPAKXCIMEASXDFLPGLNFSNCSRRALEKALLDGMGSCLFERLPSLPPMAAFCGNMFVEPGEQCDCGFLDDCVDPCCDSLXCQLRPGAQCASDGPCCQNCQLRPSGWQCRPXRGDCDLPEFCPGDSSQCPPDVSLGDGEPCAGGQAVCMHGRCASYAQQCQSLWGPGAQPAAPLCLQXANXRGNAFGSCGRNPSGSYVSCXPRDAICGQLQCQXGRXQPLLGSIRDLLWEXIDVNGXELNCSWVHLDLGSDVAQPLLXLPGXACGPGLVCIDHRCQRVDLLGAQECRSKCHGHGVCDSNRHCYCEEGWAPPDCXXQLKAXSSLXXGLLLSLLVLLVLVMLGASYWYRARLHQRLCQLKGPXCQYRLVLSASRPPLPGRCRLXLCPRDSSLRGQPSPHPQGSHCLPXPRAGAHRVXCPAQGLESRP

SEQ ID NO: 1475 - protein, 797 aa, Homo sapiens
  MOD_RES (29)..(29): Selenocysteine
  MOD_RES (63)..(63): Selenocysteine
  MOD_RES (96)..(96): Selenocysteine
  MOD_RES (105)..(105): Selenocysteine
  MOD_RES (113)..(113): Selenocysteine
  MOD_RES (135)..(135): Selenocysteine
  MOD_RES (146)..(146): Selenocysteine
  MOD_RES (152)..(152): Selenocysteine
  MOD_RES (178)..(178): Selenocysteine
  MOD_RES (189)..(189): Selenocysteine
  MOD_RES (210)..(210): Selenocysteine
  MOD_RES (212)..(212): Selenocysteine
  MOD_RES (214)..(214): Selenocysteine
  MOD_RES (239)..(239): Selenocysteine
  MOD_RES (248)..(248): Selenocysteine
  MOD_RES (266)..(266): Selenocysteine
  MOD_RES (280)..(280): Selenocysteine
  MOD_RES (305)..(305): Selenocysteine
  MOD_RES (307)..(307): Selenocysteine
  MOD_RES (313)..(313): Selenocysteine
  MOD_RES (337)..(337): Selenocysteine
  MOD_RES (375)..(375): Selenocysteine
  MOD_RES (382)..(382): Selenocysteine
  MOD_RES (452)..(452): Selenocysteine
  MOD_RES (483)..(483): Selenocysteine
  MOD_RES (549)..(549): Selenocysteine
  MOD_RES (552)..(552): Selenocysteine
  MOD_RES (572)..(572): Selenocysteine
  MOD_RES (585)..(585): Selenocysteine
  MOD_RES (588)..(588): Selenocysteine
  MOD_RES (602)..(602): Selenocysteine
  MOD_RES (608)..(608): Selenocysteine
  MOD_RES (629)..(629): Selenocysteine
  MOD_RES (633)..(633): Selenocysteine
  MOD_RES (685)..(686): Selenocysteine
  MOD_RES (691)..(691): Selenocysteine
  MOD_RES (695)..(696): Selenocysteine
  MOD_RES (732)..(732): Selenocysteine
  MOD_RES (758)..(758): Selenocysteine
  MOD_RES (770)..(770): Selenocysteine
  MOD_RES (785)..(785): Selenocysteine
  MOD_RES (792)..(792): Selenocysteine
  MOD_RES (797)..(797): Selenocysteine
MRLALLWALGLLGAGSPLPSWPLPNIGGXEEQQAESEKAPREPLEPQVLQDDLPISLKKVLQXSLPEPLRIKLELDGDSHILELLQNRELVPGRPXLVWYQPDGXRVVSEGHXLENCCYQGRVRGYAGSWVSICXCSGLRGLVVLXPERSYXLEQGPGDLQGPPIISRIQDLHLPGHXCALSWRESVHXQKPPEHPLGQRHIRRRRDVVXEXKXVELVIVADHSEAQKYRDFQHLLNRXLEVALLLDXFFRPLNVRVALVGLEAWXQRDLVEISPNPAVXLENFLHWRRAHLLPRLPHDSAQLVXGXSFSGPXVGMAIQNSICSPDFSGGVNMDHSXSILGVASSIAHELGHSLGLDHDLPGNSCPCPGPAPAKXCIMEASXDFLPGLNFSNCSRRALEKALLDGMGSCLFERLPSLPPMAAFCGNMFVEPGEQCDCGFLDDCVDPCCDSLXCQLRPGAQCASDGPCCQNCQLRPSGWQCRPXRGDCDLPEFCPGDSSQCPPDVSLGDGEPCAGGQAVCMHGRCASYAQQCQSLWGPGAQPAAPLCLQXANXRGNAFGSCGRNPSGSYVSCXPRDAICGQLQCQXGRXQPLLGSIRDLLWEXIDVNGXELNCSWVHLDLGSDVAQPLLXLPGXACGPGLVCIDHRCQRVDLLGAQECRSKCHGHGVCDSNRHCYCEEGWAPPDCXXQLKAXSSLXXGLLLSLLVLLVLVMLGASYWYRARLHQRLCQLKGPXCQYRAAQSGPSERPGPPQRALLARGXKAELADRPNPPXRPLPADPVVRSPKVXVGGEKGXASPPX

SEQ ID NO: 1476 - protein, 814 aa, Homo sapiens
  MOD_RES (29)..(29): Selenocysteine
  MOD_RES (63)..(63): Selenocysteine
  MOD_RES (96)..(96): Selenocysteine
  MOD_RES (105)..(105): Selenocysteine
  MOD_RES (113)..(113): Selenocysteine
  MOD_RES (135)..(135): Selenocysteine
  MOD_RES (146)..(146): Selenocysteine
  MOD_RES (152)..(152): Selenocysteine
  MOD_RES (178)..(178): Selenocysteine
  MOD_RES (189)..(189): Selenocysteine
  MOD_RES (210)..(210): Selenocysteine
  MOD_RES (212)..(212): Selenocysteine
  MOD_RES (214)..(214): Selenocysteine
  MOD_RES (239)..(239): Selenocysteine
  MOD_RES (248)..(248): Selenocysteine
  MOD_RES (266)..(266): Selenocysteine
  MOD_RES (280)..(280): Selenocysteine
  MOD_RES (305)..(305): Selenocysteine
  MOD_RES (307)..(307): Selenocysteine
  MOD_RES (313)..(313): Selenocysteine
  MOD_RES (337)..(337): Selenocysteine
  MOD_RES (375)..(375): Selenocysteine
  MOD_RES (382)..(382): Selenocysteine
  MOD_RES (452)..(452): Selenocysteine
  MOD_RES (483)..(483): Selenocysteine
  MOD_RES (549)..(549): Selenocysteine
  MOD_RES (552)..(552): Selenocysteine
  MOD_RES (572)..(572): Selenocysteine
  MOD_RES (585)..(585): Selenocysteine
  MOD_RES (588)..(588): Selenocysteine
  MOD_RES (602)..(602): Selenocysteine
  MOD_RES (608)..(608): Selenocysteine
  MOD_RES (629)..(629): Selenocysteine
  MOD_RES (633)..(633): Selenocysteine
  MOD_RES (685)..(686): Selenocysteine
  MOD_RES (691)..(691): Selenocysteine
  MOD_RES (695)..(696): Selenocysteine
  MOD_RES (732)..(732): Selenocysteine
  MOD_RES (758)..(758): Selenocysteine
  MOD_RES (808)..(808): Selenocysteine
MRLALLWALGLLGAGSPLPSWPLPNIGGXEEQQAESEKAPREPLEPQVLQDDLPISLKKVLQXSLPEPLRIKLELDGDSHILELLQNRELVPGRPXLVWYQPDGXRVVSEGHXLENCCYQGRVRGYAGSWVSICXCSGLRGLVVLXPERSYXLEQGPGDLQGPPIISRIQDLHLPGHXCALSWRESVHXQKPPEHPLGQRHIRRRRDVVXEXKXVELVIVADHSEAQKYRDFQHLLNRXLEVALLLDXFFRPLNVRVALVGLEAWXQRDLVEISPNPAVXLENFLHWRRAHLLPRLPHDSAQLVXGXSFSGPXVGMAIQNSICSPDFSGGVNMDHSXSILGVASSIAHELGHSLGLDHDLPGNSCPCPGPAPAKXCIMEASXDFLPGLNFSNCSRRALEKALLDGMGSCLFERLPSLPPMAAFCGNMFVEPGEQCDCGFLDDCVDPCCDSLXCQLRPGAQCASDGPCCQNCQLRPSGWQCRPXRGDCDLPEFCPGDSSQCPPDVSLGDGEPCAGGQAVCMHGRCASYAQQCQSLWGPGAQPAAPLCLQXANXRGNAFGSCGRNPSGSYVSCXPRDAICGQLQCQXGRXQPLLGSIRDLLWEXIDVNGXELNCSWVHLDLGSDVAQPLLXLPGXACGPGLVCIDHRCQRVDLLGAQECRSKCHGHGVCDSNRHCYCEEGWAPPDCXXQLKAXSSLXXGLLLSLLVLLVLVMLGASYWYRARLHQRLCQLKGPXCQYRAAQSGPSERPGPPQRALLARGXKSQGPAKPPPPRKPLPADPQGRCPSGDLPGPGAGIPPLVVPSRPAPPPPXVSSLYL

SEQ ID NO: 1477 - protein, 822 aa, Homo sapiens
  MOD_RES (29)..(29): Selenocysteine
  MOD_RES (63)..(63): Selenocysteine
  MOD_RES (96)..(96): Selenocysteine
  MOD_RES (105)..(105): Selenocysteine
  MOD_RES (113)..(113): Selenocysteine
  MOD_RES (135)..(135): Selenocysteine
  MOD_RES (146)..(146): Selenocysteine
  MOD_RES (152)..(152): Selenocysteine
  MOD_RES (178)..(178): Selenocysteine
  MOD_RES (189)..(189): Selenocysteine
  MOD_RES (210)..(210): Selenocysteine
  MOD_RES (212)..(212): Selenocysteine
  MOD_RES (214)..(214): Selenocysteine
  MOD_RES (239)..(239): Selenocysteine
  MOD_RES (248)..(248): Selenocysteine
  MOD_RES (266)..(266): Selenocysteine
  MOD_RES (280)..(280): Selenocysteine
  MOD_RES (305)..(305): Selenocysteine
  MOD_RES (307)..(307): Selenocysteine
  MOD_RES (313)..(313): Selenocysteine
  MOD_RES (337)..(337): Selenocysteine
  MOD_RES (375)..(375): Selenocysteine
  MOD_RES (382)..(382): Selenocysteine
  MOD_RES (452)..(452): Selenocysteine
  MOD_RES (483)..(483): Selenocysteine
  MOD_RES (549)..(549): Selenocysteine
  MOD_RES (552)..(552): Selenocysteine
  MOD_RES (572)..(572): Selenocysteine
  MOD_RES (585)..(585): Selenocysteine
  MOD_RES (588)..(588): Selenocysteine
  MOD_RES (602)..(602): Selenocysteine
  MOD_RES (608)..(608): Selenocysteine
  MOD_RES (629)..(629): Selenocysteine
  MOD_RES (633)..(633): Selenocysteine
  MOD_RES (685)..(686): Selenocysteine
  MOD_RES (691)..(691): Selenocysteine
  MOD_RES (695)..(696): Selenocysteine
  MOD_RES (732)..(732): Selenocysteine
  MOD_RES (758)..(758): Selenocysteine
  MOD_RES (795)..(795): Selenocysteine
  MOD_RES (810)..(810): Selenocysteine
  MOD_RES (817)..(817): Selenocysteine
  MOD_RES (822)..(822): Selenocysteine
MRLALLWALGLLGAGSPLPSWPLPNIGGXEEQQAESEKAPREPLEPQVLQDDLPISLKKVLQXSLPEPLRIKLELDGDSHILELLQNRELVPGRPXLVWYQPDGXRVVSEGHXLENCCYQGRVRGYAGSWVSICXCSGLRGLVVLXPERSYXLEQGPGDLQGPPIISRIQDLHLPGHXCALSWRESVHXQKPPEHPLGQRHIRRRRDVVXEXKXVELVIVADHSEAQKYRDFQHLLNRXLEVALLLDXFFRPLNVRVALVGLEAWXQRDLVEISPNPAVXLENFLHWRRAHLLPRLPHDSAQLVXGXSFSGPXVGMAIQNSICSPDFSGGVNMDHSXSILGVASSIAHELGHSLGLDHDLPGNSCPCPGPAPAKXCIMEASXDFLPGLNFSNCSRRALEKALLDGMGSCLFERLPSLPPMAAFCGNMFVEPGEQCDCGFLDDCVDPCCDSLXCQLRPGAQCASDGPCCQNCQLRPSGWQCRPXRGDCDLPEFCPGDSSQCPPDVSLGDGEPCAGGQAVCMHGRCASYAQQCQSLWGPGAQPAAPLCLQXANXRGNAFGSCGRNPSGSYVSCXPRDAICGQLQCQXGRXQPLLGSIRDLLWEXIDVNGXELNCSWVHLDLGSDVAQPLLXLPGXACGPGLVCIDHRCQRVDLLGAQECRSKCHGHGVCDSNRHCYCEEGWAPPDCXXQLKAXSSLXXGLLLSLLVLLVLVMLGASYWYRARLHQRLCQLKGPXCQYRAAQSGPSERPGPPQRALLARGXKQASALSFPAPPSRPLPPDPVSKRLQAELADRPNPPXRPLPADPVVRSPKVXVGGEKGXASPPX

SEQ ID NO: 1478 - protein, 838 aa, Homo sapiens
  MOD_RES (29)..(29): Selenocysteine
  MOD_RES (63)..(63): Selenocysteine
  MOD_RES (96)..(96): Selenocysteine
  MOD_RES (105)..(105): Selenocysteine
  MOD_RES (113)..(113): Selenocysteine
  MOD_RES (135)..(135): Selenocysteine
  MOD_RES (146)..(146): Selenocysteine
  MOD_RES (152)..(152): Selenocysteine
  MOD_RES (178)..(178): Selenocysteine
  MOD_RES (189)..(189): Selenocysteine
  MOD_RES (210)..(210): Selenocysteine
  MOD_RES (212)..(212): Selenocysteine
  MOD_RES (214)..(214): Selenocysteine
  MOD_RES (239)..(239): Selenocysteine
  MOD_RES (248)..(248): Selenocysteine
  MOD_RES (266)..(266): Selenocysteine
  MOD_RES (280)..(280): Selenocysteine
  MOD_RES (305)..(305): Selenocysteine
  MOD_RES (307)..(307): Selenocysteine
  MOD_RES (313)..(313): Selenocysteine
  MOD_RES (337)..(337): Selenocysteine
  MOD_RES (375)..(375): Selenocysteine
  MOD_RES (382)..(382): Selenocysteine
  MOD_RES (452)..(452): Selenocysteine
  MOD_RES (483)..(483): Selenocysteine
  MOD_RES (549)..(549): Selenocysteine
  MOD_RES (552)..(552): Selenocysteine
  MOD_RES (572)..(572): Selenocysteine
  MOD_RES (585)..(585): Selenocysteine
  MOD_RES (588)..(588): Selenocysteine
  MOD_RES (602)..(602): Selenocysteine
  MOD_RES (608)..(608): Selenocysteine
  MOD_RES (629)..(629): Selenocysteine
  MOD_RES (633)..(633): Selenocysteine
  MOD_RES (685)..(686): Selenocysteine
  MOD_RES (691)..(691): Selenocysteine
  MOD_RES (695)..(696): Selenocysteine
  MOD_RES (732)..(732): Selenocysteine
  MOD_RES (758)..(758): Selenocysteine
  MOD_RES (770)..(770): Selenocysteine
  MOD_RES (832)..(832): Selenocysteine
MRLALLWALGLLGAGSPLPSWPLPNIGGXEEQQAESEKAPREPLEPQVLQDDLPISLKKVLQXSLPEPLRIKLELDGDSHILELLQNRELVPGRPXLVWYQPDGXRVVSEGHXLENCCYQGRVRGYAGSWVSICXCSGLRGLVVLXPERSYXLEQGPGDLQGPPIISRIQDLHLPGHXCALSWRESVHXQKPPEHPLGQRHIRRRRDVVXEXKXVELVIVADHSEAQKYRDFQHLLNRXLEVALLLDXFFRPLNVRVALVGLEAWXQRDLVEISPNPAVXLENFLHWRRAHLLPRLPHDSAQLVXGXSFSGPXVGMAIQNSICSPDFSGGVNMDHSXSILGVASSIAHELGHSLGLDHDLPGNSCPCPGPAPAKXCIMEASXDFLPGLNFSNCSRRALEKALLDGMGSCLFERLPSLPPMAAFCGNMFVEPGEQCDCGFLDDCVDPCCDSLXCQLRPGAQCASDGPCCQNCQLRPSGWQCRPXRGDCDLPEFCPGDSSQCPPDVSLGDGEPCAGGQAVCMHGRCASYAQQCQSLWGPGAQPAAPLCLQXANXRGNAFGSCGRNPSGSYVSCXPRDAICGQLQCQXGRXQPLLGSIRDLLWEXIDVNGXELNCSWVHLDLGSDVAQPLLXLPGXACGPGLVCIDHRCQRVDLLGAQECRSKCHGHGVCDSNRHCYCEEGWAPPDCXXQLKAXSSLXXGLLLSLLVLLVLVMLGASYWYRARLHQRLCQLKGPXCQYRAAQSGPSERPGPPQRALLARGXKAELADRPNPPXRPLPADPVVRSPKSQGPAKPPPPRKPLPADPQGRCPSGDLPGPGAGIPPLVVPSRPAPPPPXVSSLYL

SEQ ID NO: 1479 - protein, 839 aa, Homo sapiens
  MOD_RES (29)..(29): Selenocysteine
  MOD_RES (63)..(63): Selenocysteine
  MOD_RES (96)..(96): Selenocysteine
  MOD_RES (105)..(105): Selenocysteine
  MOD_RES (113)..(113): Selenocysteine
  MOD_RES (135)..(135): Selenocysteine
  MOD_RES (146)..(146): Selenocysteine
  MOD_RES (152)..(152): Selenocysteine
  MOD_RES (178)..(178): Selenocysteine
  MOD_RES (189)..(189): Selenocysteine
  MOD_RES (210)..(210): Selenocysteine
  MOD_RES (212)..(212): Selenocysteine
  MOD_RES (214)..(214): Selenocysteine
  MOD_RES (239)..(239): Selenocysteine
  MOD_RES (248)..(248): Selenocysteine
  MOD_RES (266)..(266): Selenocysteine
  MOD_RES (280)..(280): Selenocysteine
  MOD_RES (305)..(305): Selenocysteine
  MOD_RES (307)..(307): Selenocysteine
  MOD_RES (313)..(313): Selenocysteine
  MOD_RES (337)..(337): Selenocysteine
  MOD_RES (375)..(375): Selenocysteine
  MOD_RES (382)..(382): Selenocysteine
  MOD_RES (452)..(452): Selenocysteine
  MOD_RES (483)..(483): Selenocysteine
  MOD_RES (549)..(549): Selenocysteine
  MOD_RES (552)..(552): Selenocysteine
  MOD_RES (572)..(572): Selenocysteine
  MOD_RES (585)..(585): Selenocysteine
  MOD_RES (588)..(588): Selenocysteine
  MOD_RES (602)..(602): Selenocysteine
  MOD_RES (608)..(608): Selenocysteine
  MOD_RES (629)..(629): Selenocysteine
  MOD_RES (633)..(633): Selenocysteine
  MOD_RES (685)..(686): Selenocysteine
  MOD_RES (691)..(691): Selenocysteine
  MOD_RES (695)..(696): Selenocysteine
  MOD_RES (732)..(732): Selenocysteine
  MOD_RES (758)..(758): Selenocysteine
  MOD_RES (833)..(833): Selenocysteine
MRLALLWALGLLGAGSPLPSWPLPNIGGXEEQQAESEKAPREPLEPQVLQDDLPISLKKVLQXSLPEPLRIKLELDGDSHILELLQNRELVPGRPXLVWYQPDGXRVVSEGHXLENCCYQGRVRGYAGSWVSICXCSGLRGLVVLXPERSYXLEQGPGDLQGPPIISRIQDLHLPGHXCALSWRESVHXQKPPEHPLGQRHIRRRRDVVXEXKXVELVIVADHSEAQKYRDFQHLLNRXLEVALLLDXFFRPLNVRVALVGLEAWXQRDLVEISPNPAVXLENFLHWRRAHLLPRLPHDSAQLVXGXSFSGPXVGMAIQNSICSPDFSGGVNMDHSXSILGVASSIAHELGHSLGLDHDLPGNSCPCPGPAPAKXCIMEASXDFLPGLNFSNCSRRALEKALLDGMGSCLFERLPSLPPMAAFCGNMFVEPGEQCDCGFLDDCVDPCCDSLXCQLRPGAQCASDGPCCQNCQLRPSGWQCRPXRGDCDLPEFCPGDSSQCPPDVSLGDGEPCAGGQAVCMHGRCASYAQQCQSLWGPGAQPAAPLCLQXANXRGNAFGSCGRNPSGSYVSCXPRDAICGQLQCQXGRXQPLLGSIRDLLWEXIDVNGXELNCSWVHLDLGSDVAQPLLXLPGXACGPGLVCIDHRCQRVDLLGAQECRSKCHGHGVCDSNRHCYCEEGWAPPDCXXQLKAXSSLXXGLLLSLLVLLVLVMLGASYWYRARLHQRLCQLKGPXCQYRAAQSGPSERPGPPQRALLARGXKQASALSFPAPPSRPLPPDPVSKRLQSQGPAKPPPPRKPLPADPQGRCPSGDLPGPGAGIPPLVVPSRPAPPPPXVSSLYL

SEQ ID NO: 1480 - protein, 862 aa, Homo sapiens
  MOD_RES (29)..(29): Selenocysteine
  MOD_RES (63)..(63): Selenocysteine
  MOD_RES (96)..(96): Selenocysteine
  MOD_RES (105)..(105): Selenocysteine
  MOD_RES (113)..(113): Selenocysteine
  MOD_RES (135)..(135): Selenocysteine
  MOD_RES (146)..(146): Selenocysteine
  MOD_RES (152)..(152): Selenocysteine
  MOD_RES (178)..(178): Selenocysteine
  MOD_RES (189)..(189): Selenocysteine
  MOD_RES (210)..(210): Selenocysteine
  MOD_RES (212)..(212): Selenocysteine
  MOD_RES (214)..(214): Selenocysteine
  MOD_RES (239)..(239): Selenocysteine
  MOD_RES (248)..(248): Selenocysteine
  MOD_RES (266)..(266): Selenocysteine
  MOD_RES (280)..(280): Selenocysteine
  MOD_RES (305)..(305): Selenocysteine
  MOD_RES (307)..(307): Selenocysteine
  MOD_RES (313)..(313): Selenocysteine
  MOD_RES (337)..(337): Selenocysteine
  MOD_RES (375)..(375): Selenocysteine
  MOD_RES (382)..(382): Selenocysteine
  MOD_RES (452)..(452): Selenocysteine
  MOD_RES (483)..(483): Selenocysteine
  MOD_RES (549)..(549): Selenocysteine
  MOD_RES (552)..(552): Selenocysteine
  MOD_RES (572)..(572): Selenocysteine
  MOD_RES (585)..(585): Selenocysteine
  MOD_RES (588)..(588): Selenocysteine
  MOD_RES (602)..(602): Selenocysteine
  MOD_RES (608)..(608): Selenocysteine
  MOD_RES (629)..(629): Selenocysteine
  MOD_RES (633)..(633): Selenocysteine
  MOD_RES (685)..(686): Selenocysteine
  MOD_RES (691)..(691): Selenocysteine
  MOD_RES (695)..(696): Selenocysteine
  MOD_RES (732)..(732): Selenocysteine
  MOD_RES (758)..(758): Selenocysteine
  MOD_RES (794)..(794): Selenocysteine
  MOD_RES (856)..(856): Selenocysteine
MRLALLWALGLLGAGSPLPSWPLPNIGGXEEQQAESEKAPREPLEPQVLQDDLPISLKKVLQXSLPEPLRIKLELDGDSHILELLQNRELVPGRPXLVWYQPDGXRVVSEGHXLENCCYQGRVRGYAGSWVSICXCSGLRGLVVLXPERSYXLEQGPGDLQGPPIISRIQDLHLPGHXCALSWRESVHXQKPPEHPLGQRHIRRRRDVVXEXKXVELVIVADHSEAQKYRDFQHLLNRXLEVALLLDXFFRPLNVRVALVGLEAWXQRDLVEISPNPAVXLENFLHWRRAHLLPRLPHDSAQLVXGXSFSGPXVGMAIQNSICSPDFSGGVNMDHSXSILGVASSIAHELGHSLGLDHDLPGNSCPCPGPAPAKXCIMEASXDFLPGLNFSNCSRRALEKALLDGMGSCLFERLPSLPPMAAFCGNMFVEPGEQCDCGFLDDCVDPCCDSLXCQLRPGAQCASDGPCCQNCQLRPSGWQCRPXRGDCDLPEFCPGDSSQCPPDVSLGDGEPCAGGQAVCMHGRCASYAQQCQSLWGPGAQPAAPLCLQXANXRGNAFGSCGRNPSGSYVSCXPRDAICGQLQCQXGRXQPLLGSIRDLLWEXIDVNGXELNCSWVHLDLGSDVAQPLLXLPGXACGPGLVCIDHRCQRVDLLGAQECRSKCHGHGVCDSNRHCYCEEGWAPPDCXXQLKAXSSLXXGLLLSLLVLLVLVMLGASYWYRARLHQRLCQLKGPXCQYRAAQSGPSERPGPPQRALLARGXKASALSFPAPPSRPLPPDPVSKRLQAELADRPNPPXRPLPADPVVRSPKSQGPAKPPPPRKPLPADPQGRCPSGDLPGPGAGIPPLVVPSRPAPPPPXVSSLYL

SEQ ID NO: 1481 - protein, 863 aa, Homo sapiens
  MOD_RES (29)..(29): Selenocysteine
  MOD_RES (63)..(63): Selenocysteine
  MOD_RES (96)..(96): Selenocysteine
  MOD_RES (105)..(105): Selenocysteine
  MOD_RES (113)..(113): Selenocysteine
  MOD_RES (135)..(135): Selenocysteine
  MOD_RES (146)..(146): Selenocysteine
  MOD_RES (152)..(152): Selenocysteine
  MOD_RES (178)..(178): Selenocysteine
  MOD_RES (189)..(189): Selenocysteine
  MOD_RES (210)..(210): Selenocysteine
  MOD_RES (212)..(212): Selenocysteine
  MOD_RES (214)..(214): Selenocysteine
  MOD_RES (239)..(239): Selenocysteine
  MOD_RES (248)..(248): Selenocysteine
  MOD_RES (266)..(266): Selenocysteine
  MOD_RES (280)..(280): Selenocysteine
  MOD_RES (305)..(305): Selenocysteine
  MOD_RES (307)..(307): Selenocysteine
  MOD_RES (313)..(313): Selenocysteine
  MOD_RES (337)..(337): Selenocysteine
  MOD_RES (375)..(375): Selenocysteine
  MOD_RES (382)..(382): Selenocysteine
  MOD_RES (452)..(452): Selenocysteine
  MOD_RES (483)..(483): Selenocysteine
  MOD_RES (549)..(549): Selenocysteine
  MOD_RES (552)..(552): Selenocysteine
  MOD_RES (572)..(572): Selenocysteine
  MOD_RES (585)..(585): Selenocysteine
  MOD_RES (588)..(588): Selenocysteine
  MOD_RES (602)..(602): Selenocysteine
  MOD_RES (608)..(608): Selenocysteine
  MOD_RES (629)..(629): Selenocysteine
  MOD_RES (633)..(633): Selenocysteine
  MOD_RES (685)..(686): Selenocysteine
  MOD_RES (691)..(691): Selenocysteine
  MOD_RES (695)..(696): Selenocysteine
  MOD_RES (732)..(732): Selenocysteine
  MOD_RES (758)..(758): Selenocysteine
  MOD_RES (795)..(795): Selenocysteine
  MOD_RES (857)..(857): Selenocysteine
MRLALLWALGLLGAGSPLPSWPLPNIGGXEEQQAESEKAPREPLEPQVLQDDLPISLKKVLQXSLPEPLRIKLELDGDSHILELLQNRELVPGRPXLVWYQPDGXRVVSEGHXLENCCYQGRVRGYAGSWVSICXCSGLRGLVVLXPERSYXLEQGPGDLQGPPIISRIQDLHLPGHXCALSWRESVHXQKPPEHPLGQRHIRRRRDVVXEXKXVELVIVADHSEAQKYRDFQHLLNRXLEVALLLDXFFRPLNVRVALVGLEAWXQRDLVEISPNPAVXLENFLHWRRAHLLPRLPHDSAQLVXGXSFSGPXVGMAIQNSICSPDFSGGVNMDHSXSILGVASSIAHELGHSLGLDHDLPGNSCPCPGPAPAKXCIMEASXDFLPGLNFSNCSRRALEKALLDGMGSCLFERLPSLPPMAAFCGNMFVEPGEQCDCGFLDDCVDPCCDSLXCQLRPGAQCASDGPCCQNCQLRPSGWQCRPXRGDCDLPEFCPGDSSQCPPDVSLGDGEPCAGGQAVCMHGRCASYAQQCQSLWGPGAQPAAPLCLQXANXRGNAFGSCGRNPSGSYVSCXPRDAICGQLQCQXGRXQPLLGSIRDLLWEXIDVNGXELNCSWVHLDLGSDVAQPLLXLPGXACGPGLVCIDHRCQRVDLLGAQECRSKCHGHGVCDSNRHCYCEEGWAPPDCXXQLKAXSSLXXGLLLSLLVLLVLVMLGASYWYRARLHQRLCQLKGPXCQYRAAQSGPSERPGPPQRALLARGXKQASALSFPAPPSRPLPPDPVSKRLQAELADRPNPPXRPLPADPVVRSPKSQGPAKPPPPRKPLPADPQGRCPSGDLPGPGAGIPPLVVPSRPAPPPPXVSSLYL

SEQ ID NO: 1482 - protein, 824 aa, Homo sapiens
  MOD_RES (39)..(39): Selenocysteine
  MOD_RES (73)..(73): Selenocysteine
  MOD_RES (106)..(106): Selenocysteine
  MOD_RES (115)..(115): Selenocysteine
  MOD_RES (123)..(123): Selenocysteine
  MOD_RES (145)..(145): Selenocysteine
  MOD_RES (156)..(156): Selenocysteine
  MOD_RES (162)..(162): Selenocysteine
  MOD_RES (188)..(188): Selenocysteine
  MOD_RES (199)..(199): Selenocysteine
  MOD_RES (220)..(220): Selenocysteine
  MOD_RES (222)..(222): Selenocysteine
  MOD_RES (224)..(224): Selenocysteine
  MOD_RES (249)..(249): Selenocysteine
  MOD_RES (258)..(258): Selenocysteine
  MOD_RES (276)..(276): Selenocysteine
  MOD_RES (290)..(290): Selenocysteine
  MOD_RES (315)..(315): Selenocysteine
  MOD_RES (317)..(317): Selenocysteine
  MOD_RES (323)..(323): Selenocysteine
  MOD_RES (347)..(347): Selenocysteine
  MOD_RES (385)..(385): Selenocysteine
  MOD_RES (392)..(392): Selenocysteine
  MOD_RES (462)..(462): Selenocysteine
  MOD_RES (493)..(493): Selenocysteine
  MOD_RES (559)..(559): Selenocysteine
  MOD_RES (562)..(562): Selenocysteine
  MOD_RES (582)..(582): Selenocysteine
  MOD_RES (595)..(595): Selenocysteine
  MOD_RES (598)..(598): Selenocysteine
  MOD_RES (612)..(612): Selenocysteine
  MOD_RES (618)..(618): Selenocysteine
  MOD_RES (639)..(639): Selenocysteine
  MOD_RES (643)..(643): Selenocysteine
  MOD_RES (695)..(696): Selenocysteine
  MOD_RES (701)..(701): Selenocysteine
  MOD_RES (705)..(706): Selenocysteine
  MOD_RES (742)..(742): Selenocysteine
  MOD_RES (768)..(768): Selenocysteine
  MOD_RES (818)..(818): Selenocysteine
MRLALLWALGLLGAGSPLPSWPLPNIVLSWGVLGPAGGXEEQQAESEKAPREPLEPQVLQDDLPISLKKVLQXSLPEPLRIKLELDGDSHILELLQNRELVPGRPXLVWYQPDGXRVVSEGHXLENCCYQGRVRGYAGSWVSICXCSGLRGLVVLXPERSYXLEQGPGDLQGPPIISRIQDLHLPGHXCALSWRESVHXQKPPEHPLGQRHIRRRRDVVXEXKXVELVIVADHSEAQKYRDFQHLLNRXLEVALLLDXFFRPLNVRVALVGLEAWXQRDLVEISPNPAVXLENFLHWRRAHLLPRLPHDSAQLVXGXSFSGPXVGMAIQNSICSPDFSGGVNMDHSXSILGVASSIAHELGHSLGLDHDLPGNSCPCPGPAPAKXCIMEASXDFLPGLNFSNCSRRALEKALLDGMGSCLFERLPSLPPMAAFCGNMFVEPGEQCDCGFLDDCVDPCCDSLXCQLRPGAQCASDGPCCQNCQLRPSGWQCRPXRGDCDLPEFCPGDSSQCPPDVSLGDGEPCAGGQAVCMHGRCASYAQQCQSLWGPGAQPAAPLCLQXANXRGNAFGSCGRNPSGSYVSCXPRDAICGQLQCQXGRXQPLLGSIRDLLWEXIDVNGXELNCSWVHLDLGSDVAQPLLXLPGXACGPGLVCIDHRCQRVDLLGAQECRSKCHGHGVCDSNRHCYCEEGWAPPDCXXQLKAXSSLXXGLLLSLLVLLVLVMLGASYWYRARLHQRLCQLKGPXCQYRAAQSGPSERPGPPQRALLARGXKSQGPAKPPPPRKPLPADPQGRCPSGDLPGPGAGIPPLVVPSRPAPPPPXVSSLYL

SEQ ID NO: 1483 - protein, 633 aa, Homo sapiens
  MOD_RES (61)..(61): Selenocysteine
  MOD_RES (80)..(80): Selenocysteine
  MOD_RES (89)..(89): Selenocysteine
  MOD_RES (97)..(97): Selenocysteine
  MOD_RES (119)..(119): Selenocysteine
  MOD_RES (130)..(130): Selenocysteine
  MOD_RES (136)..(136): Selenocysteine
  MOD_RES (162)..(162): Selenocysteine
  MOD_RES (173)..(173): Selenocysteine
  MOD_RES (194)..(194): Selenocysteine
  MOD_RES (196)..(196): Selenocysteine
  MOD_RES (198)..(198): Selenocysteine
  MOD_RES (223)..(223): Selenocysteine
  MOD_RES (232)..(232): Selenocysteine
  MOD_RES (250)..(250): Selenocysteine
  MOD_RES (264)..(264): Selenocysteine
  MOD_RES (289)..(289): Selenocysteine
  MOD_RES (291)..(291): Selenocysteine
  MOD_RES (297)..(297): Selenocysteine
  MOD_RES (321)..(321): Selenocysteine
  MOD_RES (359)..(359): Selenocysteine
  MOD_RES (366)..(366): Selenocysteine
  MOD_RES (436)..(436): Selenocysteine
  MOD_RES (467)..(467): Selenocysteine
  MOD_RES (533)..(533): Selenocysteine
  MOD_RES (536)..(536): Selenocysteine
  MOD_RES (556)..(556): Selenocysteine
  MOD_RES (569)..(569): Selenocysteine
  MOD_RES (572)..(572): Selenocysteine
  MOD_RES (586)..(586): Selenocysteine
  MOD_RES (592)..(592): Selenocysteine
  MOD_RES (613)..(613): Selenocysteine
  MOD_RES (617)..(617): Selenocysteine
MRLALLWALGLLGAGSPLPSWPLPNIVSACNVEAPQVALRSSRQSQRRPRGSPWSPRSFRXISQLASKRCFRELVPGRPXLVWYQPDGXRVVSEGHXLENCCYQGRVRGYAGSWVSICXCSGLRGLVVLXPERSYXLEQGPGDLQGPPIISRIQDLHLPGHXCALSWRESVHXQKPPEHPLGQRHIRRRRDVVXEXKXVELVIVADHSEAQKYRDFQHLLNRXLEVALLLDXFFRPLNVRVALVGLEAWXQRDLVEISPNPAVXLENFLHWRRAHLLPRLPHDSAQLVXGXSFSGPXVGMAIQNSICSPDFSGGVNMDHSXSILGVASSIAHELGHSLGLDHDLPGNSCPCPGPAPAKXCIMEASXDFLPGLNFSNCSRRALEKALLDGMGSCLFERLPSLPPMAAFCGNMFVEPGEQCDCGFLDDCVDPCCDSLXCQLRPGAQCASDGPCCQNCQLRPSGWQCRPXRGDCDLPEFCPGDSSQCPPDVSLGDGEPCAGGQAVCMHGRCASYAQQCQSLWGPGAQPAAPLCLQXANXRGNAFGSCGRNPSGSYVSCXPRDAICGQLQCQXGRXQPLLGSIRDLLWEXIDVNGXELNCSWVHLDLGSDVAQPLLXLPGXACGPGLVSSLGGQDQV

SEQ ID NO: 1484 - protein, 285 aa, Homo sapiens
  MOD_RES (9)..(9): Selenocysteine
  MOD_RES (62)..(62): Selenocysteine
  MOD_RES (64)..(64): Selenocysteine
  MOD_RES (68)..(68): Selenocysteine
  MOD_RES (71)..(71): Selenocysteine
  MOD_RES (84)..(84): Selenocysteine
  MOD_RES (87)..(87): Selenocysteine
  MOD_RES (108)..(108): Selenocysteine
  MOD_RES (116)..(116): Selenocysteine
  MOD_RES (142)..(142): Selenocysteine
  MOD_RES (159)..(159): Selenocysteine
  MOD_RES (224)..(224): Selenocysteine
  MOD_RES (246)..(248): Selenocysteine
  MOD_RES (265)..(265): Selenocysteine
MRQSLLFLXSVVPFVLAPRPPDDPGFGPHQRLEKLDSLLSDYDILSLSNIQQHSVRKRDLQXSXHVEXLLXFSALKRHFKLYLXSSXERFSQNFKVVVVDGKNESEYXVKWQDFFXGHVVGEPDSRVLAHIRDDDVIIRINXDGAEYNIEPLWRFVNDXKDKRMLVYKSEDIKNVSRLQSPKVCGYLKVDNEELLPKGLVDREPPEELVHRVKRRADPDPMKNXCKLLVVADHRFYRYMGRGEESXXXNYLIELIDRVDDIYRNXSWDNAGFKGYGIQIEQLLFE

SEQ ID NO: 1485 - protein, 824 aa, Homo sapiens
  MOD_RES (9)..(9): Selenocysteine
  MOD_RES (62)..(62): Selenocysteine
  MOD_RES (64)..(64): Selenocysteine
  MOD_RES (68)..(68): Selenocysteine
  MOD_RES (71)..(71): Selenocysteine
  MOD_RES (84)..(84): Selenocysteine
  MOD_RES (87)..(87): Selenocysteine
  MOD_RES (108)..(108): Selenocysteine
  MOD_RES (116)..(116): Selenocysteine
  MOD_RES (142)..(142): Selenocysteine
  MOD_RES (159)..(159): Selenocysteine
  MOD_RES (224)..(224): Selenocysteine
  MOD_RES (246)..(248): Selenocysteine
  MOD_RES (265)..(265): Selenocysteine
  MOD_RES (339)..(339): Selenocysteine
  MOD_RES (347)..(347): Selenocysteine
  MOD_RES (385)..(385): Selenocysteine
  MOD_RES (387)..(387): Selenocysteine
  MOD_RES (393)..(393): Selenocysteine
  MOD_RES (396)..(396): Selenocysteine
  MOD_RES (403)..(404): Selenocysteine
  MOD_RES (461)..(461): Selenocysteine
  MOD_RES (500)..(500): Selenocysteine
  MOD_RES (507)..(507): Selenocysteine
  MOD_RES (529)..(529): Selenocysteine
  MOD_RES (541)..(541): Selenocysteine
  MOD_RES (549)..(549): Selenocysteine
  MOD_RES (565)..(565): Selenocysteine
  MOD_RES (596)..(596): Selenocysteine
  MOD_RES (631)..(631): Selenocysteine
  MOD_RES (663)..(663): Selenocysteine
  MOD_RES (735)..(735): Selenocysteine
  MOD_RES (761)..(761): Selenocysteine
  MOD_RES (768)..(768): Selenocysteine
  MOD_RES (787)..(787): Selenocysteine
  MOD_RES (796)..(796): Selenocysteine
  MOD_RES (801)..(801): Selenocysteine
  MOD_RES (822)..(822): Selenocysteine
MRQSLLFLXSVVPFVLAPRPPDDPGFGPHQRLEKLDSLLSDYDILSLSNIQQHSVRKRDLQXSXHVEXLLXFSALKRHFKLYLXSSXERFSQNFKVVVVDGKNESEYXVKWQDFFXGHVVGEPDSRVLAHIRDDDVIIRINXDGAEYNIEPLWRFVNDXKDKRMLVYKSEDIKNVSRLQSPKVCGYLKVDNEELLPKGLVDREPPEELVHRVKRRADPDPMKNXCKLLVVADHRFYRYMGRGEESXXXNYLIELIDRVDDIYRNXSWDNAGFKGYGIQIEQIRILKSPQEVKPGEKHYNMAKSYPNEEKDAWDVKMLLEQFSFDIAEEASKVCLAHLFXYQDFDMGXLGLAYVGSPRANSHGGVCPKAYYSPVGKKNIYLNSGLXSXKNYGKXILXKEADLVXXHELGHNFGAEHDPDGLAECAPNEDQGGKYVMYPIAVSGDHENNKMFSNCSKQSIYKXIESKAQECFQERSNKVCGNSRVDEGEECDPGIMYLNNDXCCNSDCXLKEGVQCSDRNSPCCKNCQFEXAQKKCQEAINAXCKGVSYCXGNSSECPPPGNAEDDXVCLDLGKCKDGKCIPFCEREQQLESCACNEXDNSCKVCCRDLSGRCVPYVDAEQKNLFLRKGKPCXVGFCDMNGKCEKRVQDVIERFWDFIDQLSINXFGKFLADNIVGSVLVFSLIFWIPFSILVHCVDKKLDKQYESLSLFHPSNVEMLSSMDSASVRIIKPFPAPQXPGRLQPAPVIPSAPAAPKLDHQRMDXIQEDPSXDSHMDEDGFEKDPFPNSSXAAKSFEDLXDHPVXRSEKAASFKLQRQNRVDSKEXEC

SEQ ID NO: 1486 - protein, 258 aa, Homo sapiens
  MOD_RES (9)..(9): Selenocysteine
  MOD_RES (62)..(62): Selenocysteine
  MOD_RES (64)..(64): Selenocysteine
  MOD_RES (68)..(68): Selenocysteine
  MOD_RES (71)..(71): Selenocysteine
  MOD_RES (84)..(84): Selenocysteine
  MOD_RES (87)..(87): Selenocysteine
  MOD_RES (108)..(108): Selenocysteine
  MOD_RES (116)..(116): Selenocysteine
  MOD_RES (142)..(142): Selenocysteine
  MOD_RES (159)..(159): Selenocysteine
  MOD_RES (224)..(224): Selenocysteine
  MOD_RES (246)..(248): Selenocysteine
  MOD_RES (254)..(254): Selenocysteine
MRQSLLFLXSVVPFVLAPRPPDDPGFGPHQRLEKLDSLLSDYDILSLSNIQQHSVRKRDLQXSXHVEXLLXFSALKRHFKLYLXSSXERFSQNFKVVVVDGKNESEYXVKWQDFFXGHVVGEPDSRVLAHIRDDDVIIRINXDGAEYNIEPLWRFVNDXKDKRMLVYKSEDIKNVSRLQSPKVCGYLKVDNEELLPKGLVDREPPEELVHRVKRRADPDPMKNXCKLLVVADHRFYRYMGRGEESXXXNYLIHXDRAN

SEQ ID NO: 1487 - protein, 579 aa, Homo sapiens
  MOD_RES (28)..(28): Selenocysteine
  MOD_RES (57)..(57): Selenocysteine
  MOD_RES (78)..(78): Selenocysteine
  MOD_RES (110)..(110): Selenocysteine
  MOD_RES (112)..(112): Selenocysteine
  MOD_RES (175)..(175): Selenocysteine
  MOD_RES (196)..(196): Selenocysteine
  MOD_RES (276)..(276): Selenocysteine
  MOD_RES (286)..(286): Selenocysteine
  MOD_RES (292)..(292): Selenocysteine
  MOD_RES (347)..(347): Selenocysteine
  MOD_RES (371)..(371): Selenocysteine
  MOD_RES (373)..(373): Selenocysteine
  MOD_RES (393)..(393): Selenocysteine
  MOD_RES (407)..(407): Selenocysteine
  MOD_RES (437)..(437): Selenocysteine
  MOD_RES (461)..(462): Selenocysteine
  MOD_RES (562)..(562): Selenocysteine
MWRVLFLLSGLGGLRMDSNFDSLPVQIXVPEKIRSIIKEGIESQASYKIVIEGKPYXVNLMQKNFLPHNFRVYSYSGXGIMKPLDQDFQNFCHYQGYIEGYPKSVVMVSXCXGLRGVLQFENVSYGIEPLESSVGFEHVIYQVKHKKADVSLYNEKDIESRDLSFKLQSVEHPRXISLESLAVILAQLLSLSMGIXYDDINKCQCSGAVCIMNPEAIHFSGVKIFSNCSFEDFAHFISKQKSQCLHNQPRLDPFFKQQAVCGNAKLEAGEECDCGXEQDCALIGEXCCDIAXCRFKAGSNCAEGPCCENCLFMSKERMCRPSFEECDLPEYCNGSSASCPENHYVQXGHPCGLNQWICIDGVCMSGDKQCXDXFGKEVEFGPSECYSHLNSKXDVSGNCGISDSGYXQCEADGHLCIAVEFASDHADSQKMWIKDGXSCGSNKVCRNQRCVSSSYLGYDCXXDKCNDRGVCNNKKHCHCSASYLPPDCSVQSDLWPGGSIDSGNFPPVAIPARLPERRYIENIYHSKPMRWPFFLFIPFFIIFCVLIAIMVKVNFQRKKWRXEDYSSDEQPESESEPKG

SEQ ID NO: 1488 - protein, 672 aa, Homo sapiens
  MOD_RES (28)..(28): Selenocysteine
  MOD_RES (57)..(57): Selenocysteine
  MOD_RES (78)..(78): Selenocysteine
  MOD_RES (110)..(110): Selenocysteine
  MOD_RES (112)..(112): Selenocysteine
  MOD_RES (198)..(199): Selenocysteine
  MOD_RES (212)..(212): Selenocysteine
  MOD_RES (222)..(222): Selenocysteine
  MOD_RES (239)..(240): Selenocysteine
  MOD_RES (249)..(249): Selenocysteine
  MOD_RES (255)..(255): Selenocysteine
  MOD_RES (281)..(281): Selenocysteine
  MOD_RES (301)..(301): Selenocysteine
  MOD_RES (322)..(322): Selenocysteine
  MOD_RES (402)..(402): Selenocysteine
  MOD_RES (412)..(412): Selenocysteine
  MOD_RES (418)..(418): Selenocysteine
  MOD_RES (473)..(473): Selenocysteine
  MOD_RES (497)..(497): Selenocysteine
  MOD_RES (499)..(499): Selenocysteine
  MOD_RES (519)..(519): Selenocysteine
  MOD_RES (533)..(533): Selenocysteine
  MOD_RES (554)..(555): Selenocysteine
  MOD_RES (655)..(655): Selenocysteine
MWRVLFLLSGLGGLRMDSNFDSLPVQIXVPEKIRSIIKEGIESQASYKIVIEGKPYXVNLMQKNFLPHNFRVYSYSGXGIMKPLDQDFQNFCHYQGYIEGYPKSVVMVSXCXGLRGVLQFENVSYGIEPLESSVGFEHVIYQVKHKKADVSLYNEKDIESRDLSFKLQSVEPQQDFAKYIEMHVIVEKQLYNHMGSDXXVVAQKVFQLIGLXNAIFVSFNIXIILSSLELWIDENKIAXXGEANELLHXFLRWKXSYLVLRPHDVAFLLVYREKSNYVGAXFQGKMCDANYAGGVVLHPRXISLESLAVILAQLLSLSMGIXYDDINKCQCSGAVCIMNPEAIHFSGVKIFSNCSFEDFAHFISKQKSQCLHNQPRLDPFFKQQAVCGNAKLEAGEECDCGXEQDCALIGEXCCDIAXCRFKAGSNCAEGPCCENCLFMSKERMCRPSFEECDLPEYCNGSSASCPENHYVQXGHPCGLNQWICIDGVCMSGDKQCXDXFGKEVEFGPSECYSHLNSKXDVSGNCGISDSGYXQCEVCRNQRCVSSSYLGYDCXXDKCNDRGVCNNKKHCHCSASYLPPDCSVQSDLWPGGSIDSGNFPPVAIPARLPERRYIENIYHSKPMRWPFFLFIPFFIIFCVLIAIMVKVNFQRKKWRXEDYSSDEQPESESEPKG

SEQ ID NO: 1489 - protein, 735 aa, Homo sapiens
  MOD_RES (28)..(28): Selenocysteine
  MOD_RES (57)..(57): Selenocysteine
  MOD_RES (78)..(78): Selenocysteine
  MOD_RES (110)..(110): Selenocysteine
  MOD_RES (112)..(112): Selenocysteine
  MOD_RES (198)..(199): Selenocysteine
  MOD_RES (212)..(212): Selenocysteine
  MOD_RES (222)..(222): Selenocysteine
  MOD_RES (239)..(240): Selenocysteine
  MOD_RES (249)..(249): Selenocysteine
  MOD_RES (255)..(255): Selenocysteine
  MOD_RES (281)..(281): Selenocysteine
  MOD_RES (301)..(301): Selenocysteine
  MOD_RES (322)..(322): Selenocysteine
  MOD_RES (402)..(402): Selenocysteine
  MOD_RES (412)..(412): Selenocysteine
  MOD_RES (418)..(418): Selenocysteine
  MOD_RES (473)..(473): Selenocysteine
  MOD_RES (497)..(497): Selenocysteine
  MOD_RES (499)..(499): Selenocysteine
  MOD_RES (519)..(519): Selenocysteine
  MOD_RES (533)..(533): Selenocysteine
  MOD_RES (561)..(561): Selenocysteine
  MOD_RES (593)..(593): Selenocysteine
  MOD_RES (617)..(618): Selenocysteine
  MOD_RES (718)..(718): Selenocysteine
MWRVLFLLSGLGGLRMDSNFDSLPVQIXVPEKIRSIIKEGIESQASYKIVIEGKPYXVNLMQKNFLPHNFRVYSYSGXGIMKPLDQDFQNFCHYQGYIEGYPKSVVMVSXCXGLRGVLQFENVSYGIEPLESSVGFEHVIYQVKHKKADVSLYNEKDIESRDLSFKLQSVEPQQDFAKYIEMHVIVEKQLYNHMGSDXXVVAQKVFQLIGLXNAIFVSFNIXIILSSLELWIDENKIAXXGEANELLHXFLRWKXSYLVLRPHDVAFLLVYREKSNYVGAXFQGKMCDANYAGGVVLHPRXISLESLAVILAQLLSLSMGIXYDDINKCQCSGAVCIMNPEAIHFSGVKIFSNCSFEDFAHFISKQKSQCLHNQPRLDPFFKQQAVCGNAKLEAGEECDCGXEQDCALIGEXCCDIAXCRFKAGSNCAEGPCCENCLFMSKERMCRPSFEECDLPEYCNGSSASCPENHYVQXGHPCGLNQWICIDGVCMSGDKQCXDXFGKEVEFGPSECYSHLNSKXDVSGNCGISDSGYXQCEADNLQCGKLICKYVGKFLLQIPRAXIIYANISGHLCIAVEFASDHADSQKMWIKDGXSCGSNKVCRNQRCVSSSYLGYDCXXDKCNDRGVCNNKKHCHCSASYLPPDCSVQSDLWPGGSIDSGNFPPVAIPARLPERRYIENIYHSKPMRWPFFLFIPFFIIFCVLIAIMVKVNFQRKKWRXEDYSSDEQPESESEPKG

SEQ ID NO: 1490 - protein, 716 aa, Homo sapiens
  MOD_RES (28)..(28): Selenocysteine
  MOD_RES (57)..(57): Selenocysteine
  MOD_RES (78)..(78): Selenocysteine
  MOD_RES (110)..(110): Selenocysteine
  MOD_RES (112)..(112): Selenocysteine
  MOD_RES (179)..(180): Selenocysteine
  MOD_RES (193)..(193): Selenocysteine
  MOD_RES (203)..(203): Selenocysteine
  MOD_RES (220)..(221): Selenocysteine
  MOD_RES (230)..(230): Selenocysteine
  MOD_RES (236)..(236): Selenocysteine
  MOD_RES (262)..(262): Selenocysteine
  MOD_RES (282)..(282): Selenocysteine
  MOD_RES (303)..(303): Selenocysteine
  MOD_RES (383)..(383): Selenocysteine
  MOD_RES (393)..(393): Selenocysteine
  MOD_RES (399)..(399): Selenocysteine
  MOD_RES (454)..(454): Selenocysteine
  MOD_RES (478)..(478): Selenocysteine
  MOD_RES (480)..(480): Selenocysteine
  MOD_RES (500)..(500): Selenocysteine
  MOD_RES (514)..(514): Selenocysteine
  MOD_RES (542)..(542): Selenocysteine
  MOD_RES (574)..(574): Selenocysteine
  MOD_RES (598)..(599): Selenocysteine
  MOD_RES (699)..(699): Selenocysteine
MWRVLFLLSGLGGLRMDSNFDSLPVQIXVPEKIRSIIKEGIESQASYKIVIEGKPYXVNLMQKNFLPHNFRVYSYSGXGIMKPLDQDFQNFCHYQGYIEGYPKSVVMVSXCXGLRGVLQFENVSYGIEPLESSVGFEHVIYQVKHKKADVSLYNEKDIESRDLSFKLQSVEYNHMGSDXXVVAQKVFQLIGLXNAIFVSFNIXIILSSLELWIDENKIAXXGEANELLHXFLRWKXSYLVLRPHDVAFLLVYREKSNYVGAXFQGKMCDANYAGGVVLHPRXISLESLAVILAQLLSLSMGIXYDDINKCQCSGAVCIMNPEAIHFSGVKIFSNCSFEDFAHFISKQKSQCLHNQPRLDPFFKQQAVCGNAKLEAGEECDCGXEQDCALIGEXCCDIAXCRFKAGSNCAEGPCCENCLFMSKERMCRPSFEECDLPEYCNGSSASCPENHYVQXGHPCGLNQWICIDGVCMSGDKQCXDXFGKEVEFGPSECYSHLNSKXDVSGNCGISDSGYXQCEADNLQCGKLICKYVGKFLLQIPRAXIIYANISGHLCIAVEFASDHADSQKMWIKDGXSCGSNKVCRNQRCVSSSYLGYDCXXDKCNDRGVCNNKKHCHCSASYLPPDCSVQSDLWPGGSIDSGNFPPVAIPARLPERRYIENIYHSKPMRWPFFLFIPFFIIFCVLIAIMVKVNFQRKKWRXEDYSSDEQPESESEPKG

SEQ ID NO: 1491 - protein, 629 aa, Homo sapiens
  MOD_RES (36)..(36): Selenocysteine
  MOD_RES (38)..(38): Selenocysteine
  MOD_RES (61)..(61): Selenocysteine
  MOD_RES (86)..(86): Selenocysteine
  MOD_RES (93)..(93): Selenocysteine
  MOD_RES (110)..(110): Selenocysteine
  MOD_RES (113)..(113): Selenocysteine
  MOD_RES (197)..(197): Selenocysteine
  MOD_RES (210)..(210): Selenocysteine
  MOD_RES (225)..(225): Selenocysteine
  MOD_RES (230)..(230): Selenocysteine
  MOD_RES (247)..(247): Selenocysteine
  MOD_RES (293)..(293): Selenocysteine
  MOD_RES (297)..(297): Selenocysteine
  MOD_RES (317)..(317): Selenocysteine
  MOD_RES (370)..(370): Selenocysteine
  MOD_RES (449)..(449): Selenocysteine
  MOD_RES (452)..(452): Selenocysteine
  MOD_RES (475)..(475): Selenocysteine
  MOD_RES (483)..(483): Selenocysteine
  MOD_RES (573)..(573): Selenocysteine
  MOD_RES (576)..(576): Selenocysteine
  MOD_RES (591)..(592): Selenocysteine
  MOD_RES (622)..(622): Selenocysteine
  MOD_RES (624)..(624): Selenocysteine
MFRLWLLLAGLCGLLASRPGFQNSLLQIVIPEKIQXNXNDSSEIEYEQISYIIPIDEKLYXVHLKQRYFLADNFMIYLYNQGSMNXYSSDIQXQCYYQGNIEGYPDSMVXLSXCSGLRGILQFENVSYGIEPLESAVEFQHVLYKLKNEDNDIAIFIDRSLKEQPMDDNIFISEKSEPAVPDLFPLYLEMHIVVDKXLYDYWGSDSMIVXNKVIEIVGLANSMFXQFKVXIVLSSLELWSDENKISXVGEADELLQKFLEWKQSYLNLRPHDIAYLLIYMDYPRYLGAVFPGXMCIXRYSAGVALQCGPASCCDFRXCVLKDGAKCYKGLCCKDCQILQSGVECRPKAHPECDIAENCNGSSPECGPDIXLINGLSCKNNKFICYDGDCHDLDARCESVFGKGSRNAPFACYEEIQSQSDRFGNCGRDRNNKYVFCGWRNLICGRLVCXYPXRKPFHQENGDVIYAFVRDSVCIXVDYKLPRXVPDPLAVKNGSQCDIGRVCVNRECVESRIIKASAHVCSQQCSGHGVCDSRNKCHCSPGYKPPNCQIRSKGFSIFPEEDMGSIMERASGKXENXWLLGFLIALPILIVXXAIVLARKQLKKWFAKEEEFPSSESKSQDSXQXQSSSN

SEQ ID NO: 1492 - protein, 787 aa, Homo sapiens
  MOD_RES (36)..(36): Selenocysteine
  MOD_RES (38)..(38): Selenocysteine
  MOD_RES (61)..(61): Selenocysteine
  MOD_RES (86)..(86): Selenocysteine
  MOD_RES (93)..(93): Selenocysteine
  MOD_RES (110)..(110): Selenocysteine
  MOD_RES (113)..(113): Selenocysteine
  MOD_RES (197)..(197): Selenocysteine
  MOD_RES (210)..(210): Selenocysteine
  MOD_RES (225)..(225): Selenocysteine
  MOD_RES (230)..(230): Selenocysteine
  MOD_RES (247)..(247): Selenocysteine
  MOD_RES (293)..(293): Selenocysteine
  MOD_RES (297)..(297): Selenocysteine
  MOD_RES (311)..(311): Selenocysteine
  MOD_RES (320)..(320): Selenocysteine
  MOD_RES (343)..(343): Selenocysteine
  MOD_RES (358)..(358): Selenocysteine
  MOD_RES (409)..(409): Selenocysteine
  MOD_RES (423)..(423): Selenocysteine
  MOD_RES (476)..(476): Selenocysteine
  MOD_RES (555)..(555): Selenocysteine
  MOD_RES (558)..(558): Selenocysteine
  MOD_RES (581)..(581): Selenocysteine
  MOD_RES (589)..(589): Selenocysteine
  MOD_RES (679)..(679): Selenocysteine
  MOD_RES (682)..(682): Selenocysteine
  MOD_RES (697)..(698): Selenocysteine
  MOD_RES (728)..(728): Selenocysteine
  MOD_RES (730)..(730): Selenocysteine
  MOD_RES (741)..(741): Selenocysteine
  MOD_RES (743)..(743): Selenocysteine
  MOD_RES (748)..(748): Selenocysteine
  MOD_RES (758)..(758): Selenocysteine
  MOD_RES (771)..(771): Selenocysteine
  MOD_RES (780)..(780): Selenocysteine
  MOD_RES (782)..(782): Selenocysteine
MFRLWLLLAGLCGLLASRPGFQNSLLQIVIPEKIQXNXNDSSEIEYEQISYIIPIDEKLYXVHLKQRYFLADNFMIYLYNQGSMNXYSSDIQXQCYYQGNIEGYPDSMVXLSXCSGLRGILQFENVSYGIEPLESAVEFQHVLYKLKNEDNDIAIFIDRSLKEQPMDDNIFISEKSEPAVPDLFPLYLEMHIVVDKXLYDYWGSDSMIVXNKVIEIVGLANSMFXQFKVXIVLSSLELWSDENKISXVGEADELLQKFLEWKQSYLNLRPHDIAYLLIYMDYPRYLGAVFPGXMCIXRYSAGVALYPKEIXLEAFAVIVXQMLALSLGISYDDPKKCQCSESXCIMNPEVVQSNGVKXFSSCSLRSFQNFISNVGVKCLQNKPQMQKKSPKPVCGNGRLEGNEICDCGXEAQCGPASCCDFRXCVLKDGAKCYKGLCCKDCQILQSGVECRPKAHPECDIAENCNGSSPECGPDIXLINGLSCKNNKFICYDGDCHDLDARCESVFGKGSRNAPFACYEEIQSQSDRFGNCGRDRNNKYVFCGWRNLICGRLVCXYPXRKPFHQENGDVIYAFVRDSVCIXVDYKLPRXVPDPLAVKNGSQCDIGRVCVNRECVESRIIKASAHVCSQQCSGHGVCDSRNKCHCSPGYKPPNCQIRSKGFSIFPEEDMGSIMERASGKXENXWLLGFLIALPILIVXXAIVLARKQLKKWFAKEEEFPSSESKSEGSXQXYASQSSSEGSXQXYASQXRSESSSQADXSKSKSEDSAEAYXSRSKSQDSXQXQSSSN

SEQ ID NO: 1493 - protein, 184 aa, Homo sapiens
  MOD_RES (36)..(36): Selenocysteine
  MOD_RES (38)..(38): Selenocysteine
  MOD_RES (61)..(61): Selenocysteine
  MOD_RES (86)..(86): Selenocysteine
  MOD_RES (93)..(93): Selenocysteine
  MOD_RES (110)..(110): Selenocysteine
  MOD_RES (113)..(113): Selenocysteine
MFRLWLLLAGLCGLLASRPGFQNSLLQIVIPEKIQXNXNDSSEIEYEQISYIIPIDEKLYXVHLKQRYFLADNFMIYLYNQGSMNXYSSDIQXQCYYQGNIEGYPDSMVXLSXCSGLRGILQFENVSYGIEPLESAVEFQHVLYKLKNEDNDIAIFIDRSLKEQPMDDNIFISEKYDYWGSDSM

SEQ ID NO: 1494 - protein, 155 aa, Homo sapiens
  MOD_RES (36)..(36): Selenocysteine
  MOD_RES (38)..(38): Selenocysteine
  MOD_RES (61)..(61): Selenocysteine
  MOD_RES (86)..(86): Selenocysteine
  MOD_RES (93)..(93): Selenocysteine
  MOD_RES (110)..(110): Selenocysteine
  MOD_RES (113)..(113): Selenocysteine
MFRLWLLLAGLCGLLASRPGFQNSLLQIVIPEKIQXNXNDSSEIEYEQISYIIPIDEKLYXVHLKQRYFLADNFMIYLYNQGSMNXYSSDIQXQCYYQGNIEGYPDSMVXLSXCSGLRSLKEQPMDDNIFISEKSEPAVPDLFPLYLEMHIVVDK

SEQ ID NO: 1495 - protein, 53 aa, Homo sapiens
  MOD_RES (12)..(12): Selenocysteine
  MOD_RES (19)..(19): Selenocysteine
  MOD_RES (36)..(36): Selenocysteine
  MOD_RES (39)..(39): Selenocysteine
MIYLYNQGSMNXYSSDIQXQCYYQGNIEGYPDSMVXLSXCSGLRGILQFENVS

SEQ ID NO: 1496 - protein, 688 aa, Homo sapiens
  MOD_RES (21)..(21): Selenocysteine
  MOD_RES (68)..(68): Selenocysteine
  MOD_RES (93)..(93): Selenocysteine
  MOD_RES (100)..(100): Selenocysteine
  MOD_RES (117)..(117): Selenocysteine
  MOD_RES (120)..(120): Selenocysteine
  MOD_RES (204)..(204): Selenocysteine
  MOD_RES (217)..(217): Selenocysteine
  MOD_RES (232)..(232): Selenocysteine
  MOD_RES (237)..(237): Selenocysteine
  MOD_RES (254)..(254): Selenocysteine
  MOD_RES (300)..(300): Selenocysteine
  MOD_RES (304)..(304): Selenocysteine
  MOD_RES (324)..(324): Selenocysteine
  MOD_RES (377)..(377): Selenocysteine
  MOD_RES (456)..(456): Selenocysteine
  MOD_RES (459)..(459): Selenocysteine
  MOD_RES (482)..(482): Selenocysteine
  MOD_RES (490)..(490): Selenocysteine
  MOD_RES (580)..(580): Selenocysteine
  MOD_RES (583)..(583): Selenocysteine
  MOD_RES (598)..(599): Selenocysteine
  MOD_RES (629)..(629): Selenocysteine
  MOD_RES (631)..(631): Selenocysteine
  MOD_RES (642)..(642): Selenocysteine
  MOD_RES (644)..(644): Selenocysteine
  MOD_RES (649)..(649): Selenocysteine
  MOD_RES (659)..(659): Selenocysteine
  MOD_RES (672)..(672): Selenocysteine
  MOD_RES (681)..(681): Selenocysteine
  MOD_RES (683)..(683): Selenocysteine
MNVRGAAPGVRASPRPWQFPXSQRLPAGSPEAAPCSASGCCWPGSAASWRQDPEQISYIIPIDEKLYXVHLKQRYFLADNFMIYLYNQGSMNXYSSDIQXQCYYQGNIEGYPDSMVXLSXCSGLRGILQFENVSYGIEPLESAVEFQHVLYKLKNEDNDIAIFIDRSLKEQPMDDNIFISEKSEPAVPDLFPLYLEMHIVVDKXLYDYWGSDSMIVXNKVIEIVGLANSMFXQFKVXIVLSSLELWSDENKISXVGEADELLQKFLEWKQSYLNLRPHDIAYLLIYMDYPRYLGAVFPGXMCIXRYSAGVALQCGPASCCDFRXCVLKDGAKCYKGLCCKDCQILQSGVECRPKAHPECDIAENCNGSSPECGPDIXLINGLSCKNNKFICYDGDCHDLDARCESVFGKGSRNAPFACYEEIQSQSDRFGNCGRDRNNKYVFCGWRNLICGRLVCXYPXRKPFHQENGDVIYAFVRDSVCIXVDYKLPRXVPDPLAVKNGSQCDIGRVCVNRECVESRIIKASAHVCSQQCSGHGVCDSRNKCHCSPGYKPPNCQIRSKGFSIFPEEDMGSIMERASGKXENXWLLGFLIALPILIVXXAIVLARKQLKKWFAKEEEFPSSESKSEGSXQXYASQSSSEGSXQXYASQXRSESSSQADXSKSKSEDSAEAYXSRSKSQDSXQXQSSSN

SEQ ID NO: 1497 - protein, 173 aa, Homo sapiens
  MOD_RES (41)..(41): Selenocysteine
  MOD_RES (67)..(67): Selenocysteine
  MOD_RES (69)..(69): Selenocysteine
  MOD_RES (92)..(92): Selenocysteine
  MOD_RES (117)..(117): Selenocysteine
  MOD_RES (124)..(124): Selenocysteine
  MOD_RES (141)..(141): Selenocysteine
  MOD_RES (144)..(144): Selenocysteine
MQLALFKNMKSWHFILKSGSLFPSLECSHIWLNSFEKILEXGLANMNIYLGFQNSLLQIVIPEKIQXNXNDSSEIEYEQISYIIPIDEKLYXVHLKQRYFLADNFMIYLYNQGSMNXYSSDIQXQCYYQGNIEGYPDSMVXLSXCSGLRGILQFENVSYGIEPLESAVEFQHV

SEQ ID NO: 1498 - protein, 54 aa, Homo sapiens
  MOD_RES (1)..(1): Any amino acid
  MOD_RES (8)..(8): Selenocysteine
  MOD_RES (10)..(10): Selenocysteine
  MOD_RES (21)..(21): Selenocysteine
  MOD_RES (23)..(23): Selenocysteine
  MOD_RES (28)..(28): Selenocysteine
  MOD_RES (38)..(38): Selenocysteine
  MOD_RES (47)..(47): Selenocysteine
  MOD_RES (49)..(49): Selenocysteine
XSKSEGSXQXYASQSSSEGSXQXYASQXRSESSSQADXSKSKSQDSXQXQSSSN

SEQ ID NO: 1499 - protein, 245 aa, Homo sapiens
  MOD_RES (67)..(67): Selenocysteine
  MOD_RES (98)..(98): Selenocysteine
  MOD_RES (129)..(129): Selenocysteine
  MOD_RES (134)..(134): Selenocysteine
  MOD_RES (149)..(149): Selenocysteine
  MOD_RES (151)..(151): Selenocysteine
  MOD_RES (153)..(153): Selenocysteine
  MOD_RES (161)..(161): Selenocysteine
  MOD_RES (188)..(188): Selenocysteine
  MOD_RES (228)..(228): Selenocysteine
  MOD_RES (231)..(231): Selenocysteine
MRGLGLWLLGAMMLPAIAPSRPWALMEQYEVVLPWRLPGPRVRRALPSHLGGQFRPQPCPYLSIRGXYYRPARCPGLIQPVAQLRLSQSSAGRAPACXWGLEMQWSSRRLCRHHQGLHPERVSYVLGAXGHNFXLHLRKNRDLLGSGYXEXYXAANGSEVXEQPRGQDHCFYQGHVEGYPDSAASLSXCAGLRGFFQVGSDLHLIEPLDEGGEGGRHAVYQAEHLLQXAGXCGVSDDSLGSLLGP

SEQ ID NO: 1500 - protein, 742 aa, Homo sapiens
  MOD_RES (64)..(64): Selenocysteine
  MOD_RES (69)..(69): Selenocysteine
  MOD_RES (84)..(84): Selenocysteine
  MOD_RES (86)..(86): Selenocysteine
  MOD_RES (88)..(88): Selenocysteine
  MOD_RES (96)..(96): Selenocysteine
  MOD_RES (123)..(123): Selenocysteine
  MOD_RES (163)..(163): Selenocysteine
  MOD_RES (166)..(166): Selenocysteine
  MOD_RES (182)..(182): Selenocysteine
  MOD_RES (199)..(199): Selenocysteine
  MOD_RES (267)..(267): Selenocysteine
  MOD_RES (273)..(273): Selenocysteine
  MOD_RES (280)..(280): Selenocysteine
  MOD_RES (292)..(292): Selenocysteine
  MOD_RES (297)..(297): Selenocysteine
  MOD_RES (299)..(300): Selenocysteine
  MOD_RES (331)..(331): Selenocysteine
  MOD_RES (438)..(439): Selenocysteine
  MOD_RES (452)..(452): Selenocysteine
  MOD_RES (496)..(496): Selenocysteine
  MOD_RES (510)..(510): Selenocysteine
  MOD_RES (575)..(576): Selenocysteine
  MOD_RES (580)..(580): Selenocysteine
  MOD_RES (589)..(589): Selenocysteine
  MOD_RES (645)..(645): Selenocysteine
  MOD_RES (682)..(682): Selenocysteine
  MOD_RES (704)..(704): Selenocysteine
  MOD_RES (715)..(715): Selenocysteine
  MOD_RES (725)..(725): Selenocysteine
  MOD_RES (732)..(732): Selenocysteine
MRGLGLWLLGAMMLPAIAPSRPWALMEQYEVVLPWRLPGPRVRRALPSHLGLHPERVSYVLGAXGHNFXLHLRKNRDLLGSGYXEXYXAANGSEVXEQPRGQDHCFYQGHVEGYPDSAASLSXCAGLRGFFQVGSDLHLIEPLDEGGEGGRHAVYQAEHLLQXAGXCGVSDDSLGSLLGPRXAAVFRPRPGDSLPSREXRYVELYVVVDNAEFQMLGSEAAVRHRVLEVVNHVDKLYQKLNFRVVLVGLEIWNSQDRFHVSPDPSVXLENLLXWQARQRXRRHLHDNVQLIXGVDFXGXXVGFARVSAMCSHSSGAVNQDHSKNPVGVACXMAHEMGHNLGMDHDENVQGCRCQERFEAGRCIMAGSIGSSFPRMFSDCSQAYLESFLERPQSVCLANAPDLSHLVGGPVCGNLFVERGEQCDCGPPEDCRNRCCNSXXCQLAEGAQCAHGXCCQECKVKPAGELCRPKKDMCDLEEFCDGRHPECPEDAFQENGXPCSGGYCYNGACPXLAQQCQAFWGPGGQAAEESCFSYDILPGCKASRYRADMCGVLQCKGGQQPLGRAICIVDVCHALXXEDGXAYEPVPEGXRCGPEKVCWKGRCQDLHVYRSSNCSAQCHNHGVCNHKQECHCHAGWAPPHCAKLLXEVHAGCQPRAGQGRGSSPIQGPPRAGPHHPPGPARPXPGLLGGSEEAAPCSSGHCVQPXLPSSCLHPAGXKAGHQANVRXPSAPSQXRGWCGQPWSS

SEQ ID NO: 1501 - protein, 824 aa, Homo sapiens
  MOD_RES (64)..(64): Selenocysteine
  MOD_RES (69)..(69): Selenocysteine
  MOD_RES (84)..(84): Selenocysteine
  MOD_RES (86)..(86): Selenocysteine
  MOD_RES (88)..(88): Selenocysteine
  MOD_RES (96)..(96): Selenocysteine
  MOD_RES (123)..(123): Selenocysteine
  MOD_RES (163)..(163): Selenocysteine
  MOD_RES (166)..(166): Selenocysteine
  MOD_RES (182)..(182): Selenocysteine
  MOD_RES (199)..(199): Selenocysteine
  MOD_RES (267)..(267): Selenocysteine
  MOD_RES (273)..(273): Selenocysteine
  MOD_RES (280)..(280): Selenocysteine
  MOD_RES (292)..(292): Selenocysteine
  MOD_RES (297)..(297): Selenocysteine
  MOD_RES (299)..(300): Selenocysteine
  MOD_RES (331)..(331): Selenocysteine
  MOD_RES (438)..(439): Selenocysteine
  MOD_RES (452)..(452): Selenocysteine
  MOD_RES (496)..(496): Selenocysteine
  MOD_RES (510)..(510): Selenocysteine
  MOD_RES (575)..(576): Selenocysteine
  MOD_RES (580)..(580): Selenocysteine
  MOD_RES (589)..(589): Selenocysteine
  MOD_RES (645)..(645): Selenocysteine
  MOD_RES (671)..(671): Selenocysteine
  MOD_RES (694)..(695): Selenocysteine
  MOD_RES (729)..(730): Selenocysteine
  MOD_RES (755)..(755): Selenocysteine
  MOD_RES (767)..(767): Selenocysteine
  MOD_RES (778)..(778): Selenocysteine
  MOD_RES (822)..(822): Selenocysteine
MRGLGLWLLGAMMLPAIAPSRPWALMEQYEVVLPWRLPGPRVRRALPSHLGLHPERVSYVLGAXGHNFXLHLRKNRDLLGSGYXEXYXAANGSEVXEQPRGQDHCFYQGHVEGYPDSAASLSXCAGLRGFFQVGSDLHLIEPLDEGGEGGRHAVYQAEHLLQXAGXCGVSDDSLGSLLGPRXAAVFRPRPGDSLPSREXRYVELYVVVDNAEFQMLGSEAAVRHRVLEVVNHVDKLYQKLNFRVVLVGLEIWNSQDRFHVSPDPSVXLENLLXWQARQRXRRHLHDNVQLIXGVDFXGXXVGFARVSAMCSHSSGAVNQDHSKNPVGVACXMAHEMGHNLGMDHDENVQGCRCQERFEAGRCIMAGSIGSSFPRMFSDCSQAYLESFLERPQSVCLANAPDLSHLVGGPVCGNLFVERGEQCDCGPPEDCRNRCCNSXXCQLAEGAQCAHGXCCQECKVKPAGELCRPKKDMCDLEEFCDGRHPECPEDAFQENGXPCSGGYCYNGACPXLAQQCQAFWGPGGQAAEESCFSYDILPGCKASRYRADMCGVLQCKGGQQPLGRAICIVDVCHALXXEDGXAYEPVPEGXRCGPEKVCWKGRCQDLHVYRSSNCSAQCHNHGVCNHKQECHCHAGWAPPHCAKLLXEVHAASGSLPVFVVVVLVLLAVVLVXLAGIIVYRKARSRILSRNVAPKXXMGRSNPLFHQAASRVPAKGGAPAPSRGPQELVPXXHPGQPARHPASSVALKRPPPAPPVXVSSPPFPVPVYXRQAPKQVIKPXFAPPVPPVKPGAGAANPGPAEGAVGPKVALKPPIQRKQGAGAPXAP

SEQ ID NO: 1502 - protein, 109 aa, Homo sapiens
MRGLGLWLLGAMMLPGPAPREGELRPWGHRAQLHPPPAEEQGPAGLRLHRDLYGCQWLRGDGAASRAGPLLLPGPRRGVPGLSRQPQHLCRPQGFLPGGVRPAPDRAPG

SEQ ID NO: 1503 - protein, 733 aa, Homo sapiens
  MOD_RES (124)..(124): Selenocysteine
  MOD_RES (127)..(127): Selenocysteine
  MOD_RES (143)..(143): Selenocysteine
  MOD_RES (160)..(160): Selenocysteine
  MOD_RES (228)..(228): Selenocysteine
  MOD_RES (234)..(234): Selenocysteine
  MOD_RES (241)..(241): Selenocysteine
  MOD_RES (253)..(253): Selenocysteine
  MOD_RES (258)..(258): Selenocysteine
  MOD_RES (260)..(261): Selenocysteine
  MOD_RES (292)..(292): Selenocysteine
  MOD_RES (399)..(400): Selenocysteine
  MOD_RES (413)..(413): Selenocysteine
  MOD_RES (457)..(457): Selenocysteine
  MOD_RES (471)..(471): Selenocysteine
  MOD_RES (536)..(537): Selenocysteine
  MOD_RES (541)..(541): Selenocysteine
  MOD_RES (550)..(550): Selenocysteine
  MOD_RES (580)..(580): Selenocysteine
  MOD_RES (606)..(606): Selenocysteine
  MOD_RES (629)..(630): Selenocysteine
  MOD_RES (664)..(665): Selenocysteine
  MOD_RES (690)..(690): Selenocysteine
  MOD_RES (702)..(702): Selenocysteine
  MOD_RES (731)..(731): Selenocysteine
MRGLGLWLLGAMMLPGPAPREGELRPWGHRAQLHPPPAEEQGPAGLRLHRDLYGCQWLRGDGAASRAGPLLLPGPRRGVPGLSRQPQHLCRPQVGSDLHLIEPLDEGGEGGRHAVYQAEHLLQXAGXCGVSDDSLGSLLGPRXAAVFRPRPGDSLPSREXRYVELYVVVDNAEFQMLGSEAAVRHRVLEVVNHVDKLYQKLNFRVVLVGLEIWNSQDRFHVSPDPSVXLENLLXWQARQRXRRHLHDNVQLIXGVDFXGXXVGFARVSAMCSHSSGAVNQDHSKNPVGVACXMAHEMGHNLGMDHDENVQGCRCQERFEAGRCIMAGSIGSSFPRMFSDCSQAYLESFLERPQSVCLANAPDLSHLVGGPVCGNLFVERGEQCDCGPPEDCRNRCCNSXXCQLAEGAQCAHGXCCQECKVKPAGELCRPKKDMCDLEEFCDGRHPECPEDAFQENGXPCSGGYCYNGACPXLAQQCQAFWGPGGQAAEESCFSYDILPGCKASRYRADMCGVLQCKGGQQPLGRAICIVDVCHALXXEDGXAYEPVPEGXRCGPEKVCNHKQECHCHAGWAPPHCAKLLXEVHAASGSLPVFVVVVLVLLAVVLVXLAGIIVYRKARSRILSRNVAPKXXMGRSNPLFHQAASRVPAKGGAPAPSRGPQELVPXXHPGQPARHPASSVALKRPPPAPPVXVSSPPFPVPVYXRQAPKQGAVGPKVALKPPIQRKQGAGAPXAP

SEQ ID NO: 1504 - protein, 628 aa, Homo sapiens
  MOD_RES (11)..(11): Selenocysteine
  MOD_RES (37)..(37): Selenocysteine
  MOD_RES (47)..(47): Selenocysteine
  MOD_RES (52)..(52): Selenocysteine
  MOD_RES (96)..(96): Selenocysteine
  MOD_RES (102)..(102): Selenocysteine
  MOD_RES (105)..(105): Selenocysteine
  MOD_RES (186)..(186): Selenocysteine
  MOD_RES (198)..(198): Selenocysteine
  MOD_RES (211)..(211): Selenocysteine
  MOD_RES (233)..(233): Selenocysteine
  MOD_RES (266)..(266): Selenocysteine
  MOD_RES (294)..(294): Selenocysteine
  MOD_RES (312)..(312): Selenocysteine
  MOD_RES (320)..(320): Selenocysteine
  MOD_RES (337)..(337): Selenocysteine
  MOD_RES (340)..(340): Selenocysteine
  MOD_RES (394)..(394): Selenocysteine
  MOD_RES (432)..(432): Selenocysteine
  MOD_RES (446)..(446): Selenocysteine
  MOD_RES (471)..(471): Selenocysteine
  MOD_RES (477)..(477): Selenocysteine
  MOD_RES (565)..(565): Selenocysteine
  MOD_RES (593)..(593): Selenocysteine
  MOD_RES (598)..(598): Selenocysteine
  MOD_RES (621)..(621): Selenocysteine
MGSGARFPSGXLRVRWLLLLGLVGPVLGAARPGFQQXSHLSSYEIIXPWRLXRERREAPRPYSKQVSYVIQAEGKEHIIHLERNKDLLPEDFVVYXYNKEGXLIXDHPNIQNHCHYRGYVEGVHNSSIALSDCFGLRGLLHLENASYGIEPLQNSSHFEHIIYRMDDVYKEPLKCGVSNKDIEKEXAKDEEEEPPSMXQLLRRRRAVLPQXRYVELFIVVDKERYDMMGRNQXAVREEMILLANYLDSMYIMLNIRIVLVGLEIWXNGNLINIVGGAGDVLGNFVQWREKFLIXRRRHDSAQLVLKKGFGGXAGMAFVGXVCSRSHAGGINVFGQIXVEXFASIVAHELGHNLGMNHDDGRDCSCGAKSCIMNSGASGSRNFSSCSAEDFEKLXLNKGGNCLLNIPKPDEAYSAPSCGNKLVDAGEECDCGXPKECELDPCCEGSXCKLKSFAECAYGDCCKDCRFLPGGXLCRGKXSECDVPEYCNGSSQFCQPDVFIQNGYPCQNNKAYCYNGMCQYYDAQCQVIFGSKAKAAPKDCFIEVNSKGDRFGNCGFSGNEYKKCAXGNALCGKLQCENVQEIPVFGIVPAIIQXPSRGXKCWGVDFQLGSDVPDPGMVNEGXKCGAGKK

SEQ ID NO: 1505 - protein, 655 aa, Homo sapiens
  MOD_RES (11)..(11): Selenocysteine
  MOD_RES (37)..(37): Selenocysteine
  MOD_RES (47)..(47): Selenocysteine
  MOD_RES (52)..(52): Selenocysteine
  MOD_RES (96)..(96): Selenocysteine
  MOD_RES (102)..(102): Selenocysteine
  MOD_RES (105)..(105): Selenocysteine
  MOD_RES (186)..(186): Selenocysteine
  MOD_RES (198)..(198): Selenocysteine
  MOD_RES (211)..(211): Selenocysteine
  MOD_RES (233)..(233): Selenocysteine
  MOD_RES (266)..(266): Selenocysteine
  MOD_RES (294)..(294): Selenocysteine
  MOD_RES (312)..(312): Selenocysteine
  MOD_RES (320)..(320): Selenocysteine
  MOD_RES (337)..(337): Selenocysteine
  MOD_RES (340)..(340): Selenocysteine
  MOD_RES (394)..(394): Selenocysteine
  MOD_RES (432)..(432): Selenocysteine
  MOD_RES (446)..(446): Selenocysteine
  MOD_RES (471)..(471): Selenocysteine
  MOD_RES (477)..(477): Selenocysteine
  MOD_RES (565)..(565): Selenocysteine
  MOD_RES (593)..(593): Selenocysteine
  MOD_RES (598)..(598): Selenocysteine
  MOD_RES (621)..(621): Selenocysteine
MGSGARFPSGXLRVRWLLLLGLVGPVLGAARPGFQQXSHLSSYEIIXPWRLXRERREAPRPYSKQVSYVIQAEGKEHIIHLERNKDLLPEDFVVYXYNKEGXLIXDHPNIQNHCHYRGYVEGVHNSSIALSDCFGLRGLLHLENASYGIEPLQNSSHFEHIIYRMDDVYKEPLKCGVSNKDIEKEXAKDEEEEPPSMXQLLRRRRAVLPQXRYVELFIVVDKERYDMMGRNQXAVREEMILLANYLDSMYIMLNIRIVLVGLEIWXNGNLINIVGGAGDVLGNFVQWREKFLIXRRRHDSAQLVLKKGFGGXAGMAFVGXVCSRSHAGGINVFGQIXVEXFASIVAHELGHNLGMNHDDGRDCSCGAKSCIMNSGASGSRNFSSCSAEDFEKLXLNKGGNCLLNIPKPDEAYSAPSCGNKLVDAGEECDCGXPKECELDPCCEGSXCKLKSFAECAYGDCCKDCRFLPGGXLCRGKXSECDVPEYCNGSSQFCQPDVFIQNGYPCQNNKAYCYNGMCQYYDAQCQVIFGSKAKAAPKDCFIEVNSKGDRFGNCGFSGNEYKKCAXGNALCGKLQCENVQEIPVFGIVPAIIQXPSRGXKCWGVDFQLGSDVPDPGMVNEGXKCGAGKICRNFQCVDASVLNYDCDVQKKCHGHGK

SEQ ID NO: 1506 - protein, 712 aa, Homo sapiens
  MOD_RES (11)..(11): Selenocysteine
  MOD_RES (37)..(37): Selenocysteine
  MOD_RES (47)..(47): Selenocysteine
  MOD_RES (52)..(52): Selenocysteine
  MOD_RES (96)..(96): Selenocysteine
  MOD_RES (102)..(102): Selenocysteine
  MOD_RES (105)..(105): Selenocysteine
  MOD_RES (186)..(186): Selenocysteine
  MOD_RES (198)..(198): Selenocysteine
  MOD_RES (211)..(211): Selenocysteine
  MOD_RES (233)..(233): Selenocysteine
  MOD_RES (266)..(266): Selenocysteine
  MOD_RES (294)..(294): Selenocysteine
  MOD_RES (312)..(312): Selenocysteine
  MOD_RES (320)..(320): Selenocysteine
  MOD_RES (337)..(337): Selenocysteine
  MOD_RES (340)..(340): Selenocysteine
  MOD_RES (394)..(394): Selenocysteine
  MOD_RES (432)..(432): Selenocysteine
  MOD_RES (446)..(446): Selenocysteine
  MOD_RES (471)..(471): Selenocysteine
  MOD_RES (477)..(477): Selenocysteine
  MOD_RES (565)..(565): Selenocysteine
  MOD_RES (593)..(593): Selenocysteine
  MOD_RES (598)..(598): Selenocysteine
  MOD_RES (621)..(621): Selenocysteine
  MOD_RES (675)..(675): Selenocysteine
  MOD_RES (687)..(687): Selenocysteine
  MOD_RES (698)..(698): Selenocysteine
MGSGARFPSGXLRVRWLLLLGLVGPVLGAARPGFQQXSHLSSYEIIXPWRLXRERREAPRPYSKQVSYVIQAEGKEHIIHLERNKDLLPEDFVVYXYNKEGXLIXDHPNIQNHCHYRGYVEGVHNSSIALSDCFGLRGLLHLENASYGIEPLQNSSHFEHIIYRMDDVYKEPLKCGVSNKDIEKEXAKDEEEEPPSMXQLLRRRRAVLPQXRYVELFIVVDKERYDMMGRNQXAVREEMILLANYLDSMYIMLNIRIVLVGLEIWXNGNLINIVGGAGDVLGNFVQWREKFLIXRRRHDSAQLVLKKGFGGXAGMAFVGXVCSRSHAGGINVFGQIXVEXFASIVAHELGHNLGMNHDDGRDCSCGAKSCIMNSGASGSRNFSSCSAEDFEKLXLNKGGNCLLNIPKPDEAYSAPSCGNKLVDAGEECDCGXPKECELDPCCEGSXCKLKSFAECAYGDCCKDCRFLPGGXLCRGKXSECDVPEYCNGSSQFCQPDVFIQNGYPCQNNKAYCYNGMCQYYDAQCQVIFGSKAKAAPKDCFIEVNSKGDRFGNCGFSGNEYKKCAXGNALCGKLQCENVQEIPVFGIVPAIIQXPSRGXKCWGVDFQLGSDVPDPGMVNEGXKCGAGKICRNFQCVDASVLNYDCDVQKKCHGHGVCNSNKNCHCENGWAPPNCEXKGYGGSVDSGPXYNGQMAKIKQXLLDSRGVFLDMFLQ

SEQ ID NO: 1507 - protein, 819 aa, Homo sapiens
  MOD_RES (11)..(11): Selenocysteine
  MOD_RES (37)..(37): Selenocysteine
  MOD_RES (47)..(47): Selenocysteine
  MOD_RES (52)..(52): Selenocysteine
  MOD_RES (96)..(96): Selenocysteine
  MOD_RES (102)..(102): Selenocysteine
  MOD_RES (105)..(105): Selenocysteine
  MOD_RES (186)..(186): Selenocysteine
  MOD_RES (198)..(198): Selenocysteine
  MOD_RES (211)..(211): Selenocysteine
  MOD_RES (233)..(233): Selenocysteine
  MOD_RES (266)..(266): Selenocysteine
  MOD_RES (294)..(294): Selenocysteine
  MOD_RES (312)..(312): Selenocysteine
  MOD_RES (320)..(320): Selenocysteine
  MOD_RES (337)..(337): Selenocysteine
  MOD_RES (340)..(340): Selenocysteine
  MOD_RES (394)..(394): Selenocysteine
  MOD_RES (432)..(432): Selenocysteine
  MOD_RES (446)..(446): Selenocysteine
  MOD_RES (471)..(471): Selenocysteine
  MOD_RES (477)..(477): Selenocysteine
  MOD_RES (565)..(565): Selenocysteine
  MOD_RES (593)..(593): Selenocysteine
  MOD_RES (598)..(598): Selenocysteine
  MOD_RES (621)..(621): Selenocysteine
  MOD_RES (675)..(675): Selenocysteine
  MOD_RES (687)..(687): Selenocysteine
  MOD_RES (693)..(693): Selenocysteine
  MOD_RES (735)..(735): Selenocysteine
  MOD_RES (761)..(761): Selenocysteine
  MOD_RES (777)..(777): Selenocysteine
  MOD_RES (819)..(819): Selenocysteine
MGSGARFPSGXLRVRWLLLLGLVGPVLGAARPGFQQXSHLSSYEIIXPWRLXRERREAPRPYSKQVSYVIQAEGKEHIIHLERNKDLLPEDFVVYXYNKEGXLIXDHPNIQNHCHYRGYVEGVHNSSIALSDCFGLRGLLHLENASYGIEPLQNSSHFEHIIYRMDDVYKEPLKCGVSNKDIEKEXAKDEEEEPPSMXQLLRRRRAVLPQXRYVELFIVVDKERYDMMGRNQXAVREEMILLANYLDSMYIMLNIRIVLVGLEIWXNGNLINIVGGAGDVLGNFVQWREKFLIXRRRHDSAQLVLKKGFGGXAGMAFVGXVCSRSHAGGINVFGQIXVEXFASIVAHELGHNLGMNHDDGRDCSCGAKSCIMNSGASGSRNFSSCSAEDFEKLXLNKGGNCLLNIPKPDEAYSAPSCGNKLVDAGEECDCGXPKECELDPCCEGSXCKLKSFAECAYGDCCKDCRFLPGGXLCRGKXSECDVPEYCNGSSQFCQPDVFIQNGYPCQNNKAYCYNGMCQYYDAQCQVIFGSKAKAAPKDCFIEVNSKGDRFGNCGFSGNEYKKCAXGNALCGKLQCENVQEIPVFGIVPAIIQXPSRGXKCWGVDFQLGSDVPDPGMVNEGXKCGAGKICRNFQCVDASVLNYDCDVQKKCHGHGVCNSNKNCHCENGWAPPNCEXKGYGGSVDSGPXYNEMNXALRDGLLVFFFLIVPLIVCAIFIFIKRDQLWRSYFRKKRSQXYESDGKNQANPSRQPGSVPRHVSPVXPPREVPIYANRFAVPXYAAKQPQQFPSRPPPPQPKVSSQGNLIPARPAPAPPLYSSLX

SEQ ID NO: 1508 - protein, 147 aa, Homo sapiens
  MOD_RES (11)..(11): Selenocysteine
  MOD_RES (37)..(37): Selenocysteine
  MOD_RES (47)..(47): Selenocysteine
  MOD_RES (52)..(52): Selenocysteine
  MOD_RES (96)..(96): Selenocysteine
  MOD_RES (102)..(102): Selenocysteine
  MOD_RES (105)..(105): Selenocysteine
  MOD_RES (123)..(123): Selenocysteine
  MOD_RES (132)..(132): Selenocysteine
MGSGARFPSGXLRVRWLLLLGLVGPVLGAARPGFQQXSHLSSYEIIXPWRLXRERREAPRPYSKQVSYVIQAEGKEHIIHLERNKDLLPEDFVVYXYNKEGXLIXDHPNIQRCGPLCIREQSXPGDRAGQNXQNNWQMSNLAFCVYY

SEQ ID NO: 1509 - protein, 128 aa, Homo sapiens
  MOD_RES (11)..(11): Selenocysteine
  MOD_RES (37)..(37): Selenocysteine
  MOD_RES (47)..(47): Selenocysteine
  MOD_RES (52)..(52): Selenocysteine
  MOD_RES (96)..(96): Selenocysteine
  MOD_RES (102)..(102): Selenocysteine
  MOD_RES (105)..(105): Selenocysteine
  MOD_RES (125)..(125): Selenocysteine
MGSGARFPSGXLRVRWLLLLGLVGPVLGAARPGFQQXSHLSSYEIIXPWRLXRERREAPRPYSKQVSYVIQAEGKEHIIHLERNKDLLPEDFVVYXYNKEGXLIXDHPNIQVMYFSLDPIANFKXIII

SEQ ID NO: 1510 - protein, 171 aa, Homo sapiens
  MOD_RES (22)..(22): Selenocysteine
  MOD_RES (60)..(60): Selenocysteine
  MOD_RES (66)..(66): Selenocysteine
  MOD_RES (90)..(90): Selenocysteine
  MOD_RES (95)..(95): Selenocysteine
  MOD_RES (104)..(104): Selenocysteine
  MOD_RES (107)..(107): Selenocysteine
  MOD_RES (115)..(115): Selenocysteine
  MOD_RES (136)..(137): Selenocysteine
MLVADQSMAEFHGSGLKHYLLXLFSVAARLYKHPSIRNSVSLVVVKILVIHDEQKGPEVXSNAALXLRNFCNWQKQHNPPSDRDAEHYDXAILFXRQDLCGSQXCDXLGMADVGXVCDPSRSCSVIEDDGLQAAFXXAHELGHVFNMPHDDAKQCASLNGVNQDSHMMASM

SEQ ID NO: 1511 - protein, 967 aa, Homo sapiens
  MOD_RES (35)..(35): Selenocysteine
  MOD_RES (73)..(74): Selenocysteine
  MOD_RES (101)..(101): Selenocysteine
  MOD_RES (113)..(113): Selenocysteine
  MOD_RES (118)..(118): Selenocysteine
  MOD_RES (128)..(128): Selenocysteine
  MOD_RES (170)..(170): Selenocysteine
  MOD_RES (197)..(197): Selenocysteine
  MOD_RES (208)..(208): Selenocysteine
  MOD_RES (213)..(213): Selenocysteine
  MOD_RES (220)..(220): Selenocysteine
  MOD_RES (243)..(243): Selenocysteine
  MOD_RES (245)..(245): Selenocysteine
  MOD_RES (262)..(262): Selenocysteine
  MOD_RES (284)..(284): Selenocysteine
  MOD_RES (322)..(322): Selenocysteine
  MOD_RES (328)..(328): Selenocysteine
  MOD_RES (352)..(352): Selenocysteine
  MOD_RES (357)..(357): Selenocysteine
  MOD_RES (366)..(366): Selenocysteine
  MOD_RES (369)..(369): Selenocysteine
  MOD_RES (377)..(377): Selenocysteine
  MOD_RES (398)..(399): Selenocysteine
  MOD_RES (452)..(452): Selenocysteine
  MOD_RES (480)..(480): Selenocysteine
  MOD_RES (491)..(491): Selenocysteine
  MOD_RES (505)..(505): Selenocysteine
  MOD_RES (508)..(508): Selenocysteine
  MOD_RES (512)..(512): Selenocysteine
  MOD_RES (514)..(514): Selenocysteine
  MOD_RES (523)..(523): Selenocysteine
  MOD_RES (532)..(532): Selenocysteine
  MOD_RES (549)..(549): Selenocysteine
  MOD_RES (556)..(556): Selenocysteine
  MOD_RES (574)..(574): Selenocysteine
  MOD_RES (582)..(582): Selenocysteine
  MOD_RES (620)..(620): Selenocysteine
  MOD_RES (681)..(681): Selenocysteine
  MOD_RES (688)..(688): Selenocysteine
  MOD_RES (723)..(723): Selenocysteine
  MOD_RES (732)..(732): Selenocysteine
  MOD_RES (743)..(743): Selenocysteine
  MOD_RES (746)..(746): Selenocysteine
  MOD_RES (749)..(749): Selenocysteine
  MOD_RES (776)..(776): Selenocysteine
  MOD_RES (784)..(784): Selenocysteine
  MOD_RES (787)..(787): Selenocysteine
  MOD_RES (822)..(822): Selenocysteine
  MOD_RES (827)..(827): Selenocysteine
  MOD_RES (839)..(839): Selenocysteine
  MOD_RES (854)..(854): Selenocysteine
  MOD_RES (901)..(901): Selenocysteine
  MOD_RES (923)..(923): Selenocysteine
  MOD_RES (962)..(962): Selenocysteine
MQRAVPEGFGRRKLGSDMGNAERAPGSRSFGPVPXLLLLAAALLAVSDALGRPSEEDEELVVPELERAPGHGXXRLRLHAFDQQLDLELRPDSSFLAPGFXLQNVGRKSGSEXPLPEXDLAHCFYSGXVNGDPSSAAALSLCEGVRGAFYLLGEAYFIQPLPAASERLAXAAPGEKPPAPLQFHLLRRNRQGDVGGXCGVVDDEPRPXGKAEXEDEDEGXEGEDEGAQWSPQDPALQGVGQPXGXGSIRKKRFVSSHRYVEXMLVADQSMAEFHGSGLKHYLLXLFSVAARLYKHPSIRNSVSLVVVKILVIHDEQKGPEVXSNAALXLRNFCNWQKQHNPPSDRDAEHYDXAILFXRQDLCGSQXCDXLGMADVGXVCDPSRSCSVIEDDGLQAAFXXAHELGHVFNMPHDDAKQCASLNGVNQDSHMMASMLSNLDHSQPWSPCSAYMIXSFLDNGHGECLMDKPQNPIQLPGDLPGXSYDANRQCQFXFGEDSKHCPDAASXCSXLWCXGXSGGVLVCQXKHFPWADGXSCGEGKWCINGKCVNKXDRKHFDXPFHGSWGMWGPWGDCSRXCGGGVQYXMRECDNPVPKNGGKYCEGKRVRYRSCNLEDCPDNNGKXFREEQCEAHNEFSKASFGSGPAVEWIPKYAGVSPKDRCKLICQAKGIGYFFVLQPKVVDGXPCSPDSXSVCVQGQCVKAGCDRIIDSKKKFDKCGVCGGNGSXCKKISGSVXSAKPGYHDIIXIPXGAXNIEVKQRNQRGSRNNGSFLAIKAADGXYILNGDYXLSXLEQDIMYKGVVLRYSGSSAALERIRSFSPLKEPLXIQVLXVGNALRPKIKYXYFVKKKKESFNAIPXFSAWVIEEWGECSKSCELGWQRRLVECRDINGQPASECAKEVKPASXRPCADHPCPQWQLGEWSSCSKXCGKGYKKRSLKCLSHDGGVLSHESCDPLKKPKHFIDFCXMAECS

SEQ ID NO: 1512 - protein, 128 aa, Homo sapiens
  MOD_RES (3)..(3): Selenocysteine
  MOD_RES (7)..(7): Selenocysteine
  MOD_RES (24)..(24): Selenocysteine
  MOD_RES (46)..(46): Selenocysteine
  MOD_RES (84)..(84): Selenocysteine
  MOD_RES (90)..(90): Selenocysteine
  MOD_RES (114)..(114): Selenocysteine
  MOD_RES (119)..(119): Selenocysteine
  MOD_RES (128)..(128): Selenocysteine
MVXWEGXGSIRKKRFVSSHRYVEXMLVADQSMAEFHGSGLKHYLLXLFSVAARLYKHPSIRNSVSLVVVKILVIHDEQKGPEVXSNAALXLRNFCNWQKQHNPPSDRDAEHYDXAILFXRQDLCGSQX

SEQ ID NO: 1513 - protein, 200 aa, Homo sapiens
  MOD_RES (1)..(1): Any amino acid
  MOD_RES (27)..(27): Selenocysteine
  MOD_RES (44)..(44): Selenocysteine
  MOD_RES (66)..(66): Selenocysteine
  MOD_RES (104)..(104): Selenocysteine
  MOD_RES (110)..(110): Selenocysteine
  MOD_RES (134)..(134): Selenocysteine
  MOD_RES (139)..(139): Selenocysteine
  MOD_RES (148)..(148): Selenocysteine
  MOD_RES (151)..(151): Selenocysteine
  MOD_RES (159)..(159): Selenocysteine
  MOD_RES (180)..(181): Selenocysteine
XCRSFLLRPSLCAVLILQFFLFHHFGXGSIRKKRFVSSHRYVEXMLVADQSMAEFHGSGLKHYLLXLFSVAARLYKHPSIRNSVSLVVVKILVIHDEQKGPEVXSNAALXLRNFCNWQKQHNPPSDRDAEHYDXAILFXRQDLCGSQXCDXLGMADVGXVCDPSRSCSVIEDDGLQAAFXXAHELGHVFNMPHDDAKQCA

SEQ ID NO: 1514 - protein, 1509 aa, Homo sapiens
  MOD_RES (76)..(76): Selenocysteine
  MOD_RES (107)..(107): Selenocysteine
  MOD_RES (144)..(144): Selenocysteine
  MOD_RES (150)..(150): Selenocysteine
  MOD_RES (154)..(154): Selenocysteine
  MOD_RES (164)..(164): Selenocysteine
  MOD_RES (203)..(203): Selenocysteine
  MOD_RES (207)..(207): Selenocysteine
  MOD_RES (250)..(250): Selenocysteine
  MOD_RES (256)..(256): Selenocysteine
  MOD_RES (273)..(273): Selenocysteine
  MOD_RES (279)..(279): Selenocysteine
  MOD_RES (317)..(317): Selenocysteine
  MOD_RES (346)..(346): Selenocysteine
  MOD_RES (360)..(360): Selenocysteine
  MOD_RES (389)..(389): Selenocysteine
  MOD_RES (428)..(428): Selenocysteine
  MOD_RES (431)..(431): Selenocysteine
  MOD_RES (441)..(441): Selenocysteine
  MOD_RES (487)..(487): Selenocysteine
  MOD_RES (498)..(498): Selenocysteine
  MOD_RES (518)..(518): Selenocysteine
  MOD_RES (533)..(533): Selenocysteine
  MOD_RES (557)..(557): Selenocysteine
  MOD_RES (582)..(582): Selenocysteine
  MOD_RES (602)..(602): Selenocysteine
  MOD_RES (613)..(613): Selenocysteine
  MOD_RES (685)..(685): Selenocysteine
  MOD_RES (701)..(701): Selenocysteine
  MOD_RES (704)..(704): Selenocysteine
  MOD_RES (717)..(717): Selenocysteine
  MOD_RES (726)..(726): Selenocysteine
  MOD_RES (749)..(749): Selenocysteine
  MOD_RES (754)..(754): Selenocysteine
  MOD_RES (757)..(757): Selenocysteine
  MOD_RES (763)..(763): Selenocysteine
  MOD_RES (777)..(777): Selenocysteine
  MOD_RES (783)..(783): Selenocysteine
  MOD_RES (812)..(812): Selenocysteine
  MOD_RES (822)..(822): Selenocysteine
  MOD_RES (828)..(828): Selenocysteine
  MOD_RES (839)..(839): Selenocysteine
  MOD_RES (849)..(849): Selenocysteine
  MOD_RES (864)..(864): Selenocysteine
  MOD_RES (885)..(885): Selenocysteine
  MOD_RES (897)..(897): Selenocysteine
  MOD_RES (924)..(924): Selenocysteine
  MOD_RES (933)..(933): Selenocysteine
  MOD_RES (941)..(941): Selenocysteine
  MOD_RES (948)..(949): Selenocysteine
  MOD_RES (951)..(951): Selenocysteine
  MOD_RES (958)..(958): Selenocysteine
  MOD_RES (960)..(960): Selenocysteine
  MOD_RES (969)..(970): Selenocysteine
  MOD_RES (987)..(987): Selenocysteine
  MOD_RES (999)..(999): Selenocysteine
  MOD_RES (1002)..(1002): Selenocysteine
  MOD_RES (1008)..(1008): Selenocysteine
  MOD_RES (1026)..(1026): Selenocysteine
  MOD_RES (1029)..(1029): Selenocysteine
  MOD_RES (1037)..(1039): Selenocysteine
  MOD_RES (1052)..(1052): Selenocysteine
  MOD_RES (1056)..(1056): Selenocysteine
  MOD_RES (1061)..(1061): Selenocysteine
  MOD_RES (1063)..(1063): Selenocysteine
  MOD_RES (1093)..(1093): Selenocysteine
  MOD_RES (1107)..(1107): Selenocysteine
  MOD_RES (1116)..(1116): Selenocysteine
  MOD_RES (1130)..(1130): Selenocysteine
  MOD_RES (1142)..(1143): Selenocysteine
  MOD_RES (1146)..(1146): Selenocysteine
  MOD_RES (1148)..(1148): Selenocysteine
  MOD_RES (1156)..(1156): Selenocysteine
  MOD_RES (1162)..(1162): Selenocysteine
  MOD_RES (1178)..(1178): Selenocysteine
  MOD_RES (1193)..(1193): Selenocysteine
  MOD_RES (1201)..(1201): Selenocysteine
  MOD_RES (1206)..(1206): Selenocysteine
  MOD_RES (1210)..(1210): Selenocysteine
  MOD_RES (1224)..(1224): Selenocysteine
  MOD_RES (1242)..(1243): Selenocysteine
  MOD_RES (1257)..(1257): Selenocysteine
  MOD_RES (1373)..(1373): Selenocysteine
  MOD_RES (1377)..(1377): Selenocysteine
  MOD_RES (1379)..(1379): Selenocysteine
  MOD_RES (1392)..(1392): Selenocysteine
  MOD_RES (1400)..(1400): Selenocysteine
  MOD_RES (1410)..(1410): Selenocysteine
  MOD_RES (1421)..(1421): Selenocysteine
  MOD_RES (1455)..(1455): Selenocysteine
  MOD_RES (1466)..(1466): Selenocysteine
  MOD_RES (1477)..(1477): Selenocysteine
  MOD_RES (1489)..(1489): Selenocysteine
  MOD_RES (1492)..(1492): Selenocysteine
  MOD_RES (1494)..(1494): Selenocysteine
MPCAQRSWLANLSVVAQLLNFGALCYGRQPQPGPVRFPDRRQEHFIKGLPEYHVVGPVRVDASGHFLSYGLHYPIXSSRRKRDLDGSEDWVYYRISHEEKDLFFNLXVNQGFLSNSYIMEKRYGNLSHVKMMASSAPLCHLSGXVLQQGXRVGXAALSACHGLXGFFQLPHGDFFIEPVKKHPLVEGGYHPHIVYRRQKVPEXKEPXCGLKDSVNISQKQELWREKWERHNLPSRSLSRRSISKERWVEXLVVADXKMIEYHGSENVESYILXIMNMVXGLFHNPSIGNAIHIVVVRLILLEEEEQGLKIVHHAEKXLSSFCKWQKSINPKSDLNPVHHDVAVLLXRKDICAGFNRPCEXLGLSHLSGMCQPHRSCNINEDSGLPLAFXIAHELGHSFGIQHDGKENDCEPVGRHPYIMSRQLQYDPXPLXWSKCSEEYIXRFLDRGWGFCLDDIPKKKGLKSKVIAPGVIYDVHHQCQLQYGPNAXFCQEVENVCQXLWCSVKGFCRSKLDAAADGXQCGEKKWCMAGKCIXVGKKPESIPGGWGRWSPWSHCSRXCGAGVQSAERLCNNPEPKFGGKYCXGERKRYRLCNVHPCRSEAPXFRQMQCSEFDXVPYKNELYHWFPIFNPGYVDIGLIPKGARDIRVMEIEGAGNFLAIRSEDPEKYYLNGGFIIQWNGNYKLAGXVFQYDRKGDLEKLMAXGPXNESVWIQLLFQVXNPGIKYEYXIQKDGLDNDVEQQMYFWQYGHWXECSVXCGXGIRRQXAHCIKKGRGMVKAXFCDPEXQPNGRQKKCHEKACPPRWWAGEWEACSAXCGPHGEKKRXVLCIQXMVSDEQALPPXDCQHLLKPKXLLSCNRDILCPSDWXVGNWSECSVSCGGGVRIRSVXCAKNHDEPCDVXRKPNSRALCGLQQCPSSRRVLKPNKGXISNGKNPPXLKPVPPPXSRPRMLXXPXGPESMSXSXPAISSPSPXXASKEGDLGGKQWQDSSXQPELSSRYLISXGSXSQPILXSQSLSIQPSEENVSSSDXGPXSEGGLVAXXXSGSGLSSSRNPIXWPVXPFYNXLXKGPEMEIHSGSGEEREQPEDKDESNPVIWXKIRVPGNDAPVESXEMPLAPPLXPDLSRESWWPPFSXVMEGLLPSQRPXXSEXGXPRVEGMVXEKPANXLLPLGGDHQPEPSGKXANRNHLKLPNNMNQXKSSEPVLXEEDAXSLIXEGFLLNASNYKQLXNGHGSAHWIVGNWSECSXXCGLGAYWRRVECSXQMDSDCAAIQRPDPAKRCHLRPCAGWKVGNWSKCSRNCSGGFKIREIQCVDSRDHRNLRPFHCQFLAGIPPPLSMSCNPEPCEAWQVEPWSQCSRSCGGGVQERGVFCPGGLCDWXKRPXSXMSCNEHLCCHWAXGNWDLCSXSCGGGFQKRXVQCVPSEGNKXEDQDQCLCDHKPRPPEFKKCNQQACKKSADLLCXKDKLSASFCQXLKAMKKCSVPXVRAECCFSCPQXHIXHXQRQRRQRLLQKSKEL

SEQ ID NO: 1515 - protein, 1594 aa, Homo sapiens
  MOD_RES (76)..(76): Selenocysteine
  MOD_RES (107)..(107): Selenocysteine
  MOD_RES (144)..(144): Selenocysteine
  MOD_RES (150)..(150): Selenocysteine
  MOD_RES (154)..(154): Selenocysteine
  MOD_RES (164)..(164): Selenocysteine
  MOD_RES (203)..(203): Selenocysteine
  MOD_RES (207)..(207): Selenocysteine
  MOD_RES (250)..(250): Selenocysteine
  MOD_RES (256)..(256): Selenocysteine
  MOD_RES (273)..(273): Selenocysteine
  MOD_RES (279)..(279): Selenocysteine
  MOD_RES (317)..(317): Selenocysteine
  MOD_RES (346)..(346): Selenocysteine
  MOD_RES (360)..(360): Selenocysteine
  MOD_RES (389)..(389): Selenocysteine
  MOD_RES (428)..(428): Selenocysteine
  MOD_RES (431)..(431): Selenocysteine
  MOD_RES (441)..(441): Selenocysteine
  MOD_RES (487)..(487): Selenocysteine
  MOD_RES (498)..(498): Selenocysteine
  MOD_RES (518)..(518): Selenocysteine
  MOD_RES (533)..(533): Selenocysteine
  MOD_RES (557)..(557): Selenocysteine
  MOD_RES (582)..(582): Selenocysteine
  MOD_RES (602)..(602): Selenocysteine
  MOD_RES (613)..(613): Selenocysteine
  MOD_RES (656)..(656): Selenocysteine
  MOD_RES (687)..(687): Selenocysteine
  MOD_RES (703)..(703): Selenocysteine
  MOD_RES (770)..(770): Selenocysteine
  MOD_RES (786)..(786): Selenocysteine
  MOD_RES (789)..(789): Selenocysteine
  MOD_RES (802)..(802): Selenocysteine
  MOD_RES (811)..(811): Selenocysteine
  MOD_RES (834)..(834): Selenocysteine
  MOD_RES (839)..(839): Selenocysteine
  MOD_RES (842)..(842): Selenocysteine
  MOD_RES (848)..(848): Selenocysteine
  MOD_RES (862)..(862): Selenocysteine
  MOD_RES (868)..(868): Selenocysteine
  MOD_RES (897)..(897): Selenocysteine
  MOD_RES (907)..(907): Selenocysteine
  MOD_RES (913)..(913): Selenocysteine
  MOD_RES (924)..(924): Selenocysteine
  MOD_RES (934)..(934): Selenocysteine
  MOD_RES (949)..(949): Selenocysteine
  MOD_RES (970)..(970): Selenocysteine
  MOD_RES (982)..(982): Selenocysteine
  MOD_RES (1009)..(1009): Selenocysteine
  MOD_RES (1018)..(1018): Selenocysteine
  MOD_RES (1026)..(1026): Selenocysteine
  MOD_RES (1033)..(1034): Selenocysteine
  MOD_RES (1036)..(1036): Selenocysteine
  MOD_RES (1043)..(1043): Selenocysteine
  MOD_RES (1045)..(1045): Selenocysteine
  MOD_RES (1054)..(1055): Selenocysteine
  MOD_RES (1072)..(1072): Selenocysteine
  MOD_RES (1084)..(1084): Selenocysteine
  MOD_RES (1087)..(1087): Selenocysteine
  MOD_RES (1093)..(1093): Selenocysteine
  MOD_RES (1111)..(1111): Selenocysteine
  MOD_RES (1114)..(1114): Selenocysteine
  MOD_RES (1122)..(1124): Selenocysteine
  MOD_RES (1137)..(1137): Selenocysteine
  MOD_RES (1141)..(1141): Selenocysteine
  MOD_RES (1146)..(1146): Selenocysteine
  MOD_RES (1148)..(1148): Selenocysteine
  MOD_RES (1178)..(1178): Selenocysteine
  MOD_RES (1192)..(1192): Selenocysteine
  MOD_RES (1201)..(1201): Selenocysteine
  MOD_RES (1215)..(1215): Selenocysteine
  MOD_RES (1227)..(1228): Selenocysteine
  MOD_RES (1231)..(1231): Selenocysteine
  MOD_RES (1233)..(1233): Selenocysteine
  MOD_RES (1241)..(1241): Selenocysteine
  MOD_RES (1247)..(1247): Selenocysteine
  MOD_RES (1263)..(1263): Selenocysteine
  MOD_RES (1278)..(1278): Selenocysteine
  MOD_RES (1286)..(1286): Selenocysteine
  MOD_RES (1291)..(1291): Selenocysteine
  MOD_RES (1295)..(1295): Selenocysteine
  MOD_RES (1309)..(1309): Selenocysteine
  MOD_RES (1327)..(1328): Selenocysteine
  MOD_RES (1342)..(1342): Selenocysteine
  MOD_RES (1458)..(1458): Selenocysteine
  MOD_RES (1462)..(1462): Selenocysteine
  MOD_RES (1464)..(1464): Selenocysteine
  MOD_RES (1477)..(1477): Selenocysteine
  MOD_RES (1485)..(1485): Selenocysteine
  MOD_RES (1495)..(1495): Selenocysteine
  MOD_RES (1506)..(1506): Selenocysteine
  MOD_RES (1540)..(1540): Selenocysteine
  MOD_RES (1551)..(1551): Selenocysteine
  MOD_RES (1562)..(1562): Selenocysteine
  MOD_RES (1574)..(1574): Selenocysteine
  MOD_RES (1577)..(1577): Selenocysteine
  MOD_RES (1579)..(1579): Selenocysteine
MPCAQRSWLANLSVVAQLLNFGALCYGRQPQPGPVRFPDRRQEHFIKGLPEYHVVGPVRVDASGHFLSYGLHYPIXSSRRKRDLDGSEDWVYYRISHEEKDLFFNLXVNQGFLSNSYIMEKRYGNLSHVKMMASSAPLCHLSGXVLQQGXRVGXAALSACHGLXGFFQLPHGDFFIEPVKKHPLVEGGYHPHIVYRRQKVPEXKEPXCGLKDSVNISQKQELWREKWERHNLPSRSLSRRSISKERWVEXLVVADXKMIEYHGSENVESYILXIMNMVXGLFHNPSIGNAIHIVVVRLILLEEEEQGLKIVHHAEKXLSSFCKWQKSINPKSDLNPVHHDVAVLLXRKDICAGFNRPCEXLGLSHLSGMCQPHRSCNINEDSGLPLAFXIAHELGHSFGIQHDGKENDCEPVGRHPYIMSRQLQYDPXPLXWSKCSEEYIXRFLDRGWGFCLDDIPKKKGLKSKVIAPGVIYDVHHQCQLQYGPNAXFCQEVENVCQXLWCSVKGFCRSKLDAAADGXQCGEKKWCMAGKCIXVGKKPESIPGGWGRWSPWSHCSRXCGAGVQSAERLCNNPEPKFGGKYCXGERKRYRLCNVHPCRSEAPXFRQMQCSEFDXVPYKNELYHWFPIFNPAHPCELYCRPIDGQFSEKMLDAVIDGXPCFEGGNSRNVCINGICKMVGCDYEIDSNAXEDRCGVCLGDGSSCQXVRKMFKQKEGSGYVDIGLIPKGARDIRVMEIEGAGNFLAIRSEDPEKYYLNGGFIIQWNGNYKLAGXVFQYDRKGDLEKLMAXGPXNESVWIQLLFQVXNPGIKYEYXIQKDGLDNDVEQQMYFWQYGHWXECSVXCGXGIRRQXAHCIKKGRGMVKAXFCDPEXQPNGRQKKCHEKACPPRWWAGEWEACSAXCGPHGEKKRXVLCIQXMVSDEQALPPXDCQHLLKPKXLLSCNRDILCPSDWXVGNWSECSVSCGGGVRIRSVXCAKNHDEPCDVXRKPNSRALCGLQQCPSSRRVLKPNKGXISNGKNPPXLKPVPPPXSRPRMLXXPXGPESMSXSXPAISSPSPXXASKEGDLGGKQWQDSSXQPELSSRYLISXGSXSQPILXSQSLSIQPSEENVSSSDXGPXSEGGLVAXXXSGSGLSSSRNPIXWPVXPFYNXLXKGPEMEIHSGSGEEREQPEDKDESNPVIWXKIRVPGNDAPVESXEMPLAPPLXPDLSRESWWPPFSXVMEGLLPSQRPXXSEXGXPRVEGMVXEKPANXLLPLGGDHQPEPSGKXANRNHLKLPNNMNQXKSSEPVLXEEDAXSLIXEGFLLNASNYKQLXNGHGSAHWIVGNWSECSXXCGLGAYWRRVECSXQMDSDCAAIQRPDPAKRCHLRPCAGWKVGNWSKCSRNCSGGFKIREIQCVDSRDHRNLRPFHCQFLAGIPPPLSMSCNPEPCEAWQVEPWSQCSRSCGGGVQERGVFCPGGLCDWXKRPXSXMSCNEHLCCHWAXGNWDLCSXSCGGGFQKRXVQCVPSEGNKXEDQDQCLCDHKPRPPEFKKCNQQACKKSADLLCXKDKLSASFCQXLKAMKKCSVPXVRAECCFSCPQXHIXHXQRQRRQRLLQKSKEL

SEQ ID NO: 1516 - protein, 232 aa, Homo sapiens
  MOD_RES (76)..(76): Selenocysteine
  MOD_RES (107)..(107): Selenocysteine
  MOD_RES (144)..(144): Selenocysteine
  MOD_RES (150)..(150): Selenocysteine
  MOD_RES (154)..(154): Selenocysteine
  MOD_RES (164)..(164): Selenocysteine
  MOD_RES (203)..(203): Selenocysteine
  MOD_RES (207)..(207): Selenocysteine
  MOD_RES (215)..(215): Selenocysteine
MPCAQRSWLANLSVVAQLLNFGALCYGRQPQPGPVRFPDRRQEHFIKGLPEYHVVGPVRVDASGHFLSYGLHYPIXSSRRKRDLDGSEDWVYYRISHEEKDLFFNLXVNQGFLSNSYIMEKRYGNLSHVKMMASSAPLCHLSGXVLQQGXRVGXAALSACHGLXGFFQLPHGDFFIEPVKKHPLVEGGYHPHIVYRRQKVPEXKEPXCGLKGIVXHMSSWVEESVLFFWLFY

SEQ ID NO: 1517 - protein, 444 aa, Homo sapiens
  MOD_RES (75)..(75): Selenocysteine
  MOD_RES (91)..(91): Selenocysteine
  MOD_RES (110)..(110): Selenocysteine
  MOD_RES (130)..(130): Selenocysteine
  MOD_RES (158)..(158): Selenocysteine
  MOD_RES (187)..(187): Selenocysteine
  MOD_RES (193)..(193): Selenocysteine
  MOD_RES (205)..(205): Selenocysteine
  MOD_RES (258)..(258): Selenocysteine
  MOD_RES (270)..(270): Selenocysteine
  MOD_RES (281)..(281): Selenocysteine
  MOD_RES (306)..(306): Selenocysteine
  MOD_RES (315)..(315): Selenocysteine
  MOD_RES (324)..(324): Selenocysteine
  MOD_RES (327)..(327): Selenocysteine
  MOD_RES (329)..(329): Selenocysteine
  MOD_RES (333)..(333): Selenocysteine
  MOD_RES (345)..(345): Selenocysteine
  MOD_RES (367)..(368): Selenocysteine
  MOD_RES (385)..(385): Selenocysteine
MASDGAAPRAGLAWSPCSRRQLLSLLSAGRARCVWDPPRPQPGSAGHPPDAQPGLYYSANEQCRVAFGPKAVACXFAREHLDMCQALSCHXDPLDQSSCSRLLVPLLDGXECGVEKWCSKGRCRSLVELXPIAAVHGRWSSWGPRSPCSRSCGGGVVXRRRQCNNPRPAFGGRACVGADLQAEMCNXQACEKXQLEFMSQQCARXDGQPLRSSPGGASFYHWGAAVPHSQGDALCRHMCRAIGESFIMKRGDSFLDGXRCMPSGPREDGXLSLCVSGSCRXFGCDGRMDSQQVWDRCQVCGGDNSXCSPRKGSFXAGRAREYVXFLXVXPNLXSVYIANHRPLFXHLAVRIGGRYVVAGKMSISPNXXYPSLLEDGRVEYRVALXEDRLPRLEEIRIWGPLQEDADIQVGGVRAQLMHISWWSRPGLGERDLCARGRWPGGSSD

SEQ ID NO: 1518 - protein, 276 aa, Homo sapiens
  MOD_RES (100)..(100): Selenocysteine
  MOD_RES (106)..(106): Selenocysteine
  MOD_RES (135)..(135): Selenocysteine
  MOD_RES (144)..(144): Selenocysteine
  MOD_RES (148)..(148): Selenocysteine
  MOD_RES (160)..(160): Selenocysteine
  MOD_RES (167)..(167): Selenocysteine
  MOD_RES (179)..(179): Selenocysteine
  MOD_RES (196)..(196): Selenocysteine
  MOD_RES (205)..(205): Selenocysteine
  MOD_RES (211)..(211): Selenocysteine
  MOD_RES (214)..(214): Selenocysteine
  MOD_RES (221)..(221): Selenocysteine
  MOD_RES (238)..(238): Selenocysteine
  MOD_RES (240)..(240): Selenocysteine
  MOD_RES (243)..(243): Selenocysteine
MHQRHPRARCPPLCVAGILACGFLLGCWGPSHFQQSCLQALEPQAVSSYLSPGAPLKGRPPSPGFQRQRQRQRRAAGGILHLELLVAVGPDVFQAHQEDXERYVLXNLNIGAELLRDPSLGAQFRVHLVKMVILXEPEGAPNIXANLXSSLLSVCGWSQXINPEDDXDPGHADLVLYIXRFDLELPDGNRQVRGVXQLGGACSPXWSCLIXEDXGFDLGVXIAHEIGHRICARPSPAXQXRWXKAAAAASSFLSWMGQNVAWRSGAPRVAAAPWWS

SEQ ID NO: 1519 - protein, 344 aa, Homo sapiens
  MOD_RES (100)..(100): Selenocysteine
  MOD_RES (106)..(106): Selenocysteine
  MOD_RES (135)..(135): Selenocysteine
  MOD_RES (144)..(144): Selenocysteine
  MOD_RES (148)..(148): Selenocysteine
  MOD_RES (160)..(160): Selenocysteine
  MOD_RES (167)..(167): Selenocysteine
  MOD_RES (179)..(179): Selenocysteine
  MOD_RES (196)..(196): Selenocysteine
  MOD_RES (205)..(205): Selenocysteine
  MOD_RES (211)..(211): Selenocysteine
  MOD_RES (214)..(214): Selenocysteine
  MOD_RES (221)..(221): Selenocysteine
  MOD_RES (287)..(287): Selenocysteine
  MOD_RES (313)..(313): Selenocysteine
  MOD_RES (317)..(317): Selenocysteine
  MOD_RES (325)..(325): Selenocysteine
  MOD_RES (341)..(341): Selenocysteine
MHQRHPRARCPPLCVAGILACGFLLGCWGPSHFQQSCLQALEPQAVSSYLSPGAPLKGRPPSPGFQRQRQRQRRAAGGILHLELLVAVGPDVFQAHQEDXERYVLXNLNIGAELLRDPSLGAQFRVHLVKMVILXEPEGAPNIXANLXSSLLSVCGWSQXINPEDDXDPGHADLVLYIXRFDLELPDGNRQVRGVXQLGGACSPXWSCLIXEDXGFDLGVXIAHEIGHSFGLEHDGAPGSGCGPSGHVMASDGAAPRAGLAWSPCSRRQLLSLLRPVPPSPLPLLAXHLCAGRSLSLGPSQEPAPGGGRGPRXPVPXHKRPRFQXLPSSCPLLRPASSRCXPRD

SEQ ID NO: 1520 - protein, 1340 aa, Homo sapiens
  MOD_RES (100)..(100): Selenocysteine
  MOD_RES (106)..(106): Selenocysteine
  MOD_RES (135)..(135): Selenocysteine
  MOD_RES (144)..(144): Selenocysteine
  MOD_RES (148)..(148): Selenocysteine
  MOD_RES (160)..(160): Selenocysteine
  MOD_RES (167)..(167): Selenocysteine
  MOD_RES (179)..(179): Selenocysteine
  MOD_RES (196)..(196): Selenocysteine
  MOD_RES (205)..(205): Selenocysteine
  MOD_RES (211)..(211): Selenocysteine
  MOD_RES (214)..(214): Selenocysteine
  MOD_RES (221)..(221): Selenocysteine
  MOD_RES (292)..(292): Selenocysteine
  MOD_RES (308)..(308): Selenocysteine
  MOD_RES (327)..(327): Selenocysteine
  MOD_RES (347)..(347): Selenocysteine
  MOD_RES (375)..(375): Selenocysteine
  MOD_RES (404)..(404): Selenocysteine
  MOD_RES (410)..(410): Selenocysteine
  MOD_RES (422)..(422): Selenocysteine
  MOD_RES (475)..(475): Selenocysteine
  MOD_RES (487)..(487): Selenocysteine
  MOD_RES (498)..(498): Selenocysteine
  MOD_RES (523)..(523): Selenocysteine
  MOD_RES (532)..(532): Selenocysteine
  MOD_RES (541)..(541): Selenocysteine
  MOD_RES (544)..(544): Selenocysteine
  MOD_RES (546)..(546): Selenocysteine
  MOD_RES (550)..(550): Selenocysteine
  MOD_RES (562)..(562): Selenocysteine
  MOD_RES (584)..(585): Selenocysteine
  MOD_RES (602)..(602): Selenocysteine
  MOD_RES (638)..(638): Selenocysteine
  MOD_RES (643)..(643): Selenocysteine
  MOD_RES (645)..(645): Selenocysteine
  MOD_RES (690)..(690): Selenocysteine
  MOD_RES (748)..(748): Selenocysteine
  MOD_RES (767)..(767): Selenocysteine
  MOD_RES (786)..(786): Selenocysteine
  MOD_RES (799)..(799): Selenocysteine
  MOD_RES (812)..(812): Selenocysteine
  MOD_RES (843)..(843): Selenocysteine
  MOD_RES (858)..(858): Selenocysteine
  MOD_RES (867)..(867): Selenocysteine
  MOD_RES (962)..(962): Selenocysteine
  MOD_RES (1001)..(1001): Selenocysteine
  MOD_RES (1042)..(1042): Selenocysteine
  MOD_RES (1049)..(1049): Selenocysteine
  MOD_RES (1067)..(1067): Selenocysteine
  MOD_RES (1090)..(1090): Selenocysteine
  MOD_RES (1113)..(1113): Selenocysteine
  MOD_RES (1115)..(1115): Selenocysteine
  MOD_RES (1139)..(1139): Selenocysteine
  MOD_RES (1162)..(1162): Selenocysteine
  MOD_RES (1174)..(1174): Selenocysteine
  MOD_RES (1179)..(1179): Selenocysteine
  MOD_RES (1181)..(1181): Selenocysteine
  MOD_RES (1207)..(1207): Selenocysteine
  MOD_RES (1232)..(1232): Selenocysteine
  MOD_RES (1257)..(1257): Selenocysteine
  MOD_RES (1263)..(1263): Selenocysteine
  MOD_RES (1276)..(1276): Selenocysteine
  MOD_RES (1281)..(1282): Selenocysteine
  MOD_RES (1320)..(1320): Selenocysteine
  MOD_RES (1340)..(1340): Selenocysteine
MHQRHPRARCPPLCVAGILACGFLLGCWGPSHFQQSCLQALEPQAVSSYLSPGAPLKGRPPSPGFQRQRQRQRRAAGGILHLELLVAVGPDVFQAHQEDXERYVLXNLNIGAELLRDPSLGAQFRVHLVKMVILXEPEGAPNIXANLXSSLLSVCGWSQXINPEDDXDPGHADLVLYIXRFDLELPDGNRQVRGVXQLGGACSPXWSCLIXEDXGFDLGVXIAHEIGHSFGLEHDGAPGSGCGPSGHVMASDGAAPRAGLAWSPCSRRQLLSLLSANEQCRVAFGPKAVACXFAREHLDMCQALSCHXDPLDQSSCSRLLVPLLDGXECGVEKWCSKGRCRSLVELXPIAAVHGRWSSWGPRSPCSRSCGGGVVXRRRQCNNPRPAFGGRACVGADLQAEMCNXQACEKXQLEFMSQQCARXDGQPLRSSPGGASFYHWGAAVPHSQGDALCRHMCRAIGESFIMKRGDSFLDGXRCMPSGPREDGXLSLCVSGSCRXFGCDGRMDSQQVWDRCQVCGGDNSXCSPRKGSFXAGRAREYVXFLXVXPNLXSVYIANHRPLFXHLAVRIGGRYVVAGKMSISPNXXYPSLLEDGRVEYRVALXEDRLPRLEEIRIWGPLQEDADIQVYRRYGEEYGNLXRPDIXFXYFQPKPRQAWVWAAVRGPCSVSCGAGLRWVNYSCLDQARKELVEXVQCQGSQQPPAWPEACVLEPCPPYWAVGDFGPCSASCGGGLRERPVRCVEAQGSLLKXLPPARCRAGAQQPAVALEXCNPQPCPARWEVSEPSSCXSAGGAGLALENEXCVPGADGLEAPVXEGPGSVDEKLPAPEPCVGMSCPPGWGHLDAXSAGEKAPSPWGSIRXGAQAAHVWXPAAGSCSVSCGRGLMELRFLCMDSALRVPVQEELCGLASKPGSRREVCQAVPCPARWQYKLAACSVSCGRGVVRRILYCARAHGEDDGEEILLDXQCQGLPRPEPQEACSLEPCPPRWKVMSLGPCSASCGLGXARRSVACVQLDQGQDVEVDEAACAALVRPEASVPCLIADCXYRWHVGXWMECSVSCGDGIQRRRDXCLGPQAQAPVPADFCQHLPKPVXVRGCWAGPCVGQGACGRQHLEPXGXIDMRGPGQADCAVAIGRPLGEVVXLRVLESSLNCSAGDMLLLWGRLXWRKMCRKLLDMXFSSKXNXLVVRQRCGRPGGGVLLRYGSQLAPEXFYRECDMQLFGPWGEIVSPSLSPAXSNAGGCRLFINVAPHARIAIHALAXNMGAGXEGANASYILIRDXHSLRXXAFHGQQVLYWESESSQAEMEFSEGFLKAQASLRGQYWXLQSWVPEMQDPQSWKGKEGX

SEQ ID NO: 1521 - protein, 1371 aa, Homo sapiens
  MOD_RES (100)..(100): Selenocysteine
  MOD_RES (106)..(106): Selenocysteine
  MOD_RES (135)..(135): Selenocysteine
  MOD_RES (144)..(144): Selenocysteine
  MOD_RES (148)..(148): Selenocysteine
  MOD_RES (160)..(160): Selenocysteine
  MOD_RES (167)..(167): Selenocysteine
  MOD_RES (179)..(179): Selenocysteine
  MOD_RES (196)..(196): Selenocysteine
  MOD_RES (205)..(205): Selenocysteine
  MOD_RES (211)..(211): Selenocysteine
  MOD_RES (214)..(214): Selenocysteine
  MOD_RES (221)..(221): Selenocysteine
  MOD_RES (323)..(323): Selenocysteine
  MOD_RES (339)..(339): Selenocysteine
  MOD_RES (358)..(358): Selenocysteine
  MOD_RES (378)..(378): Selenocysteine
  MOD_RES (406)..(406): Selenocysteine
  MOD_RES (435)..(435): Selenocysteine
  MOD_RES (441)..(441): Selenocysteine
  MOD_RES (453)..(453): Selenocysteine
  MOD_RES (506)..(506): Selenocysteine
  MOD_RES (518)..(518): Selenocysteine
  MOD_RES (529)..(529): Selenocysteine
  MOD_RES (554)..(554): Selenocysteine
  MOD_RES (563)..(563): Selenocysteine
  MOD_RES (572)..(572): Selenocysteine
  MOD_RES (575)..(575): Selenocysteine
  MOD_RES (577)..(577): Selenocysteine
  MOD_RES (581)..(581): Selenocysteine
  MOD_RES (593)..(593): Selenocysteine
  MOD_RES (615)..(616): Selenocysteine
  MOD_RES (633)..(633): Selenocysteine
  MOD_RES (669)..(669): Selenocysteine
  MOD_RES (674)..(674): Selenocysteine
  MOD_RES (676)..(676): Selenocysteine
  MOD_RES (721)..(721): Selenocysteine
  MOD_RES (779)..(779): Selenocysteine
  MOD_RES (798)..(798): Selenocysteine
  MOD_RES (817)..(817): Selenocysteine
  MOD_RES (830)..(830): Selenocysteine
  MOD_RES (843)..(843): Selenocysteine
  MOD_RES (874)..(874): Selenocysteine
  MOD_RES (889)..(889): Selenocysteine
  MOD_RES (898)..(898): Selenocysteine
  MOD_RES (993)..(993): Selenocysteine
  MOD_RES (1032)..(1032): Selenocysteine
  MOD_RES (1073)..(1073): Selenocysteine
  MOD_RES (1080)..(1080): Selenocysteine
  MOD_RES (1098)..(1098): Selenocysteine
  MOD_RES (1121)..(1121): Selenocysteine
  MOD_RES (1144)..(1144): Selenocysteine
  MOD_RES (1146)..(1146): Selenocysteine
  MOD_RES (1170)..(1170): Selenocysteine
  MOD_RES (1193)..(1193): Selenocysteine
  MOD_RES (1205)..(1205): Selenocysteine
  MOD_RES (1210)..(1210): Selenocysteine
  MOD_RES (1212)..(1212): Selenocysteine
  MOD_RES (1238)..(1238): Selenocysteine
  MOD_RES (1263)..(1263): Selenocysteine
  MOD_RES (1288)..(1288): Selenocysteine
  MOD_RES (1294)..(1294): Selenocysteine
  MOD_RES (1307)..(1307): Selenocysteine
  MOD_RES (1312)..(1313): Selenocysteine
  MOD_RES (1351)..(1351): Selenocysteine
  MOD_RES (1371)..(1371): Selenocysteine
MHQRHPRARCPPLCVAGILACGFLLGCWGPSHFQQSCLQALEPQAVSSYLSPGAPLKGRPPSPGFQRQRQRQRRAAGGILHLELLVAVGPDVFQAHQEDXERYVLXNLNIGAELLRDPSLGAQFRVHLVKMVILXEPEGAPNIXANLXSSLLSVCGWSQXINPEDDXDPGHADLVLYIXRFDLELPDGNRQVRGVXQLGGACSPXWSCLIXEDXGFDLGVXIAHEIGHSFGLEHDGAPGSGCGPSGHVMASDGAAPRAGLAWSPCSRRQLLSLLSAGRARCVWDPPRPQPGSAGHPPDAQPGLYYSANEQCRVAFGPKAVACXFAREHLDMCQALSCHXDPLDQSSCSRLLVPLLDGXECGVEKWCSKGRCRSLVELXPIAAVHGRWSSWGPRSPCSRSCGGGVVXRRRQCNNPRPAFGGRACVGADLQAEMCNXQACEKXQLEFMSQQCARXDGQPLRSSPGGASFYHWGAAVPHSQGDALCRHMCRAIGESFIMKRGDSFLDGXRCMPSGPREDGXLSLCVSGSCRXFGCDGRMDSQQVWDRCQVCGGDNSXCSPRKGSFXAGRAREYVXFLXVXPNLXSVYIANHRPLFXHLAVRIGGRYVVAGKMSISPNXXYPSLLEDGRVEYRVALXEDRLPRLEEIRIWGPLQEDADIQVYRRYGEEYGNLXRPDIXFXYFQPKPRQAWVWAAVRGPCSVSCGAGLRWVNYSCLDQARKELVEXVQCQGSQQPPAWPEACVLEPCPPYWAVGDFGPCSASCGGGLRERPVRCVEAQGSLLKXLPPARCRAGAQQPAVALEXCNPQPCPARWEVSEPSSCXSAGGAGLALENEXCVPGADGLEAPVXEGPGSVDEKLPAPEPCVGMSCPPGWGHLDAXSAGEKAPSPWGSIRXGAQAAHVWXPAAGSCSVSCGRGLMELRFLCMDSALRVPVQEELCGLASKPGSRREVCQAVPCPARWQYKLAACSVSCGRGVVRRILYCARAHGEDDGEEILLDXQCQGLPRPEPQEACSLEPCPPRWKVMSLGPCSASCGLGXARRSVACVQLDQGQDVEVDEAACAALVRPEASVPCLIADCXYRWHVGXWMECSVSCGDGIQRRRDXCLGPQAQAPVPADFCQHLPKPVXVRGCWAGPCVGQGACGRQHLEPXGXIDMRGPGQADCAVAIGRPLGEVVXLRVLESSLNCSAGDMLLLWGRLXWRKMCRKLLDMXFSSKXNXLVVRQRCGRPGGGVLLRYGSQLAPEXFYRECDMQLFGPWGEIVSPSLSPAXSNAGGCRLFINVAPHARIAIHALAXNMGAGXEGANASYILIRDXHSLRXXAFHGQQVLYWESESSQAEMEFSEGFLKAQASLRGQYWXLQSWVPEMQDPQSWKGKEGX

SEQ ID NO: 1522 - protein, 1427 aa, Homo sapiens
  MOD_RES (100)..(100): Selenocysteine
  MOD_RES (106)..(106): Selenocysteine
  MOD_RES (135)..(135): Selenocysteine
  MOD_RES (144)..(144): Selenocysteine
  MOD_RES (148)..(148): Selenocysteine
  MOD_RES (160)..(160): Selenocysteine
  MOD_RES (167)..(167): Selenocysteine
  MOD_RES (179)..(179): Selenocysteine
  MOD_RES (196)..(196): Selenocysteine
  MOD_RES (205)..(205): Selenocysteine
  MOD_RES (211)..(211): Selenocysteine
  MOD_RES (214)..(214): Selenocysteine
  MOD_RES (221)..(221): Selenocysteine
  MOD_RES (323)..(323): Selenocysteine
  MOD_RES (339)..(339): Selenocysteine
  MOD_RES (358)..(358): Selenocysteine
  MOD_RES (378)..(378): Selenocysteine
  MOD_RES (406)..(406): Selenocysteine
  MOD_RES (435)..(435): Selenocysteine
  MOD_RES (441)..(441): Selenocysteine
  MOD_RES (453)..(453): Selenocysteine
  MOD_RES (506)..(506): Selenocysteine
  MOD_RES (518)..(518): Selenocysteine
  MOD_RES (529)..(529): Selenocysteine
  MOD_RES (554)..(554): Selenocysteine
  MOD_RES (563)..(563): Selenocysteine
  MOD_RES (572)..(572): Selenocysteine
  MOD_RES (575)..(575): Selenocysteine
  MOD_RES (577)..(577): Selenocysteine
  MOD_RES (581)..(581): Selenocysteine
  MOD_RES (593)..(593): Selenocysteine
  MOD_RES (615)..(616): Selenocysteine
  MOD_RES (633)..(633): Selenocysteine
  MOD_RES (669)..(669): Selenocysteine
  MOD_RES (674)..(674): Selenocysteine
  MOD_RES (676)..(676): Selenocysteine
  MOD_RES (721)..(721): Selenocysteine
  MOD_RES (779)..(779): Selenocysteine
  MOD_RES (798)..(798): Selenocysteine
  MOD_RES (817)..(817): Selenocysteine
  MOD_RES (830)..(830): Selenocysteine
  MOD_RES (843)..(843): Selenocysteine
  MOD_RES (874)..(874): Selenocysteine
  MOD_RES (889)..(889): Selenocysteine
  MOD_RES (898)..(898): Selenocysteine
  MOD_RES (993)..(993): Selenocysteine
  MOD_RES (1032)..(1032): Selenocysteine
  MOD_RES (1073)..(1073): Selenocysteine
  MOD_RES (1080)..(1080): Selenocysteine
  MOD_RES (1098)..(1098): Selenocysteine
  MOD_RES (1121)..(1121): Selenocysteine
  MOD_RES (1135)..(1135): Selenocysteine
  MOD_RES (1150)..(1151): Selenocysteine
  MOD_RES (1153)..(1153): Selenocysteine
  MOD_RES (1200)..(1200): Selenocysteine
  MOD_RES (1202)..(1202): Selenocysteine
  MOD_RES (1226)..(1226): Selenocysteine
  MOD_RES (1249)..(1249): Selenocysteine
  MOD_RES (1261)..(1261): Selenocysteine
  MOD_RES (1266)..(1266): Selenocysteine
  MOD_RES (1268)..(1268): Selenocysteine
  MOD_RES (1294)..(1294): Selenocysteine
  MOD_RES (1319)..(1319): Selenocysteine
  MOD_RES (1344)..(1344): Selenocysteine
  MOD_RES (1350)..(1350): Selenocysteine
  MOD_RES (1363)..(1363): Selenocysteine
  MOD_RES (1368)..(1369): Selenocysteine
  MOD_RES (1407)..(1407): Selenocysteine
  MOD_RES (1427)..(1427): Selenocysteine
MHQRHPRARCPPLCVAGILACGFLLGCWGPSHFQQSCLQALEPQAVSSYLSPGAPLKGRPPSPGFQRQRQRQRRAAGGILHLELLVAVGPDVFQAHQEDXERYVLXNLNIGAELLRDPSLGAQFRVHLVKMVILXEPEGAPNIXANLXSSLLSVCGWSQXINPEDDXDPGHADLVLYIXRFDLELPDGNRQVRGVXQLGGACSPXWSCLIXEDXGFDLGVXIAHEIGHSFGLEHDGAPGSGCGPSGHVMASDGAAPRAGLAWSPCSRRQLLSLLSAGRARCVWDPPRPQPGSAGHPPDAQPGLYYSANEQCRVAFGPKAVACXFAREHLDMCQALSCHXDPLDQSSCSRLLVPLLDGXECGVEKWCSKGRCRSLVELXPIAAVHGRWSSWGPRSPCSRSCGGGVVXRRRQCNNPRPAFGGRACVGADLQAEMCNXQACEKXQLEFMSQQCARXDGQPLRSSPGGASFYHWGAAVPHSQGDALCRHMCRAIGESFIMKRGDSFLDGXRCMPSGPREDGXLSLCVSGSCRXFGCDGRMDSQQVWDRCQVCGGDNSXCSPRKGSFXAGRAREYVXFLXVXPNLXSVYIANHRPLFXHLAVRIGGRYVVAGKMSISPNXXYPSLLEDGRVEYRVALXEDRLPRLEEIRIWGPLQEDADIQVYRRYGEEYGNLXRPDIXFXYFQPKPRQAWVWAAVRGPCSVSCGAGLRWVNYSCLDQARKELVEXVQCQGSQQPPAWPEACVLEPCPPYWAVGDFGPCSASCGGGLRERPVRCVEAQGSLLKXLPPARCRAGAQQPAVALEXCNPQPCPARWEVSEPSSCXSAGGAGLALENEXCVPGADGLEAPVXEGPGSVDEKLPAPEPCVGMSCPPGWGHLDAXSAGEKAPSPWGSIRXGAQAAHVWXPAAGSCSVSCGRGLMELRFLCMDSALRVPVQEELCGLASKPGSRREVCQAVPCPARWQYKLAACSVSCGRGVVRRILYCARAHGEDDGEEILLDXQCQGLPRPEPQEACSLEPCPPRWKVMSLGPCSASCGLGXARRSVACVQLDQGQDVEVDEAACAALVRPEASVPCLIADCXYRWHVGXWMECSVSCGDGIQRRRDXCLGPQAQAPVPADFCQHLPKPVXVRGCWAGPCVGQGXPSLVPHEEAAAPGRXXAXPAGASLEWSQARGLLFSPAPQPRRLLPGPQENSVQSSACGRQHLEPXGXIDMRGPGQADCAVAIGRPLGEVVXLRVLESSLNCSAGDMLLLWGRLXWRKMCRKLLDMXFSSKXNXLVVRQRCGRPGGGVLLRYGSQLAPEXFYRECDMQLFGPWGEIVSPSLSPAXSNAGGCRLFINVAPHARIAIHALAXNMGAGXEGANASYILIRDXHSLRXXAFHGQQVLYWESESSQAEMEFSEGFLKAQASLRGQYWXLQSWVPEMQDPQSWKGKEGX

SEQ ID NO: 1523 - protein, 223 aa, Homo sapiens
  MOD_RES (22)..(22): Selenocysteine
  MOD_RES (45)..(45): Selenocysteine
  MOD_RES (57)..(57): Selenocysteine
  MOD_RES (62)..(62): Selenocysteine
  MOD_RES (64)..(64): Selenocysteine
  MOD_RES (90)..(90): Selenocysteine
  MOD_RES (115)..(115): Selenocysteine
  MOD_RES (140)..(140): Selenocysteine
  MOD_RES (146)..(146): Selenocysteine
  MOD_RES (159)..(159): Selenocysteine
  MOD_RES (164)..(165): Selenocysteine
  MOD_RES (203)..(203): Selenocysteine
  MOD_RES (223)..(223): Selenocysteine
MRGPGQADCAVAIGRPLGEVVXLRVLESSLNCSAGDMLLLWGRLXWRKMCRKLLDMXFSSKXNXLVVRQRCGRPGGGVLLRYGSQLAPEXFYRECDMQLFGPWGEIVSPSLSPAXSNAGGCRLFINVAPHARIAIHALAXNMGAGXEGANASYILIRDXHSLRXXAFHGQQVLYWESESSQAEMEFSEGFLKAQASLRGQYWXLQSWVPEMQDPQSWKGKEGX

SEQ ID NO: 1524 - protein, 274 aa, Homo sapiens
  MOD_RES (65)..(65): Selenocysteine
  MOD_RES (135)..(135): Selenocysteine
  MOD_RES (161)..(161): Selenocysteine
  MOD_RES (171)..(171): Selenocysteine
  MOD_RES (206)..(206): Selenocysteine
  MOD_RES (241)..(241): Selenocysteine
MECALLLACAFPAAGSGPPRGLAGLGRVAKALQLCCLCCASVAAALASDSSSGASGLNDDYVFVXPVEVDSAGSYISHDILHNGRKKRSAQNARSSLHYRFSAFGQELHLELKPSAILSSHFIVQVLGKDGASEXQKPEVQQCFYQGFIRNDSSSSVAVSXCAGLSGLIRXRKNEFLISPLPQLLAQEHNYSSPAGHHPHVLYKRXAEEKIQRYRGYPGSGRNYPGYSPSHIPHASQSREXEYHHRRLQKQHFCGRRKKCICSQASHRGHLSKV

SEQ ID NO: 1525 - protein, 1221 aa, Homo sapiens
  MOD_RES (65)..(65): Selenocysteine
  MOD_RES (135)..(135): Selenocysteine
  MOD_RES (161)..(161): Selenocysteine
  MOD_RES (171)..(171): Selenocysteine
  MOD_RES (206)..(206): Selenocysteine
  MOD_RES (241)..(241): Selenocysteine
  MOD_RES (266)..(266): Selenocysteine
  MOD_RES (269)..(269): Selenocysteine
  MOD_RES (297)..(297): Selenocysteine
  MOD_RES (315)..(316): Selenocysteine
  MOD_RES (320)..(320): Selenocysteine
  MOD_RES (333)..(333): Selenocysteine
  MOD_RES (390)..(390): Selenocysteine
  MOD_RES (404)..(404): Selenocysteine
  MOD_RES (421)..(421): Selenocysteine
  MOD_RES (426)..(426): Selenocysteine
  MOD_RES (433)..(433): Selenocysteine
  MOD_RES (464)..(464): Selenocysteine
  MOD_RES (466)..(466): Selenocysteine
  MOD_RES (488)..(488): Selenocysteine
  MOD_RES (519)..(519): Selenocysteine
  MOD_RES (555)..(555): Selenocysteine
  MOD_RES (564)..(564): Selenocysteine
  MOD_RES (604)..(604): Selenocysteine
  MOD_RES (674)..(674): Selenocysteine
  MOD_RES (705)..(705): Selenocysteine
  MOD_RES (747)..(747): Selenocysteine
  MOD_RES (801)..(801): Selenocysteine
  MOD_RES (817)..(818): Selenocysteine
  MOD_RES (837)..(837): Selenocysteine
  MOD_RES (840)..(840): Selenocysteine
  MOD_RES (867)..(867): Selenocysteine
  MOD_RES (871)..(871): Selenocysteine
  MOD_RES (877)..(877): Selenocysteine
  MOD_RES (906)..(906): Selenocysteine
  MOD_RES (917)..(917): Selenocysteine
  MOD_RES (921)..(921): Selenocysteine
  MOD_RES (942)..(942): Selenocysteine
  MOD_RES (979)..(979): Selenocysteine
  MOD_RES (981)..(981): Selenocysteine
  MOD_RES (1006)..(1006): Selenocysteine
  MOD_RES (1025)..(1025): Selenocysteine
  MOD_RES (1032)..(1032): Selenocysteine
  MOD_RES (1067)..(1067): Selenocysteine
  MOD_RES (1090)..(1090): Selenocysteine
  MOD_RES (1109)..(1109): Selenocysteine
  MOD_RES (1136)..(1136): Selenocysteine
  MOD_RES (1138)..(1138): Selenocysteine
  MOD_RES (1145)..(1145): Selenocysteine
  MOD_RES (1174)..(1174): Selenocysteine
  MOD_RES (1218)..(1218): Selenocysteine
MECALLLACAFPAAGSGPPRGLAGLGRVAKALQLCCLCCASVAAALASDSSSGASGLNDDYVFVXPVEVDSAGSYISHDILHNGRKKRSAQNARSSLHYRFSAFGQELHLELKPSAILSSHFIVQVLGKDGASEXQKPEVQQCFYQGFIRNDSSSSVAVSXCAGLSGLIRXRKNEFLISPLPQLLAQEHNYSSPAGHHPHVLYKRXAEEKIQRYRGYPGSGRNYPGYSPSHIPHASQSREXEYHHRRLQKQHFCGRRKKYAPKPPXEDXYLRFDEYGSSGRPRRSAGKSQKGLNVEXLVVADKKMVEKHGKGNVXXYILXVMNMVSGLFKDGXIGSDINVVVVSLILLEQEPGGLLINHHADQSLNSFCQWQSALIGKNGKRHDHAILLXGFDICSWKNEPCDXLGFAPISGMCSKYRSCXINEDXGLGLAFXIAHESGHNFGMIHDGEGNPCRKAEGNIMSPXLXGNNGVFSWSSCSRQYLKKFLSXPQAGCLVDEPKQAGQYKYPDKLPGQIYDADXQCKWQFGAKAKLCSLGFVKDICKSLWCHRVGHRCEXKFMPAAEGXVCGLSMWCRQGQCVKFGELGPRPIHGQWSAWSKWSECSRXCGGGVKFQERHCNNPKPQYGGLFCPGSSRIYQLCNINPCNENSLDFRAQQCAEYNSKPFRGWFYQWKPYXKVEEEDRCKLYCKAENFEFFFAMSGKVKDGXPCSPNKNDVCIDGVCELVGCDHELGSKAVSDACGVCKGDNSXCKFYKGLYLNQHKANEYYPVVLIPAGARSIEIQELQVSSSYLAVRSLSQKYYLXGGWSIDWPGEFPFAGXXFEYQRSFNRPERLYAPGPXNEXLVFEILMQGKNPGIAWKYALPKVMNGXPPAXKRPAYXWSIVQSECSVSCGGGYINVKAICLRDQNXQVNSSFCSAKXKPVXEPKICNAFSCPAYWMPGEWSXCSKACAGGQQSRKIQCVQKKPFQKEEAVLHSLCPVSXPXQVQACNSHACPPQWSLGPWSQCSKXCGRGVRKRELLCKGSAAEXLPESQCXSLPRPELQEGCVLGRCPKNSRLQWVASSWSECSAXCGLGVRKREMKCSEKGFQGKLIXFPERRCRNIKKPNLDLEEXCNRRACPAHPVYNMVAGWYSLPWQQCXVXCGGGVQXRSVHCVQQGRPSSSCLLHQKPPVLRACNXNFCPAPEKREDPSCVDFFNWCHLVPQHGVCNHKFYGKQCCKSCXRKI

SEQ ID NO: 1526 - protein, 62 aa, Homo sapiens
  MOD_RES (1)..(1): Any amino acid
  MOD_RES (23)..(23): Selenocysteine
XQGRPSSSCLLHQKPPVLRACNXNFCPAPEKRDSAGSQLPCCDGPQAVHEEGLRFPDNHWAM

SEQ ID NO: 1527 - protein, 186 aa, Homo sapiens
  MOD_RES (1)..(1): Any amino acid
  MOD_RES (68)..(68): Selenocysteine
  MOD_RES (94)..(94): Selenocysteine
  MOD_RES (121)..(121): Selenocysteine
  MOD_RES (156)..(156): Selenocysteine
XVDSAGSYISHDILHNGRKKRSAQNARSSLHYRFSAFGQELHLELKPSAILSSHFIVQVLGKDGASEXQKPEVQQCFYQGFIRNDSSSSVAVSXCAGLLLAQEHNYSSPAGHHPHVLYKRXAEEKIQRYRGYPGSGRNYPGYSPSHIPHASQSREXEYHHRRLQKQHFCGRRKKCICSQASHRGHL

SEQ ID NO: 1528 - protein, 1504 aa, Homo sapiens
  MOD_RES (8)..(8): Selenocysteine
  MOD_RES (19)..(19): Selenocysteine
  MOD_RES (36)..(36): Selenocysteine
  MOD_RES (38)..(38): Selenocysteine
  MOD_RES (78)..(78): Selenocysteine
  MOD_RES (83)..(83): Selenocysteine
  MOD_RES (94)..(94): Selenocysteine
  MOD_RES (105)..(105): Selenocysteine
  MOD_RES (111)..(111): Selenocysteine
  MOD_RES (152)..(152): Selenocysteine
  MOD_RES (154)..(154): Selenocysteine
  MOD_RES (197)..(197): Selenocysteine
  MOD_RES (211)..(211): Selenocysteine
  MOD_RES (217)..(217): Selenocysteine
  MOD_RES (236)..(236): Selenocysteine
  MOD_RES (266)..(266): Selenocysteine
  MOD_RES (285)..(285): Selenocysteine
  MOD_RES (292)..(292): Selenocysteine
  MOD_RES (328)..(329): Selenocysteine
  MOD_RES (339)..(339): Selenocysteine
  MOD_RES (353)..(353): Selenocysteine
  MOD_RES (358)..(358): Selenocysteine
  MOD_RES (379)..(379): Selenocysteine
  MOD_RES (400)..(400): Selenocysteine
  MOD_RES (408)..(408): Selenocysteine
  MOD_RES (425)..(425): Selenocysteine
  MOD_RES (452)..(452): Selenocysteine
  MOD_RES (457)..(457): Selenocysteine
  MOD_RES (512)..(512): Selenocysteine
  MOD_RES (514)..(514): Selenocysteine
  MOD_RES (523)..(523): Selenocysteine
  MOD_RES (532)..(532): Selenocysteine
  MOD_RES (550)..(550): Selenocysteine
  MOD_RES (552)..(552): Selenocysteine
  MOD_RES (571)..(571): Selenocysteine
  MOD_RES (580)..(580): Selenocysteine
  MOD_RES (607)..(607): Selenocysteine
  MOD_RES (614)..(614): Selenocysteine
  MOD_RES (650)..(650): Selenocysteine
  MOD_RES (663)..(663): Selenocysteine
  MOD_RES (677)..(677): Selenocysteine
  MOD_RES (681)..(681): Selenocysteine
  MOD_RES (683)..(683): Selenocysteine
  MOD_RES (722)..(722): Selenocysteine
  MOD_RES (724)..(724): Selenocysteine
  MOD_RES (745)..(745): Selenocysteine
  MOD_RES (782)..(782): Selenocysteine
  MOD_RES (792)..(792): Selenocysteine
  MOD_RES (794)..(794): Selenocysteine
  MOD_RES (811)..(811): Selenocysteine
  MOD_RES (849)..(849): Selenocysteine
  MOD_RES (860)..(860): Selenocysteine
  MOD_RES (872)..(872): Selenocysteine
  MOD_RES (897)..(897): Selenocysteine
  MOD_RES (902)..(902): Selenocysteine
  MOD_RES (926)..(926): Selenocysteine
  MOD_RES (941)..(941): Selenocysteine
  MOD_RES (957)..(957): Selenocysteine
  MOD_RES (968)..(968): Selenocysteine
  MOD_RES (1013)..(1013): Selenocysteine
  MOD_RES (1036)..(1036): Selenocysteine
  MOD_RES (1041)..(1041): Selenocysteine
  MOD_RES (1064)..(1064): Selenocysteine
  MOD_RES (1076)..(1076): Selenocysteine
  MOD_RES (1089)..(1091): Selenocysteine
  MOD_RES (1115)..(1115): Selenocysteine
  MOD_RES (1132)..(1132): Selenocysteine
  MOD_RES (1142)..(1142): Selenocysteine
  MOD_RES (1147)..(1147): Selenocysteine
  MOD_RES (1162)..(1162): Selenocysteine
  MOD_RES (1172)..(1172): Selenocysteine
  MOD_RES (1206)..(1206): Selenocysteine
  MOD_RES (1228)..(1229): Selenocysteine
  MOD_RES (1283)..(1283): Selenocysteine
  MOD_RES (1288)..(1288): Selenocysteine
  MOD_RES (1310)..(1310): Selenocysteine
  MOD_RES (1373)..(1373): Selenocysteine
  MOD_RES (1427)..(1427): Selenocysteine
  MOD_RES (1440)..(1440): Selenocysteine
  MOD_RES (1466)..(1466): Selenocysteine
  MOD_RES (1479)..(1479): Selenocysteine
  MOD_RES (1482)..(1482): Selenocysteine
  MOD_RES (1493)..(1493): Selenocysteine
MWVAKWLXGLLYHLSLFIXRSWEVDFHPRQEALVRXLXSYEVVIPERVNEFGEVFPQSHHFSRQKRSSEALEPMPFRXHYRFXAYGQLFQLNLXADASFLAAGYXEVHLGXPERGAWESDAGPSDLRHCFYRGQVNSQEDYKAVVSLCGGLXGXFKGQNGEYFLEPIMKADGNEYEDGHNKPHLIYRQDLNNSFLQXLKYCSVSESQIKEXSLPFHXYSNMNEDLNVMKERVLGHXSKNVPLKDERRHSRKKRLISYPRYIEIMVXADAKVVSAHGSNLQNYILXLMSIVAXIYKDPSIGNLIHIVVVKLVMIHREEEGPVINFDGAXXLKNFCSWQQXQNDLDDVHPSHHDXAVLIXREDICSSKEKCNMLGLSYLGXICDPLQSCFINEEKGLISAFXIAHELGHXLGVQHDDNPRCKEMKVXKYHVMAPALSFHMSPWSWSNCSRKYVXEFLDXGYGECLLDKPDEEIYNLPSELPGSRYDGNKQCELAFGPGSQMCPHINICMHLWCXSXEKLHKGCFXQHVPPADGXDCGPGMHCRHGLCVNKEXEXRPVNGEWGPWEPYSSCSRXCGGGIESAXRRCNRPEPRNGGNYCVGRRMKFRSCNXDSCPKGXQDFREKQCSDFNGKHLDISGIPSNVRWLPRYSGIGXKDRCKLYCQVAGXNYFYLLKDMVEDGXPCGXEXHDICVQGQCMAAGCDHVLNSSAKIDKCGVCGGDNSSCKXIXGVFNSSHYGYNVVVKIPAGAXNVDIRQYSYSGQPDDSYLALSDAEGNFLFNGNFLLSXSKKEINVQGXRXVIEYSGSNNAVERINSXNRQEKELILQVLCVGNLYNPDVHYSFNIPLEERSDMFXWDPYGPWEGCXKMCQGLQRRNIXCIHKSDHSVVSDKECDHLPLPSFVXQSCNXDCELRWHVIGKSECSSQCGQGYRXLDIHCMKYSIHEGQXVQVDDHYCGDQLKPPXQELCHGNCVFXRWHYSEWSQCSRSCGGGERSRESYCMNNFGHRLADNECQELSRVXRENCNEFSCPSWAASEWSECLVXCGKGXKQRQVWCQLNVDHLSDGFCNSSXKPESLSPCELHXCASWQVGPWGPCXXXCGHGYQMRDVKCVNELASAVLEDXECHEASRPSDRQSCVLXPCSFISKLEXALLPXVLIKKMAQWRHGSWXPCSVSCGRGXQARYVSCRDALDRIADESYCAHLPRPAEIWDCFXPCGEWQAGDWSPCSASCGHGKXXRQVLCMNYHQPIDENYCDPEVRPLMEQECSLAACPPAHSHFPSSPVQPSYYLSXNLPLXQKLEDNENQVVHPSVRGNQWRXGPWGSCSSSCSGGLQHRAVVCQDENGQSASYCDAASKPPELQQCGPGPCPQWNYGNWGECSQXCGGGIKSRLVICQFPNGQILEDHNCEIVNKPPSVIQCHMHACPADVSWHQEPWXSEDLKVKLLPQRXIILWELMKNIFCHGKHSHMYLINVVXDHLLYPRHCDPEXIEXYFLSLWSLQFXWGDLKYYKNSL

SEQ ID NO: 1529 - protein, 1910 aa, Homo sapiens
  MOD_RES (8)..(8): Selenocysteine
  MOD_RES (19)..(19): Selenocysteine
  MOD_RES (36)..(36): Selenocysteine
  MOD_RES (38)..(38): Selenocysteine
  MOD_RES (78)..(78): Selenocysteine
  MOD_RES (83)..(83): Selenocysteine
  MOD_RES (94)..(94): Selenocysteine
  MOD_RES (105)..(105): Selenocysteine
  MOD_RES (111)..(111): Selenocysteine
  MOD_RES (152)..(152): Selenocysteine
  MOD_RES (154)..(154): Selenocysteine
  MOD_RES (197)..(197): Selenocysteine
  MOD_RES (211)..(211): Selenocysteine
  MOD_RES (217)..(217): Selenocysteine
  MOD_RES (236)..(236): Selenocysteine
  MOD_RES (266)..(266): Selenocysteine
  MOD_RES (285)..(285): Selenocysteine
  MOD_RES (292)..(292): Selenocysteine
  MOD_RES (328)..(329): Selenocysteine
  MOD_RES (339)..(339): Selenocysteine
  MOD_RES (353)..(353): Selenocysteine
  MOD_RES (358)..(358): Selenocysteine
  MOD_RES (379)..(379): Selenocysteine
  MOD_RES (400)..(400): Selenocysteine
  MOD_RES (408)..(408): Selenocysteine
  MOD_RES (425)..(425): Selenocysteine
  MOD_RES (452)..(452): Selenocysteine
  MOD_RES (457)..(457): Selenocysteine
  MOD_RES (512)..(512): Selenocysteine
  MOD_RES (514)..(514): Selenocysteine
  MOD_RES (523)..(523): Selenocysteine
  MOD_RES (532)..(532): Selenocysteine
  MOD_RES (550)..(550): Selenocysteine
  MOD_RES (552)..(552): Selenocysteine
  MOD_RES (571)..(571): Selenocysteine
  MOD_RES (580)..(580): Selenocysteine
  MOD_RES (607)..(607): Selenocysteine
  MOD_RES (614)..(614): Selenocysteine
  MOD_RES (650)..(650): Selenocysteine
  MOD_RES (663)..(663): Selenocysteine
  MOD_RES (677)..(677): Selenocysteine
  MOD_RES (681)..(681): Selenocysteine
  MOD_RES (683)..(683): Selenocysteine
  MOD_RES (722)..(722): Selenocysteine
  MOD_RES (724)..(724): Selenocysteine
  MOD_RES (745)..(745): Selenocysteine
  MOD_RES (782)..(782): Selenocysteine
  MOD_RES (792)..(792): Selenocysteine
  MOD_RES (794)..(794): Selenocysteine
  MOD_RES (811)..(811): Selenocysteine
  MOD_RES (849)..(849): Selenocysteine
  MOD_RES (860)..(860): Selenocysteine
  MOD_RES (872)..(872): Selenocysteine
  MOD_RES (897)..(897): Selenocysteine
  MOD_RES (902)..(902): Selenocysteine
  MOD_RES (926)..(926): Selenocysteine
  MOD_RES (941)..(941): Selenocysteine
  MOD_RES (957)..(957): Selenocysteine
  MOD_RES (968)..(968): Selenocysteine
  MOD_RES (1013)..(1013): Selenocysteine
  MOD_RES (1036)..(1036): Selenocysteine
  MOD_RES (1041)..(1041): Selenocysteine
  MOD_RES (1064)..(1064): Selenocysteine
  MOD_RES (1076)..(1076): Selenocysteine
  MOD_RES (1089)..(1091): Selenocysteine
  MOD_RES (1115)..(1115): Selenocysteine
  MOD_RES (1132)..(1132): Selenocysteine
  MOD_RES (1142)..(1142): Selenocysteine
  MOD_RES (1147)..(1147): Selenocysteine
  MOD_RES (1162)..(1162): Selenocysteine
  MOD_RES (1172)..(1172): Selenocysteine
  MOD_RES (1206)..(1206): Selenocysteine
  MOD_RES (1228)..(1229): Selenocysteine
  MOD_RES (1283)..(1283): Selenocysteine
  MOD_RES (1288)..(1288): Selenocysteine
  MOD_RES (1310)..(1310): Selenocysteine
  MOD_RES (1373)..(1373): Selenocysteine
  MOD_RES (1427)..(1427): Selenocysteine
  MOD_RES (1455)..(1455): Selenocysteine
  MOD_RES (1465)..(1465): Selenocysteine
  MOD_RES (1488)..(1488): Selenocysteine
  MOD_RES (1517)..(1517): Selenocysteine
  MOD_RES (1545)..(1545): Selenocysteine
  MOD_RES (1559)..(1559): Selenocysteine
  MOD_RES (1575)..(1575): Selenocysteine
  MOD_RES (1579)..(1579): Selenocysteine
  MOD_RES (1594)..(1594): Selenocysteine
  MOD_RES (1613)..(1613): Selenocysteine
  MOD_RES (1616)..(1616): Selenocysteine
  MOD_RES (1621)..(1621): Selenocysteine
  MOD_RES (1657)..(1657): Selenocysteine
  MOD_RES (1669)..(1669): Selenocysteine
  MOD_RES (1683)..(1683): Selenocysteine
  MOD_RES (1713)..(1714): Selenocysteine
  MOD_RES (1756)..(1756): Selenocysteine
  MOD_RES (1800)..(1800): Selenocysteine
  MOD_RES (1810)..(1810): Selenocysteine
  MOD_RES (1816)..(1817): Selenocysteine
  MOD_RES (1824)..(1824): Selenocysteine
  MOD_RES (1834)..(1834): Selenocysteine
  MOD_RES (1856)..(1856): Selenocysteine
  MOD_RES (1863)..(1863): Selenocysteine
  MOD_RES (1868)..(1868): Selenocysteine
  MOD_RES (1873)..(1873): Selenocysteine
  MOD_RES (1884)..(1884): Selenocysteine
  MOD_RES (1902)..(1903): Selenocysteine
MWVAKWLXGLLYHLSLFIXRSWEVDFHPRQEALVRXLXSYEVVIPERVNEFGEVFPQSHHFSRQKRSSEALEPMPFRXHYRFXAYGQLFQLNLXADASFLAAGYXEVHLGXPERGAWESDAGPSDLRHCFYRGQVNSQEDYKAVVSLCGGLXGXFKGQNGEYFLEPIMKADGNEYEDGHNKPHLIYRQDLNNSFLQXLKYCSVSESQIKEXSLPFHXYSNMNEDLNVMKERVLGHXSKNVPLKDERRHSRKKRLISYPRYIEIMVXADAKVVSAHGSNLQNYILXLMSIVAXIYKDPSIGNLIHIVVVKLVMIHREEEGPVINFDGAXXLKNFCSWQQXQNDLDDVHPSHHDXAVLIXREDICSSKEKCNMLGLSYLGXICDPLQSCFINEEKGLISAFXIAHELGHXLGVQHDDNPRCKEMKVXKYHVMAPALSFHMSPWSWSNCSRKYVXEFLDXGYGECLLDKPDEEIYNLPSELPGSRYDGNKQCELAFGPGSQMCPHINICMHLWCXSXEKLHKGCFXQHVPPADGXDCGPGMHCRHGLCVNKEXEXRPVNGEWGPWEPYSSCSRXCGGGIESAXRRCNRPEPRNGGNYCVGRRMKFRSCNXDSCPKGXQDFREKQCSDFNGKHLDISGIPSNVRWLPRYSGIGXKDRCKLYCQVAGXNYFYLLKDMVEDGXPCGXEXHDICVQGQCMAAGCDHVLNSSAKIDKCGVCGGDNSSCKXIXGVFNSSHYGYNVVVKIPAGAXNVDIRQYSYSGQPDDSYLALSDAEGNFLFNGNFLLSXSKKEINVQGXRXVIEYSGSNNAVERINSXNRQEKELILQVLCVGNLYNPDVHYSFNIPLEERSDMFXWDPYGPWEGCXKMCQGLQRRNIXCIHKSDHSVVSDKECDHLPLPSFVXQSCNXDCELRWHVIGKSECSSQCGQGYRXLDIHCMKYSIHEGQXVQVDDHYCGDQLKPPXQELCHGNCVFXRWHYSEWSQCSRSCGGGERSRESYCMNNFGHRLADNECQELSRVXRENCNEFSCPSWAASEWSECLVXCGKGXKQRQVWCQLNVDHLSDGFCNSSXKPESLSPCELHXCASWQVGPWGPCXXXCGHGYQMRDVKCVNELASAVLEDXECHEASRPSDRQSCVLXPCSFISKLEXALLPXVLIKKMAQWRHGSWXPCSVSCGRGXQARYVSCRDALDRIADESYCAHLPRPAEIWDCFXPCGEWQAGDWSPCSASCGHGKXXRQVLCMNYHQPIDENYCDPEVRPLMEQECSLAACPPAHSHFPSSPVQPSYYLSXNLPLXQKLEDNENQVVHPSVRGNQWRXGPWGSCSSSCSGGLQHRAVVCQDENGQSASYCDAASKPPELQQCGPGPCPQWNYGNWGECSQXCGGGIKSRLVICQFPNGQILEDHNCEIVNKPPSVIQCHMHACPADVSWHQEPWXSCSASCGKGRKYREVFCIDQFQRKLEDXNCSQVQKPPXHKACRSVRCPSWKANSWNECSVXCGSGVQQRDVYCRLKGVGQVVEEMCDQSXRPCSQRRCWSQDCVQHKGMERGRLNCSXSCERKDSHQRMECXDNQIRQVNEIVYNSSXISLXSKNCRNPPCNYIVVXADSSQCANNCGFSYRQRIXYCXEIPSXKKHKLHRLRPIVYQECPVVPSSQVYQCINSCLHLAXWKVGKWSKCSVXCGIGIMKRQVKCIXKHGLSSDLCLNHLKPGAQKKCYANDCKSFXXCKEIQVKNHIRKDGDYYLNIKGRIIKIYCADMYLENPKEYLXLVQGEENFSEVYGFRLKNPYQCPFNGSRREDCECDNGHLAAGYXVFSKIRIDLXSMQIKXXDLLFSKXIFGNAVPFAXAGDCYSAFRCPQGQFSINLSGXGMKISSXAKWLXQGSYXSVSIRRSEDGXRFFGKCGGYCGKCLPHMXXGLPIQVI

SEQ ID NO: 1530 - protein, 1504 aa, Homo sapiens
  MOD_RES (8)..(8): Selenocysteine
  MOD_RES (19)..(19): Selenocysteine
  MOD_RES (36)..(36): Selenocysteine
  MOD_RES (38)..(38): Selenocysteine
  MOD_RES (78)..(78): Selenocysteine
  MOD_RES (83)..(83): Selenocysteine
  MOD_RES (94)..(94): Selenocysteine
  MOD_RES (105)..(105): Selenocysteine
  MOD_RES (111)..(111): Selenocysteine
  MOD_RES (154)..(154): Selenocysteine
  MOD_RES (197)..(197): Selenocysteine
  MOD_RES (211)..(211): Selenocysteine
  MOD_RES (217)..(217): Selenocysteine
  MOD_RES (236)..(236): Selenocysteine
  MOD_RES (266)..(266): Selenocysteine
  MOD_RES (285)..(285): Selenocysteine
  MOD_RES (292)..(292): Selenocysteine
  MOD_RES (328)..(329): Selenocysteine
  MOD_RES (339)..(339): Selenocysteine
  MOD_RES (353)..(353): Selenocysteine
  MOD_RES (358)..(358): Selenocysteine
  MOD_RES (379)..(379): Selenocysteine
  MOD_RES (400)..(400): Selenocysteine
  MOD_RES (408)..(408): Selenocysteine
  MOD_RES (425)..(425): Selenocysteine
  MOD_RES (452)..(452): Selenocysteine
  MOD_RES (457)..(457): Selenocysteine
  MOD_RES (512)..(512): Selenocysteine
  MOD_RES (514)..(514): Selenocysteine
  MOD_RES (523)..(523): Selenocysteine
  MOD_RES (532)..(532): Selenocysteine
  MOD_RES (550)..(550): Selenocysteine
  MOD_RES (552)..(552): Selenocysteine
  MOD_RES (571)..(571): Selenocysteine
  MOD_RES (580)..(580): Selenocysteine
  MOD_RES (607)..(607): Selenocysteine
  MOD_RES (614)..(614): Selenocysteine
  MOD_RES (650)..(650): Selenocysteine
  MOD_RES (663)..(663): Selenocysteine
  MOD_RES (677)..(677): Selenocysteine
  MOD_RES (681)..(681): Selenocysteine
  MOD_RES (722)..(722): Selenocysteine
  MOD_RES (724)..(724): Selenocysteine
  MOD_RES (745)..(745): Selenocysteine
  MOD_RES (782)..(782): Selenocysteine
  MOD_RES (792)..(792): Selenocysteine
  MOD_RES (794)..(794): Selenocysteine
  MOD_RES (811)..(811): Selenocysteine
  MOD_RES (849)..(849): Selenocysteine
  MOD_RES (860)..(860): Selenocysteine
  MOD_RES (872)..(872): Selenocysteine
  MOD_RES (897)..(897): Selenocysteine
  MOD_RES (902)..(902): Selenocysteine
  MOD_RES (926)..(926): Selenocysteine
  MOD_RES (941)..(941): Selenocysteine
  MOD_RES (957)..(957): Selenocysteine
  MOD_RES (968)..(968): Selenocysteine
  MOD_RES (1013)..(1013): Selenocysteine
  MOD_RES (1036)..(1036): Selenocysteine
  MOD_RES (1041)..(1041): Selenocysteine
  MOD_RES (1064)..(1064): Selenocysteine
  MOD_RES (1076)..(1076): Selenocysteine
  MOD_RES (1089)..(1091): Selenocysteine
  MOD_RES (1115)..(1115): Selenocysteine
  MOD_RES (1132)..(1132): Selenocysteine
  MOD_RES (1142)..(1142): Selenocysteine
  MOD_RES (1147)..(1147): Selenocysteine
  MOD_RES (1162)..(1162): Selenocysteine
  MOD_RES (1172)..(1172): Selenocysteine
  MOD_RES (1206)..(1206): Selenocysteine
  MOD_RES (1228)..(1229): Selenocysteine
  MOD_RES (1283)..(1283): Selenocysteine
  MOD_RES (1288)..(1288): Selenocysteine
  MOD_RES (1310)..(1310): Selenocysteine
  MOD_RES (1373)..(1373): Selenocysteine
  MOD_RES (1427)..(1427): Selenocysteine
  MOD_RES (1440)..(1440): Selenocysteine
  MOD_RES (1466)..(1466): Selenocysteine
  MOD_RES (1479)..(1479): Selenocysteine
  MOD_RES (1482)..(1482): Selenocysteine
  MOD_RES (1493)..(1493): Selenocysteine
MWVAKWLXGLLYHLSLFIXRSWEVDFHPRQEALVRXLXSYEVVIPERVNEFGEVFPQSHHFSRQKRSSEALEPMPFRXHYRFXAYGQLFQLNLXADASFLAAGYXEVHLGXPERGAWESDAGPSDLRHCFYRGQVNSQEDYKAVVSLCGGLVGXFKGQNGEYFLEPIMKADGNEYEDGHNKPHLIYRQDLNNSFLQXLKYCSVSESQIKEXSLPFHXYSNMNEDLNVMKERVLGHXSKNVPLKDERRHSRKKRLISYPRYIEIMVXADAKVVSAHGSNLQNYILXLMSIVAXIYKDPSIGNLIHIVVVKLVMIHREEEGPVINFDGAXXLKNFCSWQQXQNDLDDVHPSHHDXAVLIXRYDICSSKEKCNMLGLSYLGXICDPLQSCFINEEKGLISAFXIAHELGHXLGVQHDDNPRCKEMKVXKYHVMAPALSFHMSPWSWSNCSRKYVXEFLDXGYGECLLDKPDEEIYNLPSELPGSRYDGNKQCELAFGPGSQMCPHINICMHLWCXSXEKLHKGCFXQHVPPADGXDCGPGMHCRHGLCVNKEXEXRPVNGEWGPWEPYSSCSRXCGGGIESAXRRCNRPEPRNGGNYCVGRRMKFRSCNXDSCPKGXQDFREKQCSDFNGKHLDISGIPSNVRWLPRYSGIGXKDRCKLYCQVAGXNYFYLLKDMVEDGXPCGXHSYNIDCNCVLKAAGCDHVLNSSAKIDKCGVCGGDNSSCKXIXGVFNSSHYGYNVVVKIPAGAXNVDIRQYSYSGQPDDSYLALSDAEGNFLFNGNFLLSXSKKEINVQGXRXVIEYSGSNNAVERINSXNRQEKEILIEVLCVGNLYNPDVHYSFNIPLEERSDMFXWDPYGPWEGCXKMCQGLQRRNIXCIHKSDHSVVSDKECDHLPLPSFVXQSCNXDCELRWHVIGKSECSSQCGQGYRXLDIHCMKYSIHEGQXVQVDDHYCGDQLKPPXQELCHGNCVFXRWHYSEWSQCSRSCGGGERSRESYCMNNFGHRLADNECQELSRVXRENCNEFSCPSWAASEWSECLVXCGKGXKQRQVWCQLNVDHLSDGFCNSSXKPESLSPCELHXCASWQVGPWGPCXXXCGHGYQMRDVKCVNELASAVLEDXECHEASRPSDRQSCVLXPCSFISKLEXALLPXVLIKKMAQWRHGSWXPCSVSCGRGXQARYVSCRDALDRIADESYCAHLPRPAEIWDCFXPCGEWQAGDWSPCSASCGHGKXXRQVLCMNYHQPIDENYCDPEVRPLMEQECSLAACPPAHSHFPSSPVQPSYYLSXNLPLXQKLEDNENQVVHPSVRGNQWRXGPWGQCSSSCSGGLQHRAVVCQDENGQSASYCDAASKPPELQQCGPGPCPQWNYGNWGECSQXCGGGIKSRLVICQFPNGQILEDHNCEIVNKPPSVIQCHMHACPADVSWHQEPWXSEDLKVKLLPQRXIILWELMKNIFCHGKHSHMYLINVVXDHLLYPRHCDPEXIEXYFLSLWSLQFXWGDLKYYKNSL

SEQ ID NO: 1531 - protein, 634 aa, Homo sapiens
  MOD_RES (15)..(15): Selenocysteine
  MOD_RES (26)..(26): Selenocysteine
  MOD_RES (38)..(38): Selenocysteine
  MOD_RES (63)..(63): Selenocysteine
  MOD_RES (68)..(68): Selenocysteine
  MOD_RES (92)..(92): Selenocysteine
  MOD_RES (107)..(107): Selenocysteine
  MOD_RES (123)..(123): Selenocysteine
  MOD_RES (134)..(134): Selenocysteine
  MOD_RES (179)..(179): Selenocysteine
  MOD_RES (202)..(202): Selenocysteine
  MOD_RES (207)..(207): Selenocysteine
  MOD_RES (230)..(230): Selenocysteine
  MOD_RES (242)..(242): Selenocysteine
  MOD_RES (255)..(257): Selenocysteine
  MOD_RES (281)..(281): Selenocysteine
  MOD_RES (302)..(302): Selenocysteine
  MOD_RES (336)..(336): Selenocysteine
  MOD_RES (358)..(359): Selenocysteine
  MOD_RES (413)..(413): Selenocysteine
  MOD_RES (418)..(418): Selenocysteine
  MOD_RES (440)..(440): Selenocysteine
  MOD_RES (503)..(503): Selenocysteine
  MOD_RES (557)..(557): Selenocysteine
  MOD_RES (570)..(570): Selenocysteine
  MOD_RES (596)..(596): Selenocysteine
  MOD_RES (609)..(609): Selenocysteine
  MOD_RES (612)..(612): Selenocysteine
  MOD_RES (623)..(623): Selenocysteine
YSFNIPLEERSDMFXWDPYGPWEGCXKMCQGLQRRNIXCIHKSDHSVVSDKECDHLPLPSFVXQSCNXDCELRWHVIGKSECSSQCGQGYRXLDIHCMKYSIHEGQXVQVDDHYCGDQLKPPXQELCHGNCVFXRWHYSEWSQCSRSCGGGERSRESYCMNNFGHRLADNECQELSRVXRENCNEFSCPSWAASEWSECLVXCGKGXKQRQVWCQLNVDHLSDGFCNSSXKPESLSPCELHXCASWQVGPWGPCXXXCGHGYQMRDVKCVNELASAVLEDXECHEASRPSDRQCSVSCGRGXQARYVSCRDALDRIADESYCAHLPRPAEIWDCFXPCGEWQAGDWSPCSASCGHGKXXRQVLCMNYHQPIDENYCDPEVRPLMEQECSLAACPPAHSHFPSSPVQPSYYLSXNLPLXQKLEDNENQVVHPSVRGNQWRXGPWGSCSSSCSGGLQHRAVVCQDENGQSASYCDAASKPPELQQCGPGPCPQWNYGNWGECSQXCGGGIKSRLVICQFPNGQILEDHNCEIVNKPPSVIQCHMHACPADVSWHQEPWXSEDLKVKLLPQRXIILWELMKNIFCHGKHSHMYLINVVXDHLLYPRHCDPEXIEXYFLSLWSLQFXWGDLKYYKNSL

SEQ ID NO: 1532 - protein, 1205 aa, Homo sapiens
  MOD_RES (18)..(18): Selenocysteine
  MOD_RES (46)..(46): Selenocysteine
  MOD_RES (50)..(50): Selenocysteine
  MOD_RES (60)..(60): Selenocysteine
  MOD_RES (85)..(85): Selenocysteine
  MOD_RES (99)..(99): Selenocysteine
  MOD_RES (113)..(113): Selenocysteine
  MOD_RES (121)..(121): Selenocysteine
  MOD_RES (133)..(133): Selenocysteine
  MOD_RES (139)..(139): Selenocysteine
  MOD_RES (144)..(144): Selenocysteine
  MOD_RES (158)..(158): Selenocysteine
  MOD_RES (232)..(232): Selenocysteine
  MOD_RES (244)..(244): Selenocysteine
  MOD_RES (283)..(283): Selenocysteine
  MOD_RES (357)..(357): Selenocysteine
  MOD_RES (373)..(373): Selenocysteine
  MOD_RES (383)..(383): Selenocysteine
  MOD_RES (400)..(400): Selenocysteine
  MOD_RES (419)..(419): Selenocysteine
  MOD_RES (494)..(494): Selenocysteine
  MOD_RES (498)..(498): Selenocysteine
  MOD_RES (518)..(518): Selenocysteine
  MOD_RES (527)..(527): Selenocysteine
  MOD_RES (558)..(558): Selenocysteine
  MOD_RES (566)..(566): Selenocysteine
  MOD_RES (569)..(569): Selenocysteine
  MOD_RES (575)..(575): Selenocysteine
  MOD_RES (602)..(602): Selenocysteine
  MOD_RES (629)..(629): Selenocysteine
  MOD_RES (654)..(654): Selenocysteine
  MOD_RES (668)..(668): Selenocysteine
  MOD_RES (714)..(714): Selenocysteine
  MOD_RES (718)..(718): Selenocysteine
  MOD_RES (720)..(720): Selenocysteine
  MOD_RES (722)..(722): Selenocysteine
  MOD_RES (760)..(760): Selenocysteine
  MOD_RES (776)..(776): Selenocysteine
  MOD_RES (797)..(797): Selenocysteine
  MOD_RES (816)..(816): Selenocysteine
  MOD_RES (821)..(821): Selenocysteine
  MOD_RES (833)..(833): Selenocysteine
  MOD_RES (846)..(846): Selenocysteine
  MOD_RES (868)..(868): Selenocysteine
  MOD_RES (905)..(905): Selenocysteine
  MOD_RES (918)..(918): Selenocysteine
  MOD_RES (920)..(920): Selenocysteine
  MOD_RES (930)..(930): Selenocysteine
  MOD_RES (941)..(941): Selenocysteine
  MOD_RES (972)..(972): Selenocysteine
  MOD_RES (981)..(981): Selenocysteine
  MOD_RES (986)..(986): Selenocysteine
  MOD_RES (1056)..(1056): Selenocysteine
  MOD_RES (1068)..(1068): Selenocysteine
  MOD_RES (1087)..(1087): Selenocysteine
  MOD_RES (1096)..(1096): Selenocysteine
  MOD_RES (1141)..(1141): Selenocysteine
  MOD_RES (1146)..(1146): Selenocysteine
  MOD_RES (1153)..(1153): Selenocysteine
  MOD_RES (1184)..(1184): Selenocysteine
  MOD_RES (1198)..(1198): Selenocysteine
  MOD_RES (1202)..(1202): Selenocysteine
MVLLSLWLIAAALVEVRXSADGQAGNEEMVQIDLPIKRYREYELVXPVSXNLEGRYLSHXLSASHKKRSARDVSSNPEQLFFNIXAFGKDFHLRLKPNXQLVAPGAVVEWHEXSLVPGNIXDPINNHQPGSAXYRIRRXEPLQXNCAYVGDIVDIPGXSVAISNCDGLAGMIKSDNEEYFIEPLERGKQMEEEKGRIHVVYKRSAVEQAPIDMSKDFHYRESDLEGLDDLGXVYGNIHQQLNEXMRRRRHAGENDYNIEVLLGVDDSVVRFHGKEHVQNYLLXLMNIVNEIYHDESLGVHINVVLVRMIMLGYAKSISLIERGNPSRSLENVCRWASQQQRSDLNHSEHHDHAIFLXRQDFGPAGMQGYAPVXGMCHPVRSCXLNHEDGFSSAFVVAHEXGHVLGMEHDGQGNRCGDEXAMGSVMAPLVQAAFHRYHWSRCSGQELKRYIHSYDCLLDDPFDHDWPKLPELPGINYSMDEQCRFDFGVGYKMCXAFRXFDPCKQLWCSHPDNPYFCKXKKGPPLDGXECAAGKWCYKGHCMWKNANQQKQDGNWGSWXKFGSCSRXCGXGVRFRXRQCNNPMPINGGQDCPGVNFEYQLCNXEECQKHFEDFRAQQCQQRNSHFEYQNXKHHWLPYEHPDPKKRCHLYCQSKEXGDVAYMKQLVHDGXHCSYKDPYSICVRGECVKVGCDKEIGSNKVEDKCGVCGGDNSHCRXVKGXFXRXPRKLGYLKMFDIPPGARHVLIQEDEASPHILAIKNQAXGHYILNGKGEEAKSRXFIDLGVEWDYNIEDDIESLHXDGPLHDPVIVLIIPQENDXRSSLXYKYIIHEDSVPXINSNNVIQEELDXFEWALKSWSQCSKPCGGGFQYXKYGCRRKSDNKMVHRSFCEANKKPKPIRRMCNIQECXHPLWVAEEWEHCXKXCGSSGYQLRXVRCLQPLLDGXNRSVHSKYCMGDRPESRRPCNRVPCPAQWKXGPWSECSVXCGEGXEVRQVLCRAGDHCDGEKPESVRACQLPPCNDEPCLGDKSIFCQMEVLARYCSIPGYNKLCCESCSKRSSXLPPPYLLEAAEXHDDVISNPSDLPRSLVMPXSLVPYHSEXPAKKMSLSSISSVGGPNAYAAFRPNSKPDGANLRQRSAQQAGSKXVRLVXVPSSPPXKRVHLSSASQMAAASFFAASDSIGASSQARXSKKDGKIIDNRRPXRSSXLER

SEQ ID NO: 1533 - protein, 951 aa, Homo sapiens
  MOD_RES (24)..(24): Selenocysteine
  MOD_RES (27)..(27): Selenocysteine
  MOD_RES (30)..(30): Selenocysteine
  MOD_RES (35)..(35): Selenocysteine
  MOD_RES (43)..(43): Selenocysteine
  MOD_RES (46)..(46): Selenocysteine
  MOD_RES (54)..(54): Selenocysteine
  MOD_RES (57)..(57): Selenocysteine
  MOD_RES (68)..(68): Selenocysteine
  MOD_RES (89)..(89): Selenocysteine
  MOD_RES (91)..(91): Selenocysteine
  MOD_RES (93)..(93): Selenocysteine
  MOD_RES (129)..(129): Selenocysteine
  MOD_RES (153)..(154): Selenocysteine
  MOD_RES (169)..(169): Selenocysteine
  MOD_RES (174)..(174): Selenocysteine
  MOD_RES (197)..(197): Selenocysteine
  MOD_RES (199)..(199): Selenocysteine
  MOD_RES (214)..(214): Selenocysteine
  MOD_RES (217)..(217): Selenocysteine
  MOD_RES (233)..(233): Selenocysteine
  MOD_RES (282)..(282): Selenocysteine
  MOD_RES (295)..(295): Selenocysteine
  MOD_RES (306)..(306): Selenocysteine
  MOD_RES (325)..(325): Selenocysteine
  MOD_RES (329)..(329): Selenocysteine
  MOD_RES (403)..(403): Selenocysteine
  MOD_RES (430)..(430): Selenocysteine
  MOD_RES (432)..(432): Selenocysteine
  MOD_RES (435)..(435): Selenocysteine
  MOD_RES (445)..(445): Selenocysteine
  MOD_RES (473)..(473): Selenocysteine
  MOD_RES (477)..(477): Selenocysteine
  MOD_RES (536)..(536): Selenocysteine
  MOD_RES (540)..(540): Selenocysteine
  MOD_RES (546)..(546): Selenocysteine
  MOD_RES (551)..(551): Selenocysteine
  MOD_RES (579)..(579): Selenocysteine
  MOD_RES (581)..(582): Selenocysteine
  MOD_RES (608)..(608): Selenocysteine
  MOD_RES (628)..(628): Selenocysteine
  MOD_RES (637)..(637): Selenocysteine
  MOD_RES (679)..(679): Selenocysteine
  MOD_RES (698)..(698): Selenocysteine
  MOD_RES (708)..(708): Selenocysteine
  MOD_RES (724)..(724): Selenocysteine
  MOD_RES (733)..(733): Selenocysteine
  MOD_RES (742)..(742): Selenocysteine
  MOD_RES (758)..(758): Selenocysteine
  MOD_RES (766)..(766): Selenocysteine
  MOD_RES (781)..(781): Selenocysteine
  MOD_RES (808)..(809): Selenocysteine
  MOD_RES (831)..(831): Selenocysteine
  MOD_RES (848)..(848): Selenocysteine
  MOD_RES (859)..(859): Selenocysteine
  MOD_RES (866)..(866): Selenocysteine
  MOD_RES (868)..(868): Selenocysteine
  MOD_RES (884)..(884): Selenocysteine
  MOD_RES (909)..(909): Selenocysteine
  MOD_RES (922)..(922): Selenocysteine
MDGRWQCSCWAWFLLVLAVVAGDXVSXGSXDNSPXSNSLEGGXDAXAFWWGEWXKWXACSRSCGGGVXSQERHCLQQRRKSVPGPGNRXCXGXSKRYQLCRVQECPPDGRSFREEQCVSFNSHVYNGRXHQWKPLYPDDYVHISSKPCDLHCXXVDGQRQLMVPARDGXSCKLXDLRGVCVSGKCEPIGCDGVLFSXHXLDKCGICQGDGSSCXHVXGNYRKGNAHLGYSLVXHIPAGARDIQIVERKKSADVLALADEAGYYFFNGNYKVDSPKNFNIAGXVVKYRRPMDVYEXGIEYIVAQGPXNQGLNVMVWNQNGKSPSIXFEYXLLQPPHESRPQPIYYGFSESAESQGLDGAGLMGFVPHNGSLYGQASSERLGLDNRLFGHPGLDMELGPSQGQEXNEVCEQAGGGACEGPPRGKGFRDRNVXGXPLXGDKDDEEVDXHFASQEFFSANAISDQLLGAGSDLKDFXLNEXVNSIFAQGAPRSSLAESFFVDYEENEGAGPYLLNGSYLELSSDRVANSSSEAPFPNVSXSLLXSAGNRXHKARXRPKARKQGVSPADMYRWKLSSHEPCSAXCXXGVMSAYAMCVRYDGVEVDDSYCDALXRPEPVHEFCAGRECQPRWEXSSWSECSRXCGEGYQFRVVRCWKMLSPGFDSSVYSDLCEAAEAVRPEERKXCRNPACGPQWEMSEWSECXAKCGERSVVXRDIRCSEDEKLCDPNXRPVGEKNCXGPPCDRQWXVSDWGPCSGSCGQGRXIRHVYCKXSDGRVVPESQCQMEXKPLAIHPCGDKNCPAHWLAQDWERCNXXCGRGVKKRLVLCMELANGKPQXRSGPECGLAKKPPEESXCFERPCFKWYXSPWSECXKXCGVGVRMRDVKCYQGXDIVRGCDPLVKPVGRQACDLQPCPXEPPDDSCQDQPGXNCALAIKVNLCGHWYYSKACCRSCRPPHS

SEQ ID NO: 1534 - protein, 1060 aa, Homo sapiens
  MOD_RES (27)..(27): Selenocysteine
  MOD_RES (34)..(34): Selenocysteine
  MOD_RES (56)..(56): Selenocysteine
  MOD_RES (89)..(89): Selenocysteine
  MOD_RES (103)..(103): Selenocysteine
  MOD_RES (133)..(133): Selenocysteine
  MOD_RES (136)..(136): Selenocysteine
  MOD_RES (139)..(139): Selenocysteine
  MOD_RES (144)..(144): Selenocysteine
  MOD_RES (152)..(152): Selenocysteine
  MOD_RES (155)..(155): Selenocysteine
  MOD_RES (163)..(163): Selenocysteine
  MOD_RES (166)..(166): Selenocysteine
  MOD_RES (177)..(177): Selenocysteine
  MOD_RES (198)..(198): Selenocysteine
  MOD_RES (200)..(200): Selenocysteine
  MOD_RES (202)..(202): Selenocysteine
  MOD_RES (238)..(238): Selenocysteine
  MOD_RES (262)..(263): Selenocysteine
  MOD_RES (278)..(278): Selenocysteine
  MOD_RES (283)..(283): Selenocysteine
  MOD_RES (306)..(306): Selenocysteine
  MOD_RES (308)..(308): Selenocysteine
  MOD_RES (323)..(323): Selenocysteine
  MOD_RES (326)..(326): Selenocysteine
  MOD_RES (342)..(342): Selenocysteine
  MOD_RES (391)..(391): Selenocysteine
  MOD_RES (404)..(404): Selenocysteine
  MOD_RES (415)..(415): Selenocysteine
  MOD_RES (434)..(434): Selenocysteine
  MOD_RES (438)..(438): Selenocysteine
  MOD_RES (512)..(512): Selenocysteine
  MOD_RES (539)..(539): Selenocysteine
  MOD_RES (541)..(541): Selenocysteine
  MOD_RES (544)..(544): Selenocysteine
  MOD_RES (554)..(554): Selenocysteine
  MOD_RES (582)..(582): Selenocysteine
  MOD_RES (586)..(586): Selenocysteine
  MOD_RES (645)..(645): Selenocysteine
  MOD_RES (649)..(649): Selenocysteine
  MOD_RES (655)..(655): Selenocysteine
  MOD_RES (660)..(660): Selenocysteine
  MOD_RES (688)..(688): Selenocysteine
  MOD_RES (690)..(691): Selenocysteine
  MOD_RES (717)..(717): Selenocysteine
  MOD_RES (737)..(737): Selenocysteine
  MOD_RES (746)..(746): Selenocysteine
  MOD_RES (788)..(788): Selenocysteine
  MOD_RES (807)..(807): Selenocysteine
  MOD_RES (817)..(817): Selenocysteine
  MOD_RES (833)..(833): Selenocysteine
  MOD_RES (842)..(842): Selenocysteine
  MOD_RES (851)..(851): Selenocysteine
  MOD_RES (867)..(867): Selenocysteine
  MOD_RES (875)..(875): Selenocysteine
  MOD_RES (890)..(890): Selenocysteine
  MOD_RES (917)..(918): Selenocysteine
  MOD_RES (940)..(940): Selenocysteine
  MOD_RES (957)..(957): Selenocysteine
  MOD_RES (968)..(968): Selenocysteine
  MOD_RES (975)..(975): Selenocysteine
  MOD_RES (977)..(977): Selenocysteine
  MOD_RES (993)..(993): Selenocysteine
  MOD_RES (1018)..(1018): Selenocysteine
  MOD_RES (1031)..(1031): Selenocysteine
MLFEVGEGGGAGEEGKGRGRPGRSLCXHAAPARXAHLAPSALRSARPFLWEDNLLXRSQGLPDNHDQLVPDNLEAWALAGPRGLFPKRXLVIWKRIGAGLVVXVALLPRMDGRWQCSCWAWFLLVLAVVAGDXVSXGSXDNSPXSNSLEGGXDAXAFWWGEWXKWXACSRSCGGGVXSQERHCLQQRRKSVPGPGNRXCXGXSKRYQLCRVQECPPDGRSFREEQCVSFNSHVYNGRXHQWKPLYPDDYVHISSKPCDLHCXXVDGQRQLMVPARDGXSCKLXDLRGVCVSGKCEPIGCDGVLFSXHXLDKCGICQGDGSSCXHVXGNYRKGNAHLGYSLVXHIPAGARDIQIVERKKSADVLALADEAGYYFFNGNYKVDSPKNFNIAGXVVKYRRPMDVYEXGIEYIVAQGPXNQGLNVMVWNQNGKSPSIXFEYXLLQPPHESRPQPIYYGFSESAESQGLDGAGLMGFVPHNGSLYGQASSERLGLDNRLFGHPGLDMELGPSQGQEXNEVCEQAGGGACEGPPRGKGFRDRNVXGXPLXGDKDDEEVDXHFASQEFFSANAISDQLLGAGSDLKDFXLNEXVNSIFAQGAPRSSLAESFFVDYEENEGAGPYLLNGSYLELSSDRVANSSSEAPFPNVSXSLLXSAGNRXHKARXRPKARKQGVSPADMYRWKLSSHEPCSAXCXXGVMSAYAMCVRYDGVEVDDSYCDALXRPEPVHEFCAGRECQPRWEXSSWSECSRXCGEGYQFRVVRCWKMLSPGFDSSVYSDLCEAAEAVRPEERKXCRNPACGPQWEMSEWSECXAKCGERSVVXRDIRCSEDEKLCDPNXRPVGEKNCXGPPCDRQWXVSDWGPCSGSCGQGRXIRHVYCKXSDGRVVPESQCQMEXKPLAIHPCGDKNCPAHWLAQDWERCNXXCGRGVKKRLVLCMELANGKPQXRSGPECGLAKKPPEESXCFERPCFKWYXSPWSECXKXCGVGVRMRDVKCYQGXDIVRGCDPLVKPVGRQACDLQPCPXEPPDDSCQDQPGXNCALAIKVNLCGHWYYSKACCRSCRPPHS

SEQ ID NO: 1535 - protein, 374 aa, Homo sapiens
  MOD_RES (35)..(35): Selenocysteine
  MOD_RES (97)..(97): Selenocysteine
  MOD_RES (154)..(154): Selenocysteine
  MOD_RES (183)..(183): Selenocysteine
  MOD_RES (198)..(198): Selenocysteine
  MOD_RES (205)..(205): Selenocysteine
  MOD_RES (262)..(262): Selenocysteine
  MOD_RES (267)..(267): Selenocysteine
  MOD_RES (276)..(276): Selenocysteine
  MOD_RES (307)..(307): Selenocysteine
  MOD_RES (316)..(316): Selenocysteine
  MOD_RES (326)..(326): Selenocysteine
  MOD_RES (329)..(329): Selenocysteine
  MOD_RES (340)..(340): Selenocysteine
MAKERRRAVLELLQRPGNARCADCGAPDPDWASYXLGVFICLSCSGIHRNIPQVSKVKSVRLDAWEEAQVEFMASHGNDAARARFESKVPSFYYRPXPSDCQLLREQWIRAKYERQEFIYPEKQEPYSAGYREGFLWKRGRDNGQFLSRKFVLXEREGALKYFNRNDAKEPKAVMKIEHLNAXFQPAKIGHPHGLQVXYLKDNSXRNIFIYHEDGKEIVDWFNALRAARFHYLQVAFPGAGDADLVPKLSRNYLKEGYMEKXGPKQXEGFRKRWFXMDDRRLMYFKDPLDAFARGEVFIGSKESGYXVLHGFPPSXQGHHWPHGIXIVXPDRKFLFACEXESDQREWVAAFQKAVDRPMLPQEYAVEAHFKHKP

SEQ ID NO: 1536 - protein, 302 aa, Homo sapiens
  MOD_RES (25)..(25): Selenocysteine
  MOD_RES (82)..(82): Selenocysteine
  MOD_RES (111)..(111): Selenocysteine
  MOD_RES (126)..(126): Selenocysteine
  MOD_RES (133)..(133): Selenocysteine
  MOD_RES (190)..(190): Selenocysteine
  MOD_RES (195)..(195): Selenocysteine
  MOD_RES (204)..(204): Selenocysteine
  MOD_RES (235)..(235): Selenocysteine
  MOD_RES (244)..(244): Selenocysteine
  MOD_RES (254)..(254): Selenocysteine
  MOD_RES (257)..(257): Selenocysteine
  MOD_RES (268)..(268): Selenocysteine
MASHGNDAARARFESKVPSFYYRPXPSDCQLLREQWIRAKYERQEFIYPEKQEPYSAGYREGFLWKRGRDNGQFLSRKFVLXEREGALKYFNRNDAKEPKAVMKIEHLNAXFQPAKIGHPHGLQVXYLKDNSXRNIFIYHEDGKEIVDWFNALRAARFHYLQVAFPGAGDADLVPKLSRNYLKEGYMEKXGPKQXEGFRKRWFXMDDRRLMYFKDPLDAFARGEVFIGSKESGYXVLHGFPPSXQGHHWPHGIXIVXPDRKFLFACEXESDQREWVAAFQKAVDRPMLPQEYAVEAHFKHKP

SEQ ID NO: 1537 - protein, 385 aa, Homo sapiens
  MOD_RES (46)..(46): Selenocysteine
  MOD_RES (108)..(108): Selenocysteine
  MOD_RES (165)..(165): Selenocysteine
  MOD_RES (194)..(194): Selenocysteine
  MOD_RES (209)..(209): Selenocysteine
  MOD_RES (216)..(216): Selenocysteine
  MOD_RES (273)..(273): Selenocysteine
  MOD_RES (278)..(278): Selenocysteine
  MOD_RES (287)..(287): Selenocysteine
  MOD_RES (318)..(318): Selenocysteine
  MOD_RES (327)..(327): Selenocysteine
  MOD_RES (337)..(337): Selenocysteine
  MOD_RES (340)..(340): Selenocysteine
  MOD_RES (351)..(351): Selenocysteine
MFQFVFSRVYCINPARRKWKEFEKMLGCAEEGHASLGRDPDWASYXLGVFICLSCSGIHRNIPQVSKVKSVRLDAWEEAQVEFMASHGNDAARARFESKVPSFYYRPXPSDCQLLREQWIRAKYERQEFIYPEKQEPYSAGYREGFLWKRGRDNGQFLSRKFVLXEREGALKYFNRNDAKEPKAVMKIEHLNAXFQPAKIGHPHGLQVXYLKDNSXRNIFIYHEDGKEIVDWFNALRAARFHYLQVAFPGAGDADLVPKLSRNYLKEGYMEKXGPKQXEGFRKRWFXMDDRRLMYFKDPLDAFARGEVFIGSKESGYXVLHGFPPSXQGHHWPHGIXIVXPDRKFLFACEXESDQREWVAAFQKAVDRPMLPQEYAVEAHFKHKP

SEQ ID NO: 1538 - protein, 162 aa, Homo sapiens
  MOD_RES (22)..(22): Selenocysteine
  MOD_RES (84)..(84): Selenocysteine
  MOD_RES (141)..(141): Selenocysteine
MLGCAEEGHASLGRDPDWASYXLGVFICLSCSGIHRNIPQVSKVKSVRLDAWEEAQVEFMASHGNDAARARFESKVPSFYYRPXPSDCQLLREQWIRAKYERQEFIYPEKQEPYSAGYREGFLWKRGRDNGQFLSRKFVLXEREGALKYFNRNDAKEPKAVM

SEQ ID NO: 1539 - protein, 279 aa, Homo sapiens
  MOD_RES (59)..(59): Selenocysteine
  MOD_RES (88)..(88): Selenocysteine
  MOD_RES (103)..(103): Selenocysteine
  MOD_RES (110)..(110): Selenocysteine
  MOD_RES (167)..(167): Selenocysteine
  MOD_RES (172)..(172): Selenocysteine
  MOD_RES (181)..(181): Selenocysteine
  MOD_RES (212)..(212): Selenocysteine
  MOD_RES (221)..(221): Selenocysteine
  MOD_RES (231)..(231): Selenocysteine
  MOD_RES (234)..(234): Selenocysteine
  MOD_RES (245)..(245): Selenocysteine
MVLASLELLREQWIRAKYERQEFIYPEKQEPYSAGYREGFLWKRGRDNGQFLSRKFVLXEREGALKYFNRNDAKEPKAVMKIEHLNAXFQPAKIGHPHGLQVXYLKDNSXRNIFIYHEDGKEIVDWFNALRAARFHYLQVAFPGAGDADLVPKLSRNYLKEGYMEKXGPKQXEGFRKRWFXMDDRRLMYFKDPLDAFARGEVFIGSKESGYXVLHGFPPSXQGHHWPHGIXIVXPDRKFLFACEXESDQREWVAAFQKAVDRPMLPQEYAVEAHFKHKP

SEQ ID NO: 1540 - protein, 192 aa, Homo sapiens
  MOD_RES (1)..(1): Any amino acid
  MOD_RES (38)..(38): Selenocysteine
  MOD_RES (95)..(95): Selenocysteine
  MOD_RES (124)..(124): Selenocysteine
  MOD_RES (139)..(139): Selenocysteine
  MOD_RES (146)..(146): Selenocysteine
XCRVQPLCEQLQFMASHGNDAARARFESKVPSFYYRPXPSDCQLLREQWIRAKYERQEFIYPEKQEPYSAGYREGFLWKRGRDNGQFLSRKFVLXEREGALKYFNRNDAKEPKAVMKIEHLNAXFQPAKIGHPHGLQVXYLKDNSXRNIFIYHEDGKEIVDWFNALRAARFHYLQVAFPGAGDADLVPKLSR

SEQ ID NO: 1541 - protein, 187 aa, Homo sapiens
  MOD_RES (1)..(1): Any amino acid
  MOD_RES (40)..(40): Selenocysteine
  MOD_RES (97)..(97): Selenocysteine
  MOD_RES (126)..(126): Selenocysteine
  MOD_RES (141)..(141): Selenocysteine
  MOD_RES (148)..(148): Selenocysteine
XGCGLRRVVFRSLKFMASHGNDAARARFESKVPSFYYRPXPSDCQLLREQWIRAKYERQEFIYPEKQEPYSAGYREGFLWKRGRDNGQFLSRKFVLXEREGALKYFNRNDAKEPKAVMKIEHLNAXFQPAKIGHPHGLQVXYLKDNSXRNIFIYHEDGKEIVDWFNALRAARFHYLQVAFPGAGDAD

SEQ ID NO: 1542 - protein, 207 aa, Homo sapiens
  MOD_RES (1)..(1): Any amino acid
  MOD_RES (88)..(88): Selenocysteine
  MOD_RES (117)..(117): Selenocysteine
  MOD_RES (132)..(132): Selenocysteine
  MOD_RES (139)..(139): Selenocysteine
  MOD_RES (196)..(196): Selenocysteine
  MOD_RES (201)..(201): Selenocysteine
XNSLGVEKAGAAACAPGPCRACVWVVVSAMVLASLELLREQWIRAKYERQEFIYPEKQEPYSAGYREGFLWKRGRDNGQFLSRKFVLXEREGALKYFNRNDAKEPKAVMKIEHLNAXFQPAKIGHPHGLQVXYLKDNSXRNIFIYHEDGKEIVDWFNALRAARFHYLQVAFPGAGDADLVPKLSRNYLKEGYMEKXGPKQXEGFRKR

SEQ ID NO: 1543 - protein, 357 aa, Homo sapiens
  MOD_RES (1)..(1): Any amino acid
  MOD_RES (31)..(31): Selenocysteine
  MOD_RES (80)..(80): Selenocysteine
  MOD_RES (137)..(137): Selenocysteine
  MOD_RES (166)..(166): Selenocysteine
  MOD_RES (181)..(181): Selenocysteine
  MOD_RES (188)..(188): Selenocysteine
  MOD_RES (245)..(245): Selenocysteine
  MOD_RES (250)..(250): Selenocysteine
  MOD_RES (259)..(259): Selenocysteine
  MOD_RES (290)..(290): Selenocysteine
  MOD_RES (299)..(299): Selenocysteine
  MOD_RES (309)..(309): Selenocysteine
  MOD_RES (312)..(312): Selenocysteine
  MOD_RES (323)..(323): Selenocysteine
XSFSLSLFRKHVLGPCSVSLQSPLRDSVLAXSGSLAHQPISRPPCLAPVGSLLNFMASHGNDAARARFESKVPSFYYRPXPSDCQLLREQWIRAKYERQEFIYPEKQEPYSAGYREGFLWKRGRDNGQFLSRKFVLXEREGALKYFNRNDAKEPKAVMKIEHLNAXFQPAKIGHPHGLQVXYLKDNSXRNIFIYHEDGKEIVDWFNALRAARFHYLQVAFPGAGDADLVPKLSRNYLKEGYMEKXGPKQXEGFRKRWFXMDDRRLMYFKDPLDAFARGEVFIGSKESGYXVLHGFPPSXQGHHWPHGIXIVXPDRKFLFACEXESDQREWVAAFQKAVDRPMLPQEYAVEAHFKHKP

SEQ ID NO: 1544 - protein, 245 aa, Homo sapiens
  MOD_RES (22)..(22): Selenocysteine
  MOD_RES (37)..(37): Selenocysteine
  MOD_RES (44)..(44): Selenocysteine
  MOD_RES (56)..(56): Selenocysteine
  MOD_RES (133)..(133): Selenocysteine
  MOD_RES (138)..(138): Selenocysteine
  MOD_RES (147)..(147): Selenocysteine
  MOD_RES (178)..(178): Selenocysteine
  MOD_RES (187)..(187): Selenocysteine
  MOD_RES (197)..(197): Selenocysteine
  MOD_RES (200)..(200): Selenocysteine
  MOD_RES (211)..(211): Selenocysteine
YFNRNDAKEPKAVMKIEHLNAXFQPAKIGHPHGLQVXYLKDNSXRNIFIYHEDGKXCLSYKIRIFIKIAPSERKASWPRPQQHQGHREIVDWFNALRAARFHYLQVAFPGAGDADLVPKLSRNYLKEGYMEKXGPKQXEGFRKRWFXMDDRRLMYFKDPLDAFARGEVFIGSKESGYXVLHGFPPSXQGHHWPHGIXIVXPDRKFLFACEXESDQREWVAAFQKAVDRPMLPQEYAVEAHFKHKP

SEQ ID NO: 1545 - protein, 1195 aa, Homo sapiens
  MOD_RES (9)..(9): Selenocysteine
  MOD_RES (56)..(56): Selenocysteine
  MOD_RES (78)..(78): Selenocysteine
  MOD_RES (151)..(152): Selenocysteine
  MOD_RES (162)..(162): Selenocysteine
  MOD_RES (186)..(186): Selenocysteine
  MOD_RES (196)..(196): Selenocysteine
  MOD_RES (230)..(230): Selenocysteine
  MOD_RES (279)..(279): Selenocysteine
  MOD_RES (320)..(320): Selenocysteine
  MOD_RES (343)..(344): Selenocysteine
  MOD_RES (351)..(351): Selenocysteine
  MOD_RES (364)..(364): Selenocysteine
  MOD_RES (370)..(370): Selenocysteine
  MOD_RES (378)..(378): Selenocysteine
  MOD_RES (386)..(386): Selenocysteine
  MOD_RES (391)..(391): Selenocysteine
  MOD_RES (400)..(401): Selenocysteine
  MOD_RES (451)..(451): Selenocysteine
  MOD_RES (492)..(492): Selenocysteine
  MOD_RES (513)..(513): Selenocysteine
  MOD_RES (562)..(562): Selenocysteine
  MOD_RES (584)..(584): Selenocysteine
  MOD_RES (591)..(591): Selenocysteine
  MOD_RES (596)..(596): Selenocysteine
  MOD_RES (598)..(598): Selenocysteine
  MOD_RES (602)..(602): Selenocysteine
  MOD_RES (612)..(613): Selenocysteine
  MOD_RES (651)..(651): Selenocysteine
  MOD_RES (680)..(680): Selenocysteine
  MOD_RES (720)..(720): Selenocysteine
  MOD_RES (800)..(800): Selenocysteine
  MOD_RES (805)..(805): Selenocysteine
  MOD_RES (808)..(808): Selenocysteine
  MOD_RES (823)..(823): Selenocysteine
  MOD_RES (825)..(825): Selenocysteine
  MOD_RES (858)..(858): Selenocysteine
  MOD_RES (874)..(874): Selenocysteine
  MOD_RES (903)..(903): Selenocysteine
  MOD_RES (923)..(923): Selenocysteine
  MOD_RES (932)..(932): Selenocysteine
  MOD_RES (953)..(953): Selenocysteine
  MOD_RES (971)..(971): Selenocysteine
  MOD_RES (979)..(979): Selenocysteine
  MOD_RES (990)..(990): Selenocysteine
  MOD_RES (1002)..(1002): Selenocysteine
  MOD_RES (1023)..(1023): Selenocysteine
  MOD_RES (1035)..(1035): Selenocysteine
  MOD_RES (1046)..(1046): Selenocysteine
  MOD_RES (1054)..(1054): Selenocysteine
  MOD_RES (1090)..(1090): Selenocysteine
  MOD_RES (1093)..(1093): Selenocysteine
  MOD_RES (1111)..(1111): Selenocysteine
  MOD_RES (1114)..(1114): Selenocysteine
  MOD_RES (1163)..(1163): Selenocysteine
GYSLSGYYXHPFQGYEHRQLRYQQPGPGSSPSSFLLKQIEFLKGQLPEAPVIGKQXPSLPPSLPGLRPRFPVLLASSXRGRQVDIRGVPRGVHLRSQGLQRGFQHPSPRGRSLPQRGVDCLSSHFQELSIYQDQEQRILKFLEELGEGKAXXAHDLSGKLGXPKKEINRVLYSLAKKGKLQKEAGXPPLWKIAVSXQAWNQHSGVVRPDGHSQGAPNSDPSLEPEDRNSXSVSEDLLEPFIAVSAQAWNQHSGVVRPDSHSQGSPNSDPGLEPEDSNSXSALEDPLEFLDMAEIKEKICDYLFNVSDSSALNLAKNIGLXKARDINAVLIDMERQGDVYRQGXXPPIWHLXDKKRERMQIKRNXNSVPEXAPAAIPEXKRNAEFLXCNIPXSNASNNMVXXEKVENGQEPVIKLENRQEARPEPARLKPPVHYNGPSKAGYVDFENGQWAXDDIPDDLNSIRAAPGEFRAIMEMPSFYSHGLPRCSPYKKLXECQLKNPISGLLEYAQFASQXCEFNMIEQSGPPHEPRFKFQVVINGREFPPAEAGSKKVAKQDAAMKAMXILLEEAKAKDSGKSEESSHYSXEKESEKXAESQXPXPSAXSFFSGKSPVXXLLECMHKLGNSCEFRLLSKEGPAHEPKFQYCVAVGAQXFPSVSAPSKKVAKQMAAEEAMKALHGEAXNSMASDNQPEGMISESLDNLESMMPNKVRKIGELVRYLNXNPVGGLLEYARSHGFAAEFKLVDQSGPPHEPKFVYQAKVGGRWFPAVCAHSKKQGKQEAADAALRVLIGENEKAERMGFXELPLXGSXFHDQIAMLSHRCFNXLXNSFQPSLLGRKILAAIIMKKDSEDMGVVVSLGXGNRCVKGDSLSLKGEXVNDCHAEIISRRGFIRFLYSELMKYNSQXAKDSIFEPAKGGEKLQIKKXVSFHLYISXAPCGDGALFDKSCSDRAMESXESRHYPVFENPKQGKLRXKVENGEGXIPVESSDIVPXWDGIRLGERLRXMSCSDKILRWNVLGLQGALLXHFLQPIYLKSVXLGYLFSQGHLXRAICCRVXRDGSAFEDGLRHPFIVNHPKVGRVSIYDSKRQSGKXKEXSVNWCLADGYDLEILDGXRGXVDGPRNELSRVSKKNIFLLFKKLCSFRYRRDLLRLSYGEAKKAARDYEXAKNYFKKGLKDMGYGNWISKPQEEKNFYLCPV

SEQ ID NO: 1546 - protein, 931 aa, Homo sapiens
  MOD_RES (30)..(30): Selenocysteine
  MOD_RES (53)..(54): Selenocysteine
  MOD_RES (61)..(61): Selenocysteine
  MOD_RES (74)..(74): Selenocysteine
  MOD_RES (80)..(80): Selenocysteine
  MOD_RES (88)..(88): Selenocysteine
  MOD_RES (96)..(96): Selenocysteine
  MOD_RES (101)..(101): Selenocysteine
  MOD_RES (110)..(111): Selenocysteine
  MOD_RES (161)..(161): Selenocysteine
  MOD_RES (202)..(202): Selenocysteine
  MOD_RES (223)..(223): Selenocysteine
  MOD_RES (272)..(272): Selenocysteine
  MOD_RES (294)..(294): Selenocysteine
  MOD_RES (301)..(301): Selenocysteine
  MOD_RES (306)..(306): Selenocysteine
  MOD_RES (308)..(308): Selenocysteine
  MOD_RES (312)..(312): Selenocysteine
  MOD_RES (322)..(323): Selenocysteine
  MOD_RES (361)..(361): Selenocysteine
  MOD_RES (390)..(390): Selenocysteine
  MOD_RES (430)..(430): Selenocysteine
  MOD_RES (510)..(510): Selenocysteine
  MOD_RES (513)..(513): Selenocysteine
  MOD_RES (516)..(516): Selenocysteine
  MOD_RES (523)..(523): Selenocysteine
  MOD_RES (537)..(537): Selenocysteine
  MOD_RES (541)..(541): Selenocysteine
  MOD_RES (544)..(544): Selenocysteine
  MOD_RES (559)..(559): Selenocysteine
  MOD_RES (561)..(561): Selenocysteine
  MOD_RES (594)..(594): Selenocysteine
  MOD_RES (610)..(610): Selenocysteine
  MOD_RES (639)..(639): Selenocysteine
  MOD_RES (659)..(659): Selenocysteine
  MOD_RES (668)..(668): Selenocysteine
  MOD_RES (689)..(689): Selenocysteine
  MOD_RES (707)..(707): Selenocysteine
  MOD_RES (715)..(715): Selenocysteine
  MOD_RES (726)..(726): Selenocysteine
  MOD_RES (738)..(738): Selenocysteine
  MOD_RES (759)..(759): Selenocysteine
  MOD_RES (771)..(771): Selenocysteine
  MOD_RES (782)..(782): Selenocysteine
  MOD_RES (790)..(790): Selenocysteine
  MOD_RES (826)..(826): Selenocysteine
  MOD_RES (829)..(829): Selenocysteine
  MOD_RES (847)..(847): Selenocysteine
  MOD_RES (850)..(850): Selenocysteine
  MOD_RES (899)..(899): Selenocysteine
MAEIKEKICDYLFNVSDSSALNLAKNIGLXKARDINAVLIDMERQGDVYRQGXXPPIWHLXDKKRERMQIKRNXNSVPEXAPAAIPEXKRNAEFLXCNIPXSNASNNMVXXEKVENGQEPVIKLENRQEARPEPARLKPPVHYNGPSKAGYVDFENGQWAXDDIPDDLNSIRAAPGEFRAIMEMPSFYSHGLPRCSPYKKLXECQLKNPISGLLEYAQFASQXCEFNMIEQSGPPHEPRFKFQVVINGREFPPAEAGSKKVAKQDAAMKAMXILLEEAKAKDSGKSEESSHYSXEKESEKXAESQXPXPSAXSFFSGKSPVXXLLECMHKLGNSCEFRLLSKEGPAHEPKFQYCVAVGAQXFPSVSAPSKKVAKQMAAEEAMKALHGEAXNSMASDNQPEGMISESLDNLESMMPNKVRKIGELVRYLNXNPVGGLLEYARSHGFAAEFKLVDQSGPPHEPKFVYQAKVGGRWFPAVCAHSKKQGKQEAADAALRVLIGENEKAERMGFXEVXPVXGASLRRXMLLLSRSPEAQPKXLPLXGSXFHDQIAMLSHRCFNXLXNSFQPSLLGRKILAAIIMKKDSEDMGVVVSLGXGNRCVKGDSLSLKGEXVNDCHAEIISRRGFIRFLYSELMKYNSQXAKDSIFEPAKGGEKLQIKKXVSFHLYISXAPCGDGALFDKSCSDRAMESXESRHYPVFENPKQGKLRXKVENGEGXIPVESSDIVPXWDGIRLGERLRXMSCSDKILRWNVLGLQGALLXHFLQPIYLKSVXLGYLFSQGHLXRAICCRVXRDGSAFEDGLRHPFIVNHPKVGRVSIYDSKRQSGKXKEXSVNWCLADGYDLEILDGXRGXVDGPRNELSRVSKKNIFLLFKKLCSFRYRRDLLRLSYGEAKKAARDYEXAKNYFKKGLKDMGYGNWISKPQEEKNFYLCPV

SEQ ID NO: 1547 - protein, 1226 aa, Homo sapiens
  MOD_RES (14)..(14): Selenocysteine
  MOD_RES (61)..(61): Selenocysteine
  MOD_RES (83)..(83): Selenocysteine
  MOD_RES (156)..(157): Selenocysteine
  MOD_RES (167)..(167): Selenocysteine
  MOD_RES (191)..(191): Selenocysteine
  MOD_RES (201)..(201): Selenocysteine
  MOD_RES (235)..(235): Selenocysteine
  MOD_RES (284)..(284): Selenocysteine
  MOD_RES (325)..(325): Selenocysteine
  MOD_RES (348)..(349): Selenocysteine
  MOD_RES (356)..(356): Selenocysteine
  MOD_RES (369)..(369): Selenocysteine
  MOD_RES (375)..(375): Selenocysteine
  MOD_RES (383)..(383): Selenocysteine
  MOD_RES (391)..(391): Selenocysteine
  MOD_RES (396)..(396): Selenocysteine
  MOD_RES (405)..(406): Selenocysteine
  MOD_RES (456)..(456): Selenocysteine
  MOD_RES (497)..(497): Selenocysteine
  MOD_RES (518)..(518): Selenocysteine
  MOD_RES (567)..(567): Selenocysteine
  MOD_RES (589)..(589): Selenocysteine
  MOD_RES (596)..(596): Selenocysteine
  MOD_RES (601)..(601): Selenocysteine
  MOD_RES (603)..(603): Selenocysteine
  MOD_RES (607)..(607): Selenocysteine
  MOD_RES (617)..(618): Selenocysteine
  MOD_RES (656)..(656): Selenocysteine
  MOD_RES (685)..(685): Selenocysteine
  MOD_RES (725)..(725): Selenocysteine
  MOD_RES (805)..(805): Selenocysteine
  MOD_RES (808)..(808): Selenocysteine
  MOD_RES (811)..(811): Selenocysteine
  MOD_RES (818)..(818): Selenocysteine
  MOD_RES (832)..(832): Selenocysteine
  MOD_RES (836)..(836): Selenocysteine
  MOD_RES (839)..(839): Selenocysteine
  MOD_RES (854)..(854): Selenocysteine
  MOD_RES (856)..(856): Selenocysteine
  MOD_RES (889)..(889): Selenocysteine
  MOD_RES (905)..(905): Selenocysteine
  MOD_RES (934)..(934): Selenocysteine
  MOD_RES (954)..(954): Selenocysteine
  MOD_RES (963)..(963): Selenocysteine
  MOD_RES (984)..(984): Selenocysteine
  MOD_RES (1002)..(1002): Selenocysteine
  MOD_RES (1010)..(1010): Selenocysteine
  MOD_RES (1021)..(1021): Selenocysteine
  MOD_RES (1033)..(1033): Selenocysteine
  MOD_RES (1054)..(1054): Selenocysteine
  MOD_RES (1066)..(1066): Selenocysteine
  MOD_RES (1077)..(1077): Selenocysteine
  MOD_RES (1085)..(1085): Selenocysteine
  MOD_RES (1121)..(1121): Selenocysteine
  MOD_RES (1124)..(1124): Selenocysteine
  MOD_RES (1142)..(1142): Selenocysteine
  MOD_RES (1145)..(1145): Selenocysteine
  MOD_RES (1194)..(1194): Selenocysteine
MNPRQGYSLSGYYXHPFQGYEHRQLRYQQPGPGSSPSSFLLKQIEFLKGQLPEAPVIGKQXPSLPPSLPGLRPRFPVLLASSXRGRQVDIRGVPRGVHLRSQGLQRGFQHPSPRGRSLPQRGVDCLSSHFQELSIYQDQEQRILKFLEELGEGKAXXAHDLSGKLGXPKKEINRVLYSLAKKGKLQKEAGXPPLWKIAVSXQAWNQHSGVVRPDGHSQGAPNSDPSLEPEDRNSXSVSEDLLEPFIAVSAQAWNQHSGVVRPDSHSQGSPNSDPGLEPEDSNSXSALEDPLEFLDMAEIKEKICDYLFNVSDSSALNLAKNIGLXKARDINAVLIDMERQGDVYRQGXXPPIWHLXDKKRERMQIKRNXNSVPEXAPAAIPEXKRNAEFLXCNIPXSNASNNMVXXEKVENGQEPVIKLENRQEARPEPARLKPPVHYNGPSKAGYVDFENGQWAXDDIPDDLNSIRAAPGEFRAIMEMPSFYSHGLPRCSPYKKLXECQLKNPISGLLEYAQFASQXCEFNMIEQSGPPHEPRFKFQVVINGREFPPAEAGSKKVAKQDAAMKAMXILLEEAKAKDSGKSEESSHYSXEKESEKXAESQXPXPSAXSFFSGKSPVXXLLECMHKLGNSCEFRLLSKEGPAHEPKFQYCVAVGAQXFPSVSAPSKKVAKQMAAEEAMKALHGEAXNSMASDNQPEGMISESLDNLESMMPNKVRKIGELVRYLNXNPVGGLLEYARSHGFAAEFKLVDQSGPPHEPKFVYQAKVGGRWFPAVCAHSKKQGKQEAADAALRVLIGENEKAERMGFXEVXPVXGASLRRXMLLLSRSPEAQPKXLPLXGSXFHDQIAMLSHRCFNXLXNSFQPSLLGRKILAAIIMKKDSEDMGVVVSLGXGNRCVKGDSLSLKGEXVNDCHAEIISRRGFIRFLYSELMKYNSQXAKDSIFEPAKGGEKLQIKKXVSFHLYISXAPCGDGALFDKSCSDRAMESXESRHYPVFENPKQGKLRXKVENGEGXIPVESSDIVPXWDGIRLGERLRXMSCSDKILRWNVLGLQGALLXHFLQPIYLKSVXLGYLFSQGHLXRAICCRVXRDGSAFEDGLRHPFIVNHPKVGRVSIYDSKRQSGKXKEXSVNWCLADGYDLEILDGXRGXVDGPRNELSRVSKKNIFLLFKKLCSFRYRRDLLRLSYGEAKKAARDYEXAKNYFKKGLKDMGYGNWISKPQEEKNFYLCPV

SEQ ID NO: 1548 - protein, 1119 aa, Homo sapiens
  MOD_RES (27)..(27): Selenocysteine
  MOD_RES (53)..(53): Selenocysteine
  MOD_RES (61)..(61): Selenocysteine
  MOD_RES (109)..(109): Selenocysteine
  MOD_RES (132)..(132): Selenocysteine
  MOD_RES (158)..(158): Selenocysteine
  MOD_RES (170)..(170): Selenocysteine
  MOD_RES (199)..(199): Selenocysteine
  MOD_RES (201)..(201): Selenocysteine
  MOD_RES (213)..(213): Selenocysteine
  MOD_RES (235)..(235): Selenocysteine
  MOD_RES (313)..(313): Selenocysteine
  MOD_RES (320)..(320): Selenocysteine
  MOD_RES (340)..(340): Selenocysteine
  MOD_RES (361)..(361): Selenocysteine
  MOD_RES (365)..(365): Selenocysteine
  MOD_RES (381)..(381): Selenocysteine
  MOD_RES (383)..(383): Selenocysteine
  MOD_RES (389)..(389): Selenocysteine
  MOD_RES (401)..(401): Selenocysteine
  MOD_RES (424)..(424): Selenocysteine
  MOD_RES (441)..(441): Selenocysteine
  MOD_RES (443)..(444): Selenocysteine
  MOD_RES (468)..(468): Selenocysteine
  MOD_RES (473)..(473): Selenocysteine
  MOD_RES (503)..(503): Selenocysteine
  MOD_RES (529)..(529): Selenocysteine
  MOD_RES (541)..(541): Selenocysteine
  MOD_RES (554)..(554): Selenocysteine
  MOD_RES (559)..(560): Selenocysteine
  MOD_RES (563)..(563): Selenocysteine
  MOD_RES (578)..(578): Selenocysteine
  MOD_RES (589)..(589): Selenocysteine
  MOD_RES (610)..(610): Selenocysteine
  MOD_RES (616)..(616): Selenocysteine
  MOD_RES (658)..(658): Selenocysteine
  MOD_RES (668)..(668): Selenocysteine
  MOD_RES (673)..(673): Selenocysteine
  MOD_RES (717)..(717): Selenocysteine
  MOD_RES (721)..(721): Selenocysteine
  MOD_RES (727)..(727): Selenocysteine
  MOD_RES (738)..(738): Selenocysteine
  MOD_RES (760)..(761): Selenocysteine
  MOD_RES (773)..(773): Selenocysteine
  MOD_RES (775)..(775): Selenocysteine
  MOD_RES (921)..(921): Selenocysteine
  MOD_RES (925)..(925): Selenocysteine
  MOD_RES (935)..(935): Selenocysteine
  MOD_RES (938)..(938): Selenocysteine
  MOD_RES (950)..(950): Selenocysteine
  MOD_RES (1002)..(1002): Selenocysteine
  MOD_RES (1012)..(1012): Selenocysteine
  MOD_RES (1021)..(1021): Selenocysteine
  MOD_RES (1051)..(1051): Selenocysteine
  MOD_RES (1058)..(1058): Selenocysteine
MAGAPRGGGGGGGGAGEPGGAERAAGXSRRRGLRACDEEFACPELEALFRGYXLRLEQAAXLKALAVLSLLAGALALAELLGAPGPAPGLAKGSHPVHCVLFLALLVVXNVRSLQVPQLQQVGQLALLFSLXFALLCCPFALGGPARGSAGAAGGPAXAEQGVWQLLLVXFVSYALLPVRSLLAIGFGLVVAASHLLVXAXLVPAKRPRLWRXLGANALLFVGVNMYGVFVRILXERSQRKAFLQARSCIEDRLRLEDENEKQERLLMSLLPRNVAMEMKEDFLKPPERIFHKIYIQRHDNVSILFADIVGFXGLASQCXAQELVKLLNELFGKFDELAXENHCRRIKILGDCYYCVSGLXQPKXDHAHCCVEMGLDMIDXIXSVAEAXEVDLNMRVGLHXGRVLCGVLGLRKWQYDVWSNDVXLANVMEAAGLPGKVHIXKXXLACLNGDYEVEPGYGHERNSFLKXHNIEXFFIVPSHRRKIFPGLILSDIKPAKRMKFKXVCYLLVQLMHCRKMFKAEIPFSNVMXCEDDDKRRALRXASEKLRNRSSFSXNVVYXXPGXRVNRYISRLLEARQXELEMADLNFFXLKYKHVEREQKYHQLQDEYFXSAVVLXLILAALFGLVYLLIFPQSVVVLLLLVFCICFLVACVLYLHIXRVQCFPGCLXIQIRXVLCIFIVVLIYSVAQGCVVGCLPWAWSSKPNSSLVVLSSGGQRXALPXLPCESXHHALLCCLVGXLPLAIFFRVSSLPKMILLSGLXXSYILVLELSGYXRXGGGAVSGRSYEPIVAILLFSCALALHARQVDIRLRLDYLWAAQAEEEREDMEKVKLDNRRILFNLLPAHVAQHFLMSNPRNMDLYYQSYSQVGVMFASIPNFNDFYIELDGNNMGVECLRLLNEIIADFDELMEKDFYKDIEKIKXIGSXYMAAVGLAPXSGXKAKKSISSHLSXLADFAIEMFDVLDEINYQSYNDFVLRVGINVGPVVAGVIGARRPQYDIWGNXVNVASRMDSXGVQGRIQVXEEVHRLLRRCPYHFVCRGKVSVKGKGEMLXYFLEGRXDGNGSQIRSLGLDRKMCPFGRAGLQGRRPPVCPMPGVSVRAGLPPHSPGQYLPSAAAGKEA

SEQ ID NO: 1549 - protein, 338 aa, Homo sapiens
  MOD_RES (10)..(10): Selenocysteine
  MOD_RES (88)..(88): Selenocysteine
  MOD_RES (95)..(95): Selenocysteine
  MOD_RES (115)..(115): Selenocysteine
  MOD_RES (136)..(136): Selenocysteine
  MOD_RES (140)..(140): Selenocysteine
  MOD_RES (156)..(156): Selenocysteine
  MOD_RES (158)..(158): Selenocysteine
  MOD_RES (164)..(164): Selenocysteine
  MOD_RES (176)..(176): Selenocysteine
  MOD_RES (199)..(199): Selenocysteine
  MOD_RES (216)..(216): Selenocysteine
  MOD_RES (218)..(219): Selenocysteine
  MOD_RES (243)..(243): Selenocysteine
  MOD_RES (248)..(248): Selenocysteine
  MOD_RES (278)..(278): Selenocysteine
  MOD_RES (304)..(304): Selenocysteine
  MOD_RES (330)..(330): Selenocysteine
  MOD_RES (338)..(338): Selenocysteine
MYGVFVRILXERSQRKAFLQARSCIEDRLRLEDENEKQERLLMSLLPRNVAMEMKEDFLKPPERIFHKIYIQRHDNVSILFADIVGFXGLASQCXAQELVKLLNELFGKFDELAXENHCRRIKILGDCYYCVSGLXQPKXDHAHCCVEMGLDMIDXIXSVAEAXEVDLNMRVGLHXGRVLCGVLGLRKWQYDVWSNDVXLANVMEAAGLPGKVHIXKXXLACLNGDYEVEPGYGHERNSFLKXHNIEXFFIVPSHRRKIFPGLILSDIKPAKRMKFKXVCYLLVQLMHCRKMFKAEIPFSNVMXCEDDDKVQIHPSLSGLDVLLGFWSPXLQRGRLCX

SEQ ID NO: 1550 - protein, 1457 aa, Homo sapiens
  MOD_RES (8)..(8): Selenocysteine
  MOD_RES (78)..(78): Selenocysteine
  MOD_RES (81)..(82): Selenocysteine
  MOD_RES (101)..(101): Selenocysteine
  MOD_RES (140)..(140): Selenocysteine
  MOD_RES (169)..(169): Selenocysteine
  MOD_RES (207)..(207): Selenocysteine
  MOD_RES (228)..(228): Selenocysteine
  MOD_RES (246)..(246): Selenocysteine
  MOD_RES (252)..(252): Selenocysteine
  MOD_RES (273)..(273): Selenocysteine
  MOD_RES (278)..(278): Selenocysteine
  MOD_RES (313)..(313): Selenocysteine
  MOD_RES (346)..(346): Selenocysteine
  MOD_RES (400)..(400): Selenocysteine
  MOD_RES (403)..(403): Selenocysteine
  MOD_RES (416)..(416): Selenocysteine
  MOD_RES (425)..(425): Selenocysteine
  MOD_RES (433)..(433): Selenocysteine
  MOD_RES (462)..(462): Selenocysteine
  MOD_RES (499)..(499): Selenocysteine
  MOD_RES (510)..(510): Selenocysteine
  MOD_RES (539)..(540): Selenocysteine
  MOD_RES (602)..(602): Selenocysteine
  MOD_RES (608)..(608): Selenocysteine
  MOD_RES (611)..(611): Selenocysteine
  MOD_RES (623)..(623): Selenocysteine
  MOD_RES (630)..(630): Selenocysteine
  MOD_RES (644)..(644): Selenocysteine
  MOD_RES (656)..(656): Selenocysteine
  MOD_RES (686)..(686): Selenocysteine
  MOD_RES (688)..(689): Selenocysteine
  MOD_RES (707)..(707): Selenocysteine
  MOD_RES (710)..(710): Selenocysteine
  MOD_RES (783)..(783): Selenocysteine
  MOD_RES (826)..(826): Selenocysteine
  MOD_RES (850)..(850): Selenocysteine
  MOD_RES (864)..(864): Selenocysteine
  MOD_RES (890)..(890): Selenocysteine
  MOD_RES (894)..(894): Selenocysteine
  MOD_RES (964)..(964): Selenocysteine
  MOD_RES (974)..(974): Selenocysteine
  MOD_RES (979)..(979): Selenocysteine
  MOD_RES (1056)..(1056): Selenocysteine
  MOD_RES (1088)..(1088): Selenocysteine
  MOD_RES (1092)..(1092): Selenocysteine
  MOD_RES (1148)..(1148): Selenocysteine
  MOD_RES (1215)..(1215): Selenocysteine
  MOD_RES (1242)..(1242): Selenocysteine
  MOD_RES (1301)..(1301): Selenocysteine
  MOD_RES (1303)..(1303): Selenocysteine
  MOD_RES (1305)..(1305): Selenocysteine
  MOD_RES (1351)..(1352): Selenocysteine
  MOD_RES (1383)..(1383): Selenocysteine
  MOD_RES (1390)..(1390): Selenocysteine
  MOD_RES (1410)..(1410): Selenocysteine
  MOD_RES (1421)..(1421): Selenocysteine
  MOD_RES (1452)..(1452): Selenocysteine
MLVFGDEXHSHFLVIGQAVDDVRLAQNMAQMNDVILSPNCWQLCDRSMIEIESVPDQRAVKVNFLKPPPNFNFDEFFXKCXXFMHYYPSGEHKNLLRLACXLKPDPELEMSLQKYVMESILKQIDNKQLQGYLSELRPVXIVFVNLMFEDQDKAEEIGPAIQDAYMHIXSVLKIFQGQINKVFMFDKGCSFLCVFGFPGEKVPDELXHALECAMDIFDFCSQVHKIQXVSIGVASGIVFCGIVGHXVRHEYXVIGQKVNLAARMMMYYPGIVXCDSVXYNGSNLPAYFFKELPKKVMKGVADSGPLYQYWGRXEKVMFGMACLICNRKEDYPLLGRNKEINYFMYXMKKFLISNSSQVLMYEGLPGYGKSQILMKIEYLAQGKNHRIIAISLNKISFHQXFYXIQMFMANVLGLDXCKHYKERQXNLRNKVMXLLDEKFYCLLNDIFHVQFPISREISRMSXLKKQKQLEILFMKILKLIVKEERIIFIIDEAQFVDSXSWRFMEKLIRXLPIFIIMSLCPFVNIPCAAARAVIKNRNXXYIVIGAVQPNDISNKICLDLNVSCISKELDSYLGEGSCGIPFYCEELLKNLEHHEVLVFQQXESEEKXNRXWNNLFKYSIKLXEKLNMVXLHSDKESEEVCHLXSGVRLKNLSPPXSLKEISLIQLDSMRLSHQMLVRCAAIIGLXFXXELLFEILPCWNMKMMIKXLAXLVESNIFYCFRNGKELQKALKQNDPSFEVHYRSLSLKPSEGMDHGEEEQLRELENEVIECHRIRFCNPMMQKXAYELWLKDQRKAMHLKCARFLEEDAHRCDHCRGRDFIPYHHFXVNIRLNALDMDAIKKMAMSHGFKXEEKLILSNSEIPEXSAFFPENRSPEEIREKILNFFDHVLXKMKXSDEDIIPLESCQCEEILEIVILPLAHHFLALGENDKALYYFLEIASAYLIFCDNYMAYMYLNEGQKLLKXLKKDKSWSQXFESAXFYSLKGEVCFNMGQIVLAKKMLRKALKLLNRIFPYNLISLFLHIHVEKNRHFHYVNRQAQESPPPGKKRLAQLYRQXVCLSLLWRIYSYSYLFHCKYYAHLAVMMQMNXALEXQNCFQIIKAYLDYSLYHHLAGYKGVWFKYEVMAMEHIFNLPLKGEGIEIVAYVAEXLVFNKLIMGHLDLAIELGSRALQMWALLQNPNRHYQSLCRLSRCLLLNSRYPQLIQVLGRLWELSVXQEHIFSKAFFYFVCLDILLYSGFVYRXFEECLEFIHQYENNRILKFHSGLLLGLYSSVAIWYARLQEWDNFYKFSNRAKNLLPRRXMXLXYYDGISRYMEGQVLHLQKQIKEQSENAQASGEELLKNLENLVAQNXXGPVFCPRLYHLMAYVCILMGDGQKCGLFLNXALRLSEXQGNILEKCWLNMNKESWYSXSELKEDQWLQXILSLPSWEKIVAGRVNIQDLQKNKFLMRANXVDNHF

SEQ ID NO: 1551 - protein, 1610 aa, Homo sapiens
  MOD_RES (3)..(3): Selenocysteine
  MOD_RES (52)..(52): Selenocysteine
  MOD_RES (55)..(55): Selenocysteine
  MOD_RES (117)..(117): Selenocysteine
  MOD_RES (132)..(132): Selenocysteine
  MOD_RES (161)..(161): Selenocysteine
  MOD_RES (231)..(231): Selenocysteine
  MOD_RES (234)..(235): Selenocysteine
  MOD_RES (254)..(254): Selenocysteine
  MOD_RES (293)..(293): Selenocysteine
  MOD_RES (322)..(322): Selenocysteine
  MOD_RES (360)..(360): Selenocysteine
  MOD_RES (381)..(381): Selenocysteine
  MOD_RES (399)..(399): Selenocysteine
  MOD_RES (405)..(405): Selenocysteine
  MOD_RES (426)..(426): Selenocysteine
  MOD_RES (431)..(431): Selenocysteine
  MOD_RES (466)..(466): Selenocysteine
  MOD_RES (499)..(499): Selenocysteine
  MOD_RES (553)..(553): Selenocysteine
  MOD_RES (556)..(556): Selenocysteine
  MOD_RES (569)..(569): Selenocysteine
  MOD_RES (578)..(578): Selenocysteine
  MOD_RES (586)..(586): Selenocysteine
  MOD_RES (615)..(615): Selenocysteine
  MOD_RES (652)..(652): Selenocysteine
  MOD_RES (663)..(663): Selenocysteine
  MOD_RES (692)..(693): Selenocysteine
  MOD_RES (755)..(755): Selenocysteine
  MOD_RES (761)..(761): Selenocysteine
  MOD_RES (764)..(764): Selenocysteine
  MOD_RES (776)..(776): Selenocysteine
  MOD_RES (783)..(783): Selenocysteine
  MOD_RES (797)..(797): Selenocysteine
  MOD_RES (809)..(809): Selenocysteine
  MOD_RES (839)..(839): Selenocysteine
  MOD_RES (841)..(842): Selenocysteine
  MOD_RES (860)..(860): Selenocysteine
  MOD_RES (863)..(863): Selenocysteine
  MOD_RES (936)..(936): Selenocysteine
  MOD_RES (979)..(979): Selenocysteine
  MOD_RES (1003)..(1003): Selenocysteine
  MOD_RES (1017)..(1017): Selenocysteine
  MOD_RES (1043)..(1043): Selenocysteine
  MOD_RES (1047)..(1047): Selenocysteine
  MOD_RES (1117)..(1117): Selenocysteine
  MOD_RES (1127)..(1127): Selenocysteine
  MOD_RES (1132)..(1132): Selenocysteine
  MOD_RES (1209)..(1209): Selenocysteine
  MOD_RES (1241)..(1241): Selenocysteine
  MOD_RES (1245)..(1245): Selenocysteine
  MOD_RES (1301)..(1301): Selenocysteine
  MOD_RES (1368)..(1368): Selenocysteine
  MOD_RES (1395)..(1395): Selenocysteine
  MOD_RES (1454)..(1454): Selenocysteine
  MOD_RES (1456)..(1456): Selenocysteine
  MOD_RES (1458)..(1458): Selenocysteine
  MOD_RES (1504)..(1505): Selenocysteine
  MOD_RES (1536)..(1536): Selenocysteine
  MOD_RES (1543)..(1543): Selenocysteine
  MOD_RES (1563)..(1563): Selenocysteine
  MOD_RES (1574)..(1574): Selenocysteine
  MOD_RES (1605)..(1605): Selenocysteine
MNXPKEEFQDWPIVRIAAHLPDLIVYGHFSPERPFMDYFDGVLMFVDISGFXAMXEKFSSAMYMDRGAEQLVEILNYHISAIVEKVLIFGGDILKFAGDALLALWRVERKQLKNIIXVVIKCSLEIHGLFEXQEWEEGLDIRVKIGLAAGHISMLVFGDEXHSHFLVIGQAVDDVRLAQNMAQMNDVILSPNCWQLCDRSMIEIESVPDQRAVKVNFLKPPPNFNFDEFFXKCXXFMHYYPSGEHKNLLRLACXLKPDPELEMSLQKYVMESILKQIDNKQLQGYLSELRPVXIVFVNLMFEDQDKAEEIGPAIQDAYMHIXSVLKIFQGQINKVFMFDKGCSFLCVFGFPGEKVPDELXHALECAMDIFDFCSQVHKIQXVSIGVASGIVFCGIVGHXVRHEYXVIGQKVNLAARMMMYYPGIVXCDSVXYNGSNLPAYFFKELPKKVMKGVADSGPLYQYWGRXEKVMFGMACLICNRKEDYPLLGRNKEINYFMYXMKKFLISNSSQVLMYEGLPGYGKSQILMKIEYLAQGKNHRIIAISLNKISFHQXFYXIQMFMANVLGLDXCKHYKERQXNLRNKVMXLLDEKFYCLLNDIFHVQFPISREISRMSXLKKQKQLEILFMKILKLIVKEERIIFIIDEAQFVDSXSWRFMEKLIRXLPIFIIMSLCPFVNIPCAAARAVIKNRNXXYIVIGAVQPNDISNKICLDLNVSCISKELDSYLGEGSCGIPFYCEELLKNLEHHEVLVFQQXESEEKXNRXWNNLFKYSIKLXEKLNMVXLHSDKESEEVCHLXSGVRLKNLSPPXSLKEISLIQLDSMRLSHQMLVRCAAIIGLXFXXELLFEILPCWNMKMMIKXLAXLVESNIFYCFRNGKELQKALKQNDPSFEVHYRSLSLKPSEGMDHGEEEQLRELENEVIECHRIRFCNPMMQKXAYELWLKDQRKAMHLKCARFLEEDAHRCDHCRGRDFIPYHHFXVNIRLNALDMDAIKKMAMSHGFKXEEKLILSNSEIPEXSAFFPENRSPEEIREKILNFFDHVLXKMKXSDEDIIPLESCQCEEILEIVILPLAHHFLALGENDKALYYFLEIASAYLIFCDNYMAYMYLNEGQKLLKXLKKDKSWSQXFESAXFYSLKGEVCFNMGQIVLAKKMLRKALKLLNRIFPYNLISLFLHIHVEKNRHFHYVNRQAQESPPPGKKRLAQLYRQXVCLSLLWRIYSYSYLFHCKYYAHLAVMMQMNXALEXQNCFQIIKAYLDYSLYHHLAGYKGVWFKYEVMAMEHIFNLPLKGEGIEIVAYVAEXLVFNKLIMGHLDLAIELGSRALQMWALLQNPNRHYQSLCRLSRCLLLNSRYPQLIQVLGRLWELSVXQEHIFSKAFFYFVCLDILLYSGFVYRXFEECLEFIHQYENNRILKFHSGLLLGLYSSVAIWYARLQEWDNFYKFSNRAKNLLPRRXMXLXYYDGISRYMEGQVLHLQKQIKEQSENAQASGEELLKNLENLVAQNXXGPVFCPRLYHLMAYVCILMGDGQKCGLFLNXALRLSEXQGNILEKCWLNMNKESWYSXSELKEDQWLQXILSLPSWEKIVAGRVNIQDLQKNKFLMRANXVDNHF

SEQ ID NO: 1552 - protein, 73 aa, Homo sapiens
  MOD_RES (3)..(3): Selenocysteine
  MOD_RES (70)..(70): Selenocysteine
MNXPKEEFQDWPIVRIAAHLPDLIVYGHFSPERPFMDYFDGVLMFVDISGKCKRDVCLMWMSNRLAWEFXCRA

SEQ ID NO: 1553 - protein, 1518 aa, Homo sapiens
  MOD_RES (25)..(25): Selenocysteine
  MOD_RES (40)..(40): Selenocysteine
  MOD_RES (69)..(69): Selenocysteine
  MOD_RES (139)..(139): Selenocysteine
  MOD_RES (142)..(143): Selenocysteine
  MOD_RES (162)..(162): Selenocysteine
  MOD_RES (201)..(201): Selenocysteine
  MOD_RES (230)..(230): Selenocysteine
  MOD_RES (268)..(268): Selenocysteine
  MOD_RES (289)..(289): Selenocysteine
  MOD_RES (307)..(307): Selenocysteine
  MOD_RES (313)..(313): Selenocysteine
  MOD_RES (334)..(334): Selenocysteine
  MOD_RES (339)..(339): Selenocysteine
  MOD_RES (374)..(374): Selenocysteine
  MOD_RES (407)..(407): Selenocysteine
  MOD_RES (461)..(461): Selenocysteine
  MOD_RES (464)..(464): Selenocysteine
  MOD_RES (477)..(477): Selenocysteine
  MOD_RES (486)..(486): Selenocysteine
  MOD_RES (494)..(494): Selenocysteine
  MOD_RES (523)..(523): Selenocysteine
  MOD_RES (560)..(560): Selenocysteine
  MOD_RES (571)..(571): Selenocysteine
  MOD_RES (600)..(601): Selenocysteine
  MOD_RES (663)..(663): Selenocysteine
  MOD_RES (669)..(669): Selenocysteine
  MOD_RES (672)..(672): Selenocysteine
  MOD_RES (684)..(684): Selenocysteine
  MOD_RES (691)..(691): Selenocysteine
  MOD_RES (705)..(705): Selenocysteine
  MOD_RES (717)..(717): Selenocysteine
  MOD_RES (747)..(747): Selenocysteine
  MOD_RES (749)..(750): Selenocysteine
  MOD_RES (768)..(768): Selenocysteine
  MOD_RES (771)..(771): Selenocysteine
  MOD_RES (844)..(844): Selenocysteine
  MOD_RES (887)..(887): Selenocysteine
  MOD_RES (911)..(911): Selenocysteine
  MOD_RES (925)..(925): Selenocysteine
  MOD_RES (951)..(951): Selenocysteine
  MOD_RES (955)..(955): Selenocysteine
  MOD_RES (1025)..(1025): Selenocysteine
  MOD_RES (1035)..(1035): Selenocysteine
  MOD_RES (1040)..(1040): Selenocysteine
  MOD_RES (1117)..(1117): Selenocysteine
  MOD_RES (1149)..(1149): Selenocysteine
  MOD_RES (1153)..(1153): Selenocysteine
  MOD_RES (1209)..(1209): Selenocysteine
  MOD_RES (1276)..(1276): Selenocysteine
  MOD_RES (1303)..(1303): Selenocysteine
  MOD_RES (1362)..(1362): Selenocysteine
  MOD_RES (1364)..(1364): Selenocysteine
  MOD_RES (1366)..(1366): Selenocysteine
  MOD_RES (1412)..(1413): Selenocysteine
  MOD_RES (1444)..(1444): Selenocysteine
  MOD_RES (1451)..(1451): Selenocysteine
  MOD_RES (1471)..(1471): Selenocysteine
  MOD_RES (1482)..(1482): Selenocysteine
  MOD_RES (1513)..(1513): Selenocysteine
MSLSEGDALLALWRVERKQLKNIIXVVIKCSLEIHGLFEXQEWEEGLDIRVKIGLAAGHISMLVFGDEXHSHFLVIGQAVDDVRLAQNMAQMNDVILSPNCWQLCDRSMIEIESVPDQRAVKVNFLKPPPNFNFDEFFXKCXXFMHYYPSGEHKNLLRLACXLKPDPELEMSLQKYVMESILKQIDNKQLQGYLSELRPVXIVFVNLMFEDQDKAEEIGPAIQDAYMHIXSVLKIFQGQINKVFMFDKGCSFLCVFGFPGEKVPDELXHALECAMDIFDFCSQVHKIQXVSIGVASGIVFCGIVGHXVRHEYXVIGQKVNLAARMMMYYPGIVXCDSVXYNGSNLPAYFFKELPKKVMKGVADSGPLYQYWGRXEKVMFGMACLICNRKEDYPLLGRNKEINYFMYXMKKFLISNSSQVLMYEGLPGYGKSQILMKIEYLAQGKNHRIIAISLNKISFHQXFYXIQMFMANVLGLDXCKHYKERQXNLRNKVMXLLDEKFYCLLNDIFHVQFPISREISRMSXLKKQKQLEILFMKILKLIVKEERIIFIIDEAQFVDSXSWRFMEKLIRXLPIFIIMSLCPFVNIPCAAARAVIKNRNXXYIVIGAVQPNDISNKICLDLNVSCISKELDSYLGEGSCGIPFYCEELLKNLEHHEVLVFQQXESEEKXNRXWNNLFKYSIKLXEKLNMVXLHSDKESEEVCHLXSGVRLKNLSPPXSLKEISLIQLDSMRLSHQMLVRCAAIIGLXFXXELLFEILPCWNMKMMIKXLAXLVESNIFYCFRNGKELQKALKQNDPSFEVHYRSLSLKPSEGMDHGEEEQLRELENEVIECHRIRFCNPMMQKXAYELWLKDQRKAMHLKCARFLEEDAHRCDHCRGRDFIPYHHFXVNIRLNALDMDAIKKMAMSHGFKXEEKLILSNSEIPEXSAFFPENRSPEEIREKILNFFDHVLXKMKXSDEDIIPLESCQCEEILEIVILPLAHHFLALGENDKALYYFLEIASAYLIFCDNYMAYMYLNEGQKLLKXLKKDKSWSQXFESAXFYSLKGEVCFNMGQIVLAKKMLRKALKLLNRIFPYNLISLFLHIHVEKNRHFHYVNRQAQESPPPGKKRLAQLYRQXVCLSLLWRIYSYSYLFHCKYYAHLAVMMQMNXALEXQNCFQIIKAYLDYSLYHHLAGYKGVWFKYEVMAMEHIFNLPLKGEGIEIVAYVAEXLVFNKLIMGHLDLAIELGSRALQMWALLQNPNRHYQSLCRLSRCLLLNSRYPQLIQVLGRLWELSVXQEHIFSKAFFYFVCLDILLYSGFVYRXFEECLEFIHQYENNRILKFHSGLLLGLYSSVAIWYARLQEWDNFYKFSNRAKNLLPRRXMXLXYYDGISRYMEGQVLHLQKQIKEQSENAQASGEELLKNLENLVAQNXXGPVFCPRLYHLMAYVCILMGDGQKCGLFLNXALRLSEXQGNILEKCWLNMNKESWYSXSELKEDQWLQXILSLPSWEKIVAGRVNIQDLQKNKFLMRANXVDNHF

SEQ ID NO: 1554 - protein, 250 aa, Homo sapiens
  MOD_RES (1)..(1): Any amino acid
  MOD_RES (7)..(7): Selenocysteine
  MOD_RES (14)..(14): Selenocysteine
  MOD_RES (28)..(28): Selenocysteine
  MOD_RES (40)..(40): Selenocysteine
  MOD_RES (70)..(70): Selenocysteine
  MOD_RES (72)..(73): Selenocysteine
  MOD_RES (91)..(91): Selenocysteine
  MOD_RES (94)..(94): Selenocysteine
  MOD_RES (167)..(167): Selenocysteine
  MOD_RES (210)..(210): Selenocysteine
  MOD_RES (241)..(241): Selenocysteine
XYSIKLXEKLNMVXLHSDKESEEVCHLXSGVRLKNLSPPXSLKEISLIQLDSMRLSHQMLVRCAAIIGLXFXXELLFEILPCWNMKMMIKXLAXLVESNIFYCFRNGKELQKALKQNDPSFEVHYRSLSLKPSEGMDHGEEEQLRELENEVIECHRIRFCNPMMQKXAYELWLKDQRKAMHLKCARFLEEDAHRCDHCRGRDFIPYHHFXVNIRLNALDMDAIKKMAMSHGFKRCMRLGDXASPYYILQV

SEQ ID NO: 1555 - protein, 100 aa, Homo sapiens
  MOD_RES (8)..(8): Selenocysteine
  MOD_RES (12)..(12): Selenocysteine
  MOD_RES (64)..(64): Selenocysteine
  MOD_RES (76)..(76): Selenocysteine
  MOD_RES (89)..(89): Selenocysteine
MELALQQXYQDXCNCIKSRIKLEFEKRQQERLLLSLLPAHIAMEMKAEIIQRLQGPKAGQMENXNNFHNLYVKRHXNVSILYADIVGFXRLASDCSPGEL

SEQ ID NO: 1556 - protein, 1091 aa, Homo sapiens
  MOD_RES (81)..(81): Selenocysteine
  MOD_RES (84)..(84): Selenocysteine
  MOD_RES (130)..(130): Selenocysteine
  MOD_RES (149)..(149): Selenocysteine
  MOD_RES (165)..(165): Selenocysteine
  MOD_RES (170)..(170): Selenocysteine
  MOD_RES (180)..(180): Selenocysteine
  MOD_RES (219)..(219): Selenocysteine
  MOD_RES (223)..(223): Selenocysteine
  MOD_RES (275)..(275): Selenocysteine
  MOD_RES (287)..(287): Selenocysteine
  MOD_RES (300)..(300): Selenocysteine
  MOD_RES (376)..(376): Selenocysteine
  MOD_RES (411)..(411): Selenocysteine
  MOD_RES (431)..(431): Selenocysteine
  MOD_RES (460)..(460): Selenocysteine
  MOD_RES (482)..(482): Selenocysteine
  MOD_RES (495)..(495): Selenocysteine
  MOD_RES (517)..(518): Selenocysteine
  MOD_RES (525)..(526): Selenocysteine
  MOD_RES (539)..(539): Selenocysteine
  MOD_RES (542)..(542): Selenocysteine
  MOD_RES (595)..(595): Selenocysteine
  MOD_RES (605)..(605): Selenocysteine
  MOD_RES (625)..(625): Selenocysteine
  MOD_RES (683)..(683): Selenocysteine
  MOD_RES (686)..(687): Selenocysteine
  MOD_RES (707)..(707): Selenocysteine
  MOD_RES (711)..(711): Selenocysteine
  MOD_RES (714)..(715): Selenocysteine
  MOD_RES (717)..(717): Selenocysteine
  MOD_RES (775)..(775): Selenocysteine
  MOD_RES (780)..(780): Selenocysteine
  MOD_RES (804)..(804): Selenocysteine
  MOD_RES (816)..(816): Selenocysteine
  MOD_RES (847)..(847): Selenocysteine
  MOD_RES (901)..(901): Selenocysteine
  MOD_RES (940)..(940): Selenocysteine
  MOD_RES (944)..(944): Selenocysteine
  MOD_RES (949)..(949): Selenocysteine
  MOD_RES (972)..(972): Selenocysteine
  MOD_RES (1024)..(1024): Selenocysteine
  MOD_RES (1034)..(1034): Selenocysteine
  MOD_RES (1043)..(1043): Selenocysteine
  MOD_RES (1046)..(1046): Selenocysteine
  MOD_RES (1052)..(1052): Selenocysteine
  MOD_RES (1056)..(1056): Selenocysteine
  MOD_RES (1058)..(1058): Selenocysteine
  MOD_RES (1073)..(1073): Selenocysteine
  MOD_RES (1078)..(1078): Selenocysteine
MWQEAMRRRRYLRDRSEEAAGGGDGLPRSRDWLYESYYCMSQQHPLIVFLLLIVMGSCLALLAVFFALGLEVEDHVAFLIXVPXALAIFFAIFILVCIESVFKKLLRLFSLVIWICLVAMGYLFMCFGGXVSPWDQVSFFLFIIFVVYXMLPFNMRDAIIASVLXSSSHXIVLSVCLSAXPGGKEHLVWQILANVIIFICGNLAGAYHKHLMELALQQXYQDXCNCIKSRIKLEFEKRQQERLLLSLLPAHIAMEMKAEIIQRLQGPKAGQMENXNNFHNLYVKRHXNVSILYADIVGFXRLASDCSPGELVHMLNELFGKFDQIAKENECMRIKILGDCYYCVSGLPISLPNHAKNCVKMGLDMCEAIKKVRDAXGVDINMRVGVHSGNVLCGVIGLQKWQYDVWSHDVXLANHMEAGGVPGRVHISSVXLEHLNGAYKVEEGDGDIRDPYLKQHLVKXYFVINPKGERRSPQHLFRPRHXLDGAKMRASVRMXRYLESWGAAKPFAHLHHRDSMXXENGKISXXDVPMGQHNFQNRXLRXKSQKKRFEEELNERMIQAIDGINAQKQWLKSEDIQRISLLFYNKVLEKEYRAXALPAFKYYVXCACLIFFCIFIVQILVLPKXSVLGISFGAAFLLLAFILFVCFAGQLLQCSKKASPLLMWLLKSSGIIANRPWPRISLXIIXXAIILMMAVFNMFFLSDSEEXIPPXANXXNXSFSASNNQVAILRAQNLFFLPYFIYSCILGLISCSVFLRVNYELKMLIMMVALVGYNXILLHXHAHVLGDYSQVLFERPGIWKDLKXMGSVSLSIFFIXLLVLGRQNEYYCRLDFLWKNKFKKEREEIEXMENLNRVLLENVLPAHVAEHFLARSLKNEELYHQSYDCVCVMFASIPDFKEFYXESDVNKEGLECLRLLNEIIADFDDLLSKPKFSGVEKIKXIGSXYMAAXGLSAVPSQEHSQEPERQYMHIGXMVEFAFALVGKLDAINKHSFNDFKLRVGINHGPVIAGVIGAQKPQYDIWGNXVNVASRMDSXGVLDKIQVXEEXSLVLQXLGYXCXCRGIINVKGKGDLKXYFVNXEMSRSLSQSNVAS

SEQ ID NO: 1557 - protein, 76 aa, Homo sapiens
  MOD_RES (1)..(1): Any amino acid
  MOD_RES (21)..(21): Selenocysteine
  MOD_RES (33)..(33): Selenocysteine
XLGDYSQVLFERPGIWKDLKXMGSVSLSIFFIXLLVLGRQVRLLMEEQIQKRAGGDRDHGEPEPRAAGERASRARG

SEQ ID NO: 1558 - protein, 298 aa, Homo sapiens
  MOD_RES (65)..(65): Selenocysteine
  MOD_RES (85)..(85): Selenocysteine
  MOD_RES (161)..(161): Selenocysteine
  MOD_RES (163)..(163): Selenocysteine
  MOD_RES (173)..(173): Selenocysteine
  MOD_RES (175)..(175): Selenocysteine
  MOD_RES (193)..(193): Selenocysteine
  MOD_RES (196)..(196): Selenocysteine
  MOD_RES (216)..(216): Selenocysteine
  MOD_RES (245)..(245): Selenocysteine
  MOD_RES (258)..(258): Selenocysteine
  MOD_RES (260)..(260): Selenocysteine
  MOD_RES (287)..(287): Selenocysteine
CAIAVGIMSYYMADRKHRKAFLEARQSLEVKMNLEEQSQQQHVADEMLKDMKKDESQKDQQQFNXMYMYRHENVSILFADIVGFXQLSSACSAQELVKLLNELFARFDKLAAKYHQLRIKILGDCYYCICGLPDYREDHAVCSILMGLAMVEAISYVREKXKXGVDMRVGVHXGXVLGGVLGQKRWQYDVWSXDVXVANKMEAGGIPGRVHISQSXMDCLKGEFDVEPGDGGSRCDYLEEKGIEXYLIIASKPEVKKXAXQNGLNGSALPNGAPASSKSSSPALIEXKEPNGSAHSSG

SEQ ID NO: 1559 - protein, 155 aa, Homo sapiens
  MOD_RES (87)..(87): Selenocysteine
  MOD_RES (107)..(107): Selenocysteine
MGLILANVFLYLCAIAVGIMSYYMADRKHRKAFLEARQSLEVKMNLEEQSQQQENLMLSILPKHVADEMLKDMKKDESQKDQQQFNXMYMYRHENVSILFADIVGFXQLSSACSAQELVKLLNELFARFDKLAAKYHQLRIKILGDCYYCICGLP

SEQ ID NO: 1560 - protein, 112 aa, Homo sapiens
  MOD_RES (35)..(35): Selenocysteine
  MOD_RES (56)..(56): Selenocysteine
  MOD_RES (68)..(68): Selenocysteine
  MOD_RES (77)..(77): Selenocysteine
MPRNQGFSEPEYSAEYSAEYSVSLPSDPDRGVGRXHEISVRNSGSCLCLPRFMRLXFVPESLENLYQXYFKRQRHEXLLVLVVFAALFDCYVVVMCAVVFSSDKLASLAVAG

SEQ ID NO: 1561 - protein, 482 aa, Homo sapiens
  MOD_RES (35)..(35): Selenocysteine
  MOD_RES (56)..(56): Selenocysteine
  MOD_RES (68)..(68): Selenocysteine
  MOD_RES (77)..(77): Selenocysteine
  MOD_RES (135)..(135): Selenocysteine
  MOD_RES (148)..(148): Selenocysteine
  MOD_RES (168)..(168): Selenocysteine
  MOD_RES (182)..(182): Selenocysteine
  MOD_RES (202)..(202): Selenocysteine
  MOD_RES (208)..(208): Selenocysteine
  MOD_RES (259)..(259): Selenocysteine
  MOD_RES (279)..(279): Selenocysteine
  MOD_RES (355)..(355): Selenocysteine
  MOD_RES (357)..(357): Selenocysteine
  MOD_RES (367)..(367): Selenocysteine
  MOD_RES (369)..(369): Selenocysteine
  MOD_RES (387)..(387): Selenocysteine
  MOD_RES (390)..(390): Selenocysteine
  MOD_RES (410)..(410): Selenocysteine
  MOD_RES (439)..(439): Selenocysteine
  MOD_RES (452)..(452): Selenocysteine
  MOD_RES (454)..(454): Selenocysteine
  MOD_RES (481)..(481): Selenocysteine
MPRNQGFSEPEYSAEYSAEYSVSLPSDPDRGVGRXHEISVRNSGSCLCLPRFMRLXFVPESLENLYQXYFKRQRHEXLLVLVVFAALFDCYVVVMCAVVFSSDKLASLAVAGIGLVLDIILFVLCKKGLLPDRVXRRVLPYVLWLLIXAQIFSYLGLNFARAHAASDXVGWQVFFVFSFFIXLPLSLSPIVIISVVSCVVHXLVLGVXVAQQQQEELKGMQLLREENLMLSILPKHVADEMLKDMKKDESQKDQQQFNXMYMYRHENVSILFADIVGFXQLSSACSAQELVKLLNELFARFDKLAAKYHQLRIKILGDCYYCICGLPDYREDHAVCSILMGLAMVEAISYVREKXKXGVDMRVGVHXGXVLGGVLGQKRWQYDVWSXDVXVANKMEAGGIPGRVHISQSXMDCLKGEFDVEPGDGGSRCDYLEEKGIEXYLIIASKPEVKKXAXQNGLNGSALPNGAPASSKSSSPALIEXK

SEQ ID NO: 1562 - protein, 1144 aa, Homo sapiens
  MOD_RES (35)..(35): Selenocysteine
  MOD_RES (56)..(56): Selenocysteine
  MOD_RES (68)..(68): Selenocysteine
  MOD_RES (77)..(77): Selenocysteine
  MOD_RES (135)..(135): Selenocysteine
  MOD_RES (148)..(148): Selenocysteine
  MOD_RES (168)..(168): Selenocysteine
  MOD_RES (182)..(182): Selenocysteine
  MOD_RES (202)..(202): Selenocysteine
  MOD_RES (208)..(208): Selenocysteine
  MOD_RES (309)..(309): Selenocysteine
  MOD_RES (329)..(329): Selenocysteine
  MOD_RES (405)..(405): Selenocysteine
  MOD_RES (407)..(407): Selenocysteine
  MOD_RES (417)..(417): Selenocysteine
  MOD_RES (419)..(419): Selenocysteine
  MOD_RES (437)..(437): Selenocysteine
  MOD_RES (440)..(440): Selenocysteine
  MOD_RES (460)..(460): Selenocysteine
  MOD_RES (489)..(489): Selenocysteine
  MOD_RES (502)..(502): Selenocysteine
  MOD_RES (504)..(504): Selenocysteine
  MOD_RES (531)..(531): Selenocysteine
  MOD_RES (544)..(544): Selenocysteine
  MOD_RES (608)..(608): Selenocysteine
  MOD_RES (622)..(622): Selenocysteine
  MOD_RES (646)..(646): Selenocysteine
  MOD_RES (659)..(659): Selenocysteine
  MOD_RES (663)..(663): Selenocysteine
  MOD_RES (675)..(675): Selenocysteine
  MOD_RES (696)..(696): Selenocysteine
  MOD_RES (701)..(701): Selenocysteine
  MOD_RES (707)..(707): Selenocysteine
  MOD_RES (732)..(732): Selenocysteine
  MOD_RES (738)..(738): Selenocysteine
  MOD_RES (743)..(743): Selenocysteine
  MOD_RES (765)..(765): Selenocysteine
  MOD_RES (778)..(778): Selenocysteine
  MOD_RES (789)..(789): Selenocysteine
  MOD_RES (830)..(830): Selenocysteine
  MOD_RES (843)..(843): Selenocysteine
  MOD_RES (866)..(866): Selenocysteine
  MOD_RES (893)..(893): Selenocysteine
  MOD_RES (918)..(918): Selenocysteine
  MOD_RES (937)..(937): Selenocysteine
  MOD_RES (972)..(972): Selenocysteine
  MOD_RES (976)..(976): Selenocysteine
  MOD_RES (980)..(980): Selenocysteine
  MOD_RES (988)..(988): Selenocysteine
  MOD_RES (993)..(993): Selenocysteine
  MOD_RES (1026)..(1026): Selenocysteine
  MOD_RES (1028)..(1028): Selenocysteine
  MOD_RES (1067)..(1067): Selenocysteine
  MOD_RES (1077)..(1077): Selenocysteine
  MOD_RES (1089)..(1089): Selenocysteine
  MOD_RES (1116)..(1116): Selenocysteine
  MOD_RES (1127)..(1127): Selenocysteine
  MOD_RES (1135)..(1135): Selenocysteine
MPRNQGFSEPEYSAEYSAEYSVSLPSDPDRGVGRXHEISVRNSGSCLCLPRFMRLXFVPESLENLYQXYFKRQRHEXLLVLVVFAALFDCYVVVMCAVVFSSDKLASLAVAGIGLVLDIILFVLCKKGLLPDRVXRRVLPYVLWLLIXAQIFSYLGLNFARAHAASDXVGWQVFFVFSFFIXLPLSLSPIVIISVVSCVVHXLVLGVXVAQQQQEELKGMQLLREILANVFLYLCAIAVGIMSYYMADRKHRKAFLEARQSLEVKMNLEEQSQQQENLMLSILPKHVADEMLKDMKKDESQKDQQQFNXMYMYRHENVSILFADIVGFXQLSSACSAQELVKLLNELFARFDKLAAKYHQLRIKILGDCYYCICGLPDYREDHAVCSILMGLAMVEAISYVREKXKXGVDMRVGVHXGXVLGGVLGQKRWQYDVWSXDVXVANKMEAGGIPGRVHISQSXMDCLKGEFDVEPGDGGSRCDYLEEKGIEXYLIIASKPEVKKXAXQNGLNGSALPNGAPASSKSSSPALIEXKEPNGSAHSSGSXSEKPEEQDAQADNPSFPNPRRRLRLQDLADRVVDASEDEHELNQLLNEALLERESAQVVKKRNXFLLSMRFMDPEMEXRYSVEKEKQSGAAFSCSCVVLLCXALVEILIDPWLMXNYVXFMVGEILLLILXICSLAAIFPRAFPKKLVAFSXWIDRXRWARNXWAMLAIFILVMANVVDMLSCLQYYXGPSNAXAGMEXEGSCLENPKYYNYVAVLSLIAXIMLVQVSHMVKLXLMLLVAGAVAXINLYAWRPVFDEYDHKRFREHDLPMVALEQMQGFNPGLNGXDRLPLVPSKYSMXVMVFLMMLSFYYFSRHVEKLARXLFLWKIEVHDQKERVYEMRRWNEALVXNMLPEHVARHFLGSKKRDEELYSQXYDEIGVMFASLPNFADFYXEESINNGGIECLRFLNEIISDFDSLLDNPKFRVIXKIKXIGSXYMAASGVXPDVNXNGFASSNKEDKSERERWQHLADLADFALAMKDXLXNINNQSFNNFMLRIGMNKGGVLAGVIGARKPHYDIWGNXVNVASRMESXGVMGNIQVVEEXQVILREYGFRFVRRGPIFVKGKGELLXFFLKGRDKLAXFPNGPSVXLPHQVVDNS

SEQ ID NO: 1563 - protein, 1145 aa, Homo sapiens
  MOD_RES (35)..(35): Selenocysteine
  MOD_RES (56)..(56): Selenocysteine
  MOD_RES (68)..(68): Selenocysteine
  MOD_RES (77)..(77): Selenocysteine
  MOD_RES (135)..(135): Selenocysteine
  MOD_RES (148)..(148): Selenocysteine
  MOD_RES (168)..(168): Selenocysteine
  MOD_RES (182)..(182): Selenocysteine
  MOD_RES (202)..(202): Selenocysteine
  MOD_RES (208)..(208): Selenocysteine
  MOD_RES (309)..(309): Selenocysteine
  MOD_RES (329)..(329): Selenocysteine
  MOD_RES (405)..(405): Selenocysteine
  MOD_RES (407)..(407): Selenocysteine
  MOD_RES (417)..(417): Selenocysteine
  MOD_RES (419)..(419): Selenocysteine
  MOD_RES (437)..(437): Selenocysteine
  MOD_RES (440)..(440): Selenocysteine
  MOD_RES (460)..(460): Selenocysteine
  MOD_RES (489)..(489): Selenocysteine
  MOD_RES (502)..(502): Selenocysteine
  MOD_RES (504)..(504): Selenocysteine
  MOD_RES (531)..(531): Selenocysteine
  MOD_RES (544)..(544): Selenocysteine
  MOD_RES (608)..(608): Selenocysteine
  MOD_RES (622)..(622): Selenocysteine
  MOD_RES (646)..(646): Selenocysteine
  MOD_RES (659)..(659): Selenocysteine
  MOD_RES (663)..(663): Selenocysteine
  MOD_RES (675)..(675): Selenocysteine
  MOD_RES (696)..(696): Selenocysteine
  MOD_RES (701)..(701): Selenocysteine
  MOD_RES (707)..(707): Selenocysteine
  MOD_RES (732)..(732): Selenocysteine
  MOD_RES (738)..(738): Selenocysteine
  MOD_RES (743)..(743): Selenocysteine
  MOD_RES (765)..(765): Selenocysteine
  MOD_RES (778)..(778): Selenocysteine
  MOD_RES (789)..(789): Selenocysteine
  MOD_RES (830)..(830): Selenocysteine
  MOD_RES (844)..(844): Selenocysteine
  MOD_RES (867)..(867): Selenocysteine
  MOD_RES (894)..(894): Selenocysteine
  MOD_RES (919)..(919): Selenocysteine
  MOD_RES (938)..(938): Selenocysteine
  MOD_RES (973)..(973): Selenocysteine
  MOD_RES (977)..(977): Selenocysteine
  MOD_RES (981)..(981): Selenocysteine
  MOD_RES (989)..(989): Selenocysteine
  MOD_RES (994)..(994): Selenocysteine
  MOD_RES (1027)..(1027): Selenocysteine
  MOD_RES (1029)..(1029): Selenocysteine
  MOD_RES (1068)..(1068): Selenocysteine
  MOD_RES (1078)..(1078): Selenocysteine
  MOD_RES (1090)..(1090): Selenocysteine
  MOD_RES (1117)..(1117): Selenocysteine
  MOD_RES (1128)..(1128): Selenocysteine
  MOD_RES (1136)..(1136): Selenocysteine
MPRNQGFSEPEYSAEYSAEYSVSLPSDPDRGVGRXHEISVRNSGSCLCLPRFMRLXFVPESLENLYQXYFKRQRHEXLLVLVVFAALFDCYVVVMCAVVFSSDKLASLAVAGIGLVLDIILFVLCKKGLLPDRVXRRVLPYVLWLLIXAQIFSYLGLNFARAHAASDXVGWQVFFVFSFFIXLPLSLSPIVIISVVSCVVHXLVLGVXVAQQQQEELKGMQLLREILANVFLYLCAIAVGIMSYYMADRKHRKAFLEARQSLEVKMNLEEQSQQQENLMLSILPKHVADEMLKDMKKDESQKDQQQFNXMYMYRHENVSILFADIVGFXQLSSACSAQELVKLLNELFARFDKLAAKYHQLRIKILGDCYYCICGLPDYREDHAVCSILMGLAMVEAISYVREKXKXGVDMRVGVHXGXVLGGVLGQKRWQYDVWSXDVXVANKMEAGGIPGRVHISQSXMDCLKGEFDVEPGDGGSRCDYLEEKGIEXYLIIASKPEVKKXAXQNGLNGSALPNGAPASSKSSSPALIEXKEPNGSAHSSGSXSEKPEEQDAQADNPSFPNPRRRLRLQDLADRVVDASEDEHELNQLLNEALLERESAQVVKKRNXFLLSMRFMDPEMEXRYSVEKEKQSGAAFSCSCVVLLCXALVEILIDPWLMXNYVXFMVGEILLLILXICSLAAIFPRAFPKKLVAFSXWIDRXRWARNXWAMLAIFILVMANVVDMLSCLQYYXGPSNAXAGMEXEGSCLENPKYYNYVAVLSLIAXIMLVQVSHMVKLXLMLLVAGAVAXINLYAWRPVFDEYDHKRFREHDLPMVALEQMQGFNPGLNGXDSRLPLVPSKYSMXVMVFLMMLSFYYFSRHVEKLARXLFLWKIEVHDQKERVYEMRRWNEALVXNMLPEHVARHFLGSKKRDEELYSQXYDEIGVMFASLPNFADFYXEESINNGGIECLRFLNEIISDFDSLLDNPKFRVIXKIKXIGSXYMAASGVXPDVNXNGFASSNKEDKSERERWQHLADLADFALAMKDXLXNINNQSFNNFMLRIGMNKGGVLAGVIGARKPHYDIWGNXVNVASRMESXGVMGNIQVVEEXQVILREYGFRFVRRGPIFVKGKGELLXFFLKGRDKLAXFPNGPSVXLPHQVVDNS

SEQ ID NO: 1564 - protein, 791 aa, Homo sapiens
  MOD_RES (76)..(76): Selenocysteine
  MOD_RES (78)..(78): Selenocysteine
  MOD_RES (88)..(88): Selenocysteine
  MOD_RES (90)..(90): Selenocysteine
  MOD_RES (108)..(108): Selenocysteine
  MOD_RES (111)..(111): Selenocysteine
  MOD_RES (139)..(139): Selenocysteine
  MOD_RES (153)..(153): Selenocysteine
  MOD_RES (182)..(182): Selenocysteine
  MOD_RES (195)..(195): Selenocysteine
  MOD_RES (197)..(197): Selenocysteine
  MOD_RES (224)..(224): Selenocysteine
  MOD_RES (237)..(237): Selenocysteine
  MOD_RES (301)..(301): Selenocysteine
  MOD_RES (315)..(315): Selenocysteine
  MOD_RES (339)..(339): Selenocysteine
  MOD_RES (352)..(352): Selenocysteine
  MOD_RES (356)..(356): Selenocysteine
  MOD_RES (368)..(368): Selenocysteine
  MOD_RES (389)..(389): Selenocysteine
  MOD_RES (394)..(394): Selenocysteine
  MOD_RES (400)..(400): Selenocysteine
  MOD_RES (425)..(425): Selenocysteine
  MOD_RES (436)..(436): Selenocysteine
  MOD_RES (477)..(477): Selenocysteine
  MOD_RES (490)..(490): Selenocysteine
  MOD_RES (513)..(513): Selenocysteine
  MOD_RES (540)..(540): Selenocysteine
  MOD_RES (565)..(565): Selenocysteine
  MOD_RES (584)..(584): Selenocysteine
  MOD_RES (619)..(619): Selenocysteine
  MOD_RES (623)..(623): Selenocysteine
  MOD_RES (627)..(627): Selenocysteine
  MOD_RES (635)..(635): Selenocysteine
  MOD_RES (640)..(640): Selenocysteine
  MOD_RES (673)..(673): Selenocysteine
  MOD_RES (675)..(675): Selenocysteine
  MOD_RES (714)..(714): Selenocysteine
  MOD_RES (724)..(724): Selenocysteine
  MOD_RES (736)..(736): Selenocysteine
  MOD_RES (763)..(763): Selenocysteine
  MOD_RES (774)..(774): Selenocysteine
  MOD_RES (782)..(782): Selenocysteine
QLSSACSAQELVKLLNELFARFDKLAAKYHQLRIKILGDCYYCICGLPDYREDHAVCSILMGLAMVEAISYVREKXKXGVDMRVGVHXGXVLGGVLGQKRWQYDVWSXDVXVANKMEAGGIPGGSKIEERLYSCVVAPXLRLRWERVHISQSXMDCLKGEFDVEPGDGGSRCDYLEEKGIEXYLIIASKPEVKKXAXQNGLNGSALPNGAPASSKSSSPALIEXKEPNGSAHSSGSXSEKPEEQDAQADNPSFPNPRRRLRLQDLADRVVDASEDEHELNQLLNEALLERESAQVVKKRNXFLLSMRFMDPEMEXRYSVEKEKQSGAAFSCSCVVLLCXALVEILIDPWLMXNYVXFMVGEILLLILXICSLAAIFPRAFPKKLVAFSXWIDRXRWARNXWAMLAIFILVMANVVDMVSHMVKLXLMLLVAGAVAXINLYAWRPVFDEYDHKRFREHDLPMVALEQMQGFNPGLNGXDRLPLVPSKYSMXVMVFLMMLSFYYFSRHVEKLARXLFLWKIEVHDQKERVYEMRRWNEALVXNMLPEHVARHFLGSKKRDEELYSQXYDEIGVMFASLPNFADFYXEESINNGGIECLRFLNEIISDFDSLLDNPKFRVIXKIKXIGSXYMAASGVXPDVNXNGFASSNKEDKSERERWQHLADLADFALAMKDXLXNINNQSFNNFMLRIGMNKGGVLAGVIGARKPHYDIWGNXVNVASRMESXGVMGNIQVVEEXQVILREYGFRFVRRGPIFVKGKGELLXFFLKGRDKLAXFPNGPSVXLPHQVVDNS

SEQ ID NO: 1565 - protein, 198 aa, Homo sapiens
  MOD_RES (2)..(2): Selenocysteine
  MOD_RES (14)..(14): Selenocysteine
  MOD_RES (35)..(35): Selenocysteine
  MOD_RES (40)..(40): Selenocysteine
  MOD_RES (46)..(46): Selenocysteine
  MOD_RES (71)..(71): Selenocysteine
  MOD_RES (77)..(77): Selenocysteine
  MOD_RES (82)..(82): Selenocysteine
  MOD_RES (104)..(104): Selenocysteine
  MOD_RES (117)..(117): Selenocysteine
  MOD_RES (128)..(128): Selenocysteine
  MOD_RES (169)..(169): Selenocysteine
  MOD_RES (183)..(183): Selenocysteine
VXFMVGEILLLILXICSLAAIFPRAFPKKLVAFSXWIDRXRWARNXWAMLAIFILVMANVVDMLSCLQYYXGPSNAXAGMEXEGSCLENPKYYNYVAVLSLIAXIMLVQVSHMVKLXLMLLVAGAVAXINLYAWRPVFDEYDHKRFREHDLPMVALEQMQGFNPGLNGXDSRLPLVPSKYSMXVMVFLMMLSFYYFSR

SEQ ID NO: 1566 - protein, 49 aa, Homo sapiens
  MOD_RES (1)..(1): Any amino acid
  MOD_RES (8)..(8): Selenocysteine
  MOD_RES (18)..(18): Selenocysteine
  MOD_RES (39)..(39): Selenocysteine
XYDIWGNXVNVASRMESXGVMGNIQWRLAEKLHERGKGXEEQAVAVSRW

SEQ ID NO: 1567 - protein, 115 aa, Homo sapiens
  MOD_RES (19)..(19): Selenocysteine
  MOD_RES (56)..(56): Selenocysteine
  MOD_RES (63)..(64): Selenocysteine
  MOD_RES (89)..(89): Selenocysteine
  MOD_RES (110)..(110): Selenocysteine
MARLFSPRPPPSEDLFYEXYYSLSQQYPLLLLLLGIVLCALAALLAVAWASGRELXSDPSFLXXVLCALGGFSLLLGLASREQRLQRWXRPLSGLVWVALLALGHAFLFXGGVVS

SEQ ID NO: 1568 - protein, 449 aa, Homo sapiens
  MOD_RES (19)..(19): Selenocysteine
  MOD_RES (56)..(56): Selenocysteine
  MOD_RES (63)..(64): Selenocysteine
  MOD_RES (89)..(89): Selenocysteine
  MOD_RES (110)..(110): Selenocysteine
  MOD_RES (129)..(129): Selenocysteine
  MOD_RES (202)..(202): Selenocysteine
  MOD_RES (218)..(218): Selenocysteine
  MOD_RES (258)..(258): Selenocysteine
  MOD_RES (283)..(283): Selenocysteine
  MOD_RES (315)..(315): Selenocysteine
  MOD_RES (319)..(319): Selenocysteine
  MOD_RES (333)..(333): Selenocysteine
  MOD_RES (335)..(336): Selenocysteine
  MOD_RES (347)..(347): Selenocysteine
  MOD_RES (351)..(351): Selenocysteine
  MOD_RES (358)..(358): Selenocysteine
  MOD_RES (373)..(373): Selenocysteine
  MOD_RES (375)..(375): Selenocysteine
  MOD_RES (381)..(381): Selenocysteine
  MOD_RES (397)..(398): Selenocysteine
  MOD_RES (408)..(409): Selenocysteine
  MOD_RES (420)..(420): Selenocysteine
  MOD_RES (437)..(437): Selenocysteine
  MOD_RES (444)..(444): Selenocysteine
  MOD_RES (446)..(446): Selenocysteine
MARLFSPRPPPSEDLFYEXYYSLSQQYPLLLLLLGIVLCALAALLAVAWASGRELXSDPSFLXXVLCALGGFSLLLGLASREQRLQRWXRPLSGLVWVALLALGHAFLFXGGVVSAWDQVSYFLFVIFXAYAMLPLGMRDAAVAGLASSLSHLLVLGLYLGPQPDSRPALLPQLAANAVLFLCGNVAGVYHKALMERALRAXFREALSSLHSRRRLDXEKKHQEHLLLSILPAYLAREMKAEIMARLQAGQGSRPESXNNFHSLYVKRHQGVSVLYADIVGFXRLASECSPKELVLMLNELFGKFDQIAKVPLHXHIHXPRSMNACGSRSWGXVXXVSLGCHSHCQXMPSXACAWAWXCAGPSGNCGQPLAWXSXCVWACXQAAYCVESSGCRSGSXXFGHMMSHWLXXWRQAVYQGECXSQGLPWPCWQGLMLWRXQAWSIGXPXFGS

SEQ ID NO: 1569 - protein, 1077 aa, Homo sapiens
  MOD_RES (19)..(19): Selenocysteine
  MOD_RES (56)..(56): Selenocysteine
  MOD_RES (63)..(64): Selenocysteine
  MOD_RES (89)..(89): Selenocysteine
  MOD_RES (110)..(110): Selenocysteine
  MOD_RES (129)..(129): Selenocysteine
  MOD_RES (202)..(202): Selenocysteine
  MOD_RES (218)..(218): Selenocysteine
  MOD_RES (258)..(258): Selenocysteine
  MOD_RES (283)..(283): Selenocysteine
  MOD_RES (359)..(359): Selenocysteine
  MOD_RES (394)..(394): Selenocysteine
  MOD_RES (411)..(411): Selenocysteine
  MOD_RES (414)..(414): Selenocysteine
  MOD_RES (443)..(443): Selenocysteine
  MOD_RES (459)..(459): Selenocysteine
  MOD_RES (479)..(479): Selenocysteine
  MOD_RES (503)..(503): Selenocysteine
  MOD_RES (505)..(505): Selenocysteine
  MOD_RES (511)..(511): Selenocysteine
  MOD_RES (517)..(517): Selenocysteine
  MOD_RES (526)..(526): Selenocysteine
  MOD_RES (536)..(536): Selenocysteine
  MOD_RES (564)..(564): Selenocysteine
  MOD_RES (591)..(591): Selenocysteine
  MOD_RES (606)..(606): Selenocysteine
  MOD_RES (615)..(615): Selenocysteine
  MOD_RES (619)..(619): Selenocysteine
  MOD_RES (658)..(658): Selenocysteine
  MOD_RES (668)..(668): Selenocysteine
  MOD_RES (670)..(670): Selenocysteine
  MOD_RES (680)..(680): Selenocysteine
  MOD_RES (687)..(687): Selenocysteine
  MOD_RES (726)..(726): Selenocysteine
  MOD_RES (802)..(802): Selenocysteine
  MOD_RES (831)..(831): Selenocysteine
  MOD_RES (833)..(833): Selenocysteine
  MOD_RES (838)..(838): Selenocysteine
  MOD_RES (926)..(926): Selenocysteine
  MOD_RES (930)..(930): Selenocysteine
  MOD_RES (935)..(935): Selenocysteine
  MOD_RES (940)..(940): Selenocysteine
  MOD_RES (958)..(958): Selenocysteine
  MOD_RES (1010)..(1010): Selenocysteine
  MOD_RES (1020)..(1020): Selenocysteine
  MOD_RES (1029)..(1029): Selenocysteine
  MOD_RES (1032)..(1032): Selenocysteine
  MOD_RES (1042)..(1042): Selenocysteine
  MOD_RES (1059)..(1059): Selenocysteine
  MOD_RES (1064)..(1064): Selenocysteine
  MOD_RES (1067)..(1067): Selenocysteine
  MOD_RES (1069)..(1069): Selenocysteine
  MOD_RES (1075)..(1075): Selenocysteine
MARLFSPRPPPSEDLFYEXYYSLSQQYPLLLLLLGIVLCALAALLAVAWASGRELXSDPSFLXXVLCALGGFSLLLGLASREQRLQRWXRPLSGLVWVALLALGHAFLFXGGVVSAWDQVSYFLFVIFXAYAMLPLGMRDAAVAGLASSLSHLLVLGLYLGPQPDSRPALLPQLAANAVLFLCGNVAGVYHKALMERALRAXFREALSSLHSRRRLDXEKKHQEHLLLSILPAYLAREMKAEIMARLQAGQGSRPESXNNFHSLYVKRHQGVSVLYADIVGFXRLASECSPKELVLMLNELFGKFDQIAKEHECMRIKILGDCYYCVSGLPLSLPDHAINCVRMGLDMCRAIRKLRAAXGVDINMRVGVHSGSVLCGVIGLQKWQYDVWSHDVXLANHMEAGGVPGRVHIXGAXLALLAGAYAVEDAGMEHRDPYLRELGEPXYLVIDPRAEEEDEKGXAGGLLSSLEGLKMRPSLLMXRYLESWGAAKPFAHLSHGDSPVSXSXPLPEKXLASFSXQWSLDRSRXPRGLDDELDXGDAKFFQVIEQLNSQKQWKQSKDFNPLXLYFREKEMEKEYRLSAIPAFKYYEACXFLVFLSNFIIQMLVXNRPPALAIXYSIXFLLFLLILFVCFSEDLMRCVLKGPKMLHWLPALSGLVAXRPGLRIALGXAXILLVFAMAIXSLFFFPXSSDCPFQAPNVSSMISNLSWELPGSLPLISVPYSMHCCXLGFLSCSLFLHMSFELKLLLLLLWLAASCSLFLHSHAWLSECLIVRLYLGPLDSRPGVLKEPKLMGAISFFIFFFXLLVLARQNEYYCRLDFLWKKKLRQEREEXEXMENLXRLLLENVLPAHVAPQFIGQNRRNEDLYHQSYECVCVLFASVPDFKEFYSESNINHEGLECLRLLNEIIADFDELLSKPKFSGVEKIKXIGSXYMAAXGLNAXSGQDAQQDAERSCSHLGXMVEFAVALGSKLDVINKHSFNNFRLRVGLNHGPVVAGVIGAQKPQYDIWGNXVNVASRMESXGVLGKIQVXEEXAWALQSLGYXCYSRGVIKVKGKGQLCXYFLNXDLXRXGPPSAXLG

SEQ ID NO: 1570 - protein, 36 aa, Homo sapiens
MLPLGMRDAAVAGLASSLSHLLVLGLYLGPQPDSRP

SEQ ID NO: 1571 - protein, 216 aa, Homo sapiens
  MOD_RES (70)..(70): Selenocysteine
  MOD_RES (86)..(86): Selenocysteine
  MOD_RES (126)..(126): Selenocysteine
  MOD_RES (151)..(151): Selenocysteine
  MOD_RES (180)..(180): Selenocysteine
  MOD_RES (200)..(200): Selenocysteine
  MOD_RES (216)..(216): Selenocysteine
MLPLGMRDAAVAGLASSLSHLLVLGLYLGPQPDSRPALLPQLAANAVLFLCGNVAGVYHKALMERALRAXFREALSSLHSRRRLDXEKKHQEHLLLSILPAYLAREMKAEIMARLQAGQGSRPESXNNFHSLYVKRHQGVSVLYADIVGFXRLASECSPKELVLMLNELFGKFDQIAKEXAGSHWRGHQHACGRALRQRXVWSHRAAEVAVRRLVX

SEQ ID NO: 1572 - protein, 137 aa, Homo sapiens
  MOD_RES (1)..(1): Any amino acid
  MOD_RES (16)..(16): Selenocysteine
  MOD_RES (32)..(32): Selenocysteine
  MOD_RES (52)..(52): Selenocysteine
  MOD_RES (76)..(76): Selenocysteine
  MOD_RES (78)..(78): Selenocysteine
  MOD_RES (84)..(84): Selenocysteine
  MOD_RES (90)..(90): Selenocysteine
  MOD_RES (99)..(99): Selenocysteine
  MOD_RES (109)..(109): Selenocysteine
  MOD_RES (117)..(117): Selenocysteine
  MOD_RES (127)..(127): Selenocysteine
  MOD_RES (129)..(129): Selenocysteine
XMEHRDPYLRELGEPXYLVIDPRAEEEDEKGXAGGLLSSLEGLKMRPSLLMXRYLESWGAAKPFAHLSHGDSPVSXSXPLPEKXLASFSXQWSLDRSRXPRGLDDELDXGDAKFFQXVEAVEGLQPXDXVLQREGDG

SEQ ID NO: 1573 - protein, 919 aa, Homo sapiens
  MOD_RES (8)..(8): Selenocysteine
  MOD_RES (22)..(22): Selenocysteine
  MOD_RES (29)..(29): Selenocysteine
  MOD_RES (44)..(44): Selenocysteine
  MOD_RES (112)..(112): Selenocysteine
  MOD_RES (119)..(119): Selenocysteine
  MOD_RES (126)..(126): Selenocysteine
  MOD_RES (188)..(188): Selenocysteine
  MOD_RES (223)..(223): Selenocysteine
  MOD_RES (240)..(240): Selenocysteine
  MOD_RES (243)..(243): Selenocysteine
  MOD_RES (272)..(272): Selenocysteine
  MOD_RES (279)..(279): Selenocysteine
  MOD_RES (297)..(297): Selenocysteine
  MOD_RES (376)..(376): Selenocysteine
  MOD_RES (414)..(414): Selenocysteine
  MOD_RES (428)..(428): Selenocysteine
  MOD_RES (434)..(434): Selenocysteine
  MOD_RES (455)..(455): Selenocysteine
  MOD_RES (468)..(468): Selenocysteine
  MOD_RES (474)..(474): Selenocysteine
  MOD_RES (476)..(476): Selenocysteine
  MOD_RES (488)..(488): Selenocysteine
  MOD_RES (544)..(544): Selenocysteine
  MOD_RES (586)..(586): Selenocysteine
  MOD_RES (596)..(596): Selenocysteine
  MOD_RES (607)..(607): Selenocysteine
  MOD_RES (625)..(625): Selenocysteine
  MOD_RES (640)..(640): Selenocysteine
  MOD_RES (648)..(648): Selenocysteine
  MOD_RES (669)..(669): Selenocysteine
  MOD_RES (681)..(681): Selenocysteine
  MOD_RES (782)..(782): Selenocysteine
  MOD_RES (786)..(786): Selenocysteine
  MOD_RES (797)..(797): Selenocysteine
  MOD_RES (804)..(804): Selenocysteine
  MOD_RES (860)..(860): Selenocysteine
  MOD_RES (870)..(870): Selenocysteine
  MOD_RES (879)..(880): Selenocysteine
  MOD_RES (890)..(890): Selenocysteine
  MOD_RES (909)..(909): Selenocysteine
MAPSRFRXQLELVSNVLIFSCXNIVGVCXHYPAEVSQRQAFQEXRECIQARLHSQRENQQQERLLLSVLPRHVAMEMKADINAKQEDMMFHKIYIQKHDNVSILFADIEGFXSLASQCXAQELVMXLNELFARFDKLAAENHCLRIKILGDCYYCVSGLPEARADHAHCCVEMGMDMIEAISLVREVXGVNVNMRVGIHSGRVHCGVLGLRKWQFDVWSNDVXLANHMEAGGKAGRIHIXKAXLNYLNGDYEVEPGCGGERNAYLKEHSIEXFLILRCXQKRKEEKAMIAKMNRQRXNSIGHNPPHWGAERPFYNHLGGNQVSKEMKRMGFEDPKDKNAQESANPEDEVDEFLGRAIDARSIDRLRSEHVRKFLLXFREPDLEKKYSKQVDDRFGAYVACASLVFLFICFVQIXIVPHSIFMLSFYLXCSLLLXLVVFVSVIYSCVKLFPSPLQXLSRKIVRSKMNSXLVGVFXIXLVFLAAFVNMFXCNSRDLLGCLAQEHNISASQVNACHVAESAVNYSLGDEQGFCGSPWPNCNFPEYFXYSVLLSLLACSVFLQISCIGKLVLMLAIELIYVLIVEVPGVXLFDNADLLVXANAIDFFNNGXSQWSLCENLRHRRMEAGXYFPSGVKEQSPEHAXKVALKVVXPIIISVFVLALYLHAQQVESXARLDFLWKLQAXEEKEEMEELQAYNRRLLHNILPKDVAAHFLARERRNDELYYQSCECVAVMFASIANFSEFYVELEANNEGVECLRLLNEIIADFDEIISEDRFRQLEKIKXIGSXYMAASGLNDSXYDKVGKXHIKALADFAMKLMDQMKYINEHSFNNFQMKIGLNIGPVVAGVIGARKPQYDIWGNXVNVASRMDSXGVPDRIQVXXDMYQVLAANXYQLECRGVVKVKGKGEMMXYFLNGGPPLS

SEQ ID NO: 1574 - protein, 78 aa, Homo sapiens
  MOD_RES (8)..(8): Selenocysteine
  MOD_RES (25)..(25): Selenocysteine
  MOD_RES (32)..(32): Selenocysteine
  MOD_RES (55)..(55): Selenocysteine
  MOD_RES (60)..(60): Selenocysteine
MAPSRFRXQLEVSLSPMFSFSPAPXSWVSAPXIRLRSPRDRLSRRPESASRRGSXRSGRXSSRNGSCCLSFPVMLPWR

SEQ ID NO: 1575 - protein, 90 aa, Homo sapiens
  MOD_RES (38)..(38): Selenocysteine
  MOD_RES (45)..(45): Selenocysteine
  MOD_RES (52)..(52): Selenocysteine
MEMKADINAKQEDMMFHKIYIQKHDNVSILFADIEGFXSLASQCXAQELVMXLNELFARFDKLAAENHCLRIKILGDCYYCVSGLPEARA

SEQ ID NO: 1576 - protein, 492 aa, Homo sapiens
  MOD_RES (38)..(38): Selenocysteine
  MOD_RES (45)..(45): Selenocysteine
  MOD_RES (52)..(52): Selenocysteine
  MOD_RES (114)..(114): Selenocysteine
  MOD_RES (149)..(149): Selenocysteine
  MOD_RES (166)..(166): Selenocysteine
  MOD_RES (169)..(169): Selenocysteine
  MOD_RES (198)..(198): Selenocysteine
  MOD_RES (205)..(205): Selenocysteine
  MOD_RES (223)..(223): Selenocysteine
  MOD_RES (302)..(302): Selenocysteine
  MOD_RES (340)..(340): Selenocysteine
  MOD_RES (354)..(354): Selenocysteine
  MOD_RES (360)..(360): Selenocysteine
  MOD_RES (381)..(381): Selenocysteine
  MOD_RES (394)..(394): Selenocysteine
  MOD_RES (400)..(400): Selenocysteine
  MOD_RES (402)..(402): Selenocysteine
  MOD_RES (414)..(414): Selenocysteine
  MOD_RES (470)..(470): Selenocysteine
MEMKADINAKQEDMMFHKIYIQKHDNVSILFADIEGFXSLASQCXAQELVMXLNELFARFDKLAAENHCLRIKILGDCYYCVSGLPEARADHAHCCVEMGMDMIEAISLVREVXGVNVNMRVGIHSGRVHCGVLGLRKWQFDVWSNDVXLANHMEAGGKAGRIHIXKAXLNYLNGDYEVEPGCGGERNAYLKEHSIEXFLILRCXQKRKEEKAMIAKMNRQRXNSIGHNPPHWGAERPFYNHLGGNQVSKEMKRMGFEDPKDKNAQESANPEDEVDEFLGRAIDARSIDRLRSEHVRKFLLXFREPDLEKKYSKQVDDRFGAYVACASLVFLFICFVQIXIVPHSIFMLSFYLXCSLLLXLVVFVSVIYSCVKLFPSPLQXLSRKIVRSKMNSXLVGVFXIXLVFLAAFVNMFXCNSRDLLGCLAQEHNISASQVNACHVAESAVNYSLGDEQGFCGSPWPNCNFPEYFXYSVLLSLLACSVFLQISCIGKL

SEQ ID NO: 1577 - protein, 911 aa, Homo sapiens
  MOD_RES (18)..(18): Selenocysteine
  MOD_RES (39)..(39): Selenocysteine
  MOD_RES (46)..(46): Selenocysteine
  MOD_RES (61)..(61): Selenocysteine
  MOD_RES (129)..(129): Selenocysteine
  MOD_RES (136)..(136): Selenocysteine
  MOD_RES (143)..(143): Selenocysteine
  MOD_RES (205)..(205): Selenocysteine
  MOD_RES (240)..(240): Selenocysteine
  MOD_RES (257)..(257): Selenocysteine
  MOD_RES (260)..(260): Selenocysteine
  MOD_RES (289)..(289): Selenocysteine
  MOD_RES (296)..(296): Selenocysteine
  MOD_RES (314)..(314): Selenocysteine
  MOD_RES (393)..(393): Selenocysteine
  MOD_RES (431)..(431): Selenocysteine
  MOD_RES (445)..(445): Selenocysteine
  MOD_RES (451)..(451): Selenocysteine
  MOD_RES (472)..(472): Selenocysteine
  MOD_RES (485)..(485): Selenocysteine
  MOD_RES (491)..(491): Selenocysteine
  MOD_RES (493)..(493): Selenocysteine
  MOD_RES (505)..(505): Selenocysteine
  MOD_RES (561)..(561): Selenocysteine
  MOD_RES (603)..(603): Selenocysteine
  MOD_RES (613)..(613): Selenocysteine
  MOD_RES (624)..(624): Selenocysteine
  MOD_RES (632)..(632): Selenocysteine
  MOD_RES (640)..(640): Selenocysteine
  MOD_RES (661)..(661): Selenocysteine
  MOD_RES (673)..(673): Selenocysteine
  MOD_RES (774)..(774): Selenocysteine
  MOD_RES (778)..(778): Selenocysteine
  MOD_RES (789)..(789): Selenocysteine
  MOD_RES (796)..(796): Selenocysteine
  MOD_RES (852)..(852): Selenocysteine
  MOD_RES (862)..(862): Selenocysteine
  MOD_RES (871)..(872): Selenocysteine
  MOD_RES (882)..(882): Selenocysteine
  MOD_RES (901)..(901): Selenocysteine
MKSQKEGCCSRGDLSIQXGPGGEWAPRRLVSNVLIFSCXNIVGVCXHYPAEVSQRQAFQEXRECIQARLHSQRENQQQERLLLSVLPRHVAMEMKADINAKQEDMMFHKIYIQKHDNVSILFADIEGFXSLASQCXAQELVMXLNELFARFDKLAAENHCLRIKILGDCYYCVSGLPEARADHAHCCVEMGMDMIEAISLVREVXGVNVNMRVGIHSGRVHCGVLGLRKWQFDVWSNDVXLANHMEAGGKAGRIHIXKAXLNYLNGDYEVEPGCGGERNAYLKEHSIEXFLILRCXQKRKEEKAMIAKMNRQRXNSIGHNPPHWGAERPFYNHLGGNQVSKEMKRMGFEDPKDKNAQESANPEDEVDEFLGRAIDARSIDRLRSEHVRKFLLXFREPDLEKKYSKQVDDRFGAYVACASLVFLFICFVQIXIVPHSIFMLSFYLXCSLLLXLVVFVSVIYSCVKLFPSPLQXLSRKIVRSKMNSXLVGVFXIXLVFLAAFVNMFXCNSRDLLGCLAQEHNISASQVNACHVAESAVNYSLGDEQGFCGSPWPNCNFPEYFXYSVLLSLLACSVFLQISCIGKLVLMLAIELIYVLIVEVPGVXLFDNADLLVXANAIDFFNNGXSQCPEHAXKVALKVVXPIIISVFVLALYLHAQQVESXARLDFLWKLQAXEEKEEMEELQAYNRRLLHNILPKDVAAHFLARERRNDELYYQSCECVAVMFASIANFSEFYVELEANNEGVECLRLLNEIIADFDEIISEDRFRQLEKIKXIGSXYMAASGLNDSXYDKVGKXHIKALADFAMKLMDQMKYINEHSFNNFQMKIGLNIGPVVAGVIGARKPQYDIWGNXVNVASRMDSXGVPDRIQVXXDMYQVLAANXYQLECRGVVKVKGKGEMMXYFLNGGPPLS

SEQ ID NO: 1578 - protein, 1261 aa, Homo sapiens
  MOD_RES (17)..(17): Selenocysteine
  MOD_RES (54)..(54): Selenocysteine
  MOD_RES (62)..(62): Selenocysteine
  MOD_RES (128)..(128): Selenocysteine
  MOD_RES (149)..(149): Selenocysteine
  MOD_RES (243)..(243): Selenocysteine
  MOD_RES (332)..(332): Selenocysteine
  MOD_RES (338)..(338): Selenocysteine
  MOD_RES (341)..(341): Selenocysteine
  MOD_RES (368)..(368): Selenocysteine
  MOD_RES (389)..(389): Selenocysteine
  MOD_RES (396)..(396): Selenocysteine
  MOD_RES (411)..(411): Selenocysteine
  MOD_RES (479)..(479): Selenocysteine
  MOD_RES (486)..(486): Selenocysteine
  MOD_RES (493)..(493): Selenocysteine
  MOD_RES (555)..(555): Selenocysteine
  MOD_RES (590)..(590): Selenocysteine
  MOD_RES (607)..(607): Selenocysteine
  MOD_RES (610)..(610): Selenocysteine
  MOD_RES (639)..(639): Selenocysteine
  MOD_RES (646)..(646): Selenocysteine
  MOD_RES (664)..(664): Selenocysteine
  MOD_RES (743)..(743): Selenocysteine
  MOD_RES (781)..(781): Selenocysteine
  MOD_RES (795)..(795): Selenocysteine
  MOD_RES (801)..(801): Selenocysteine
  MOD_RES (822)..(822): Selenocysteine
  MOD_RES (835)..(835): Selenocysteine
  MOD_RES (841)..(841): Selenocysteine
  MOD_RES (843)..(843): Selenocysteine
  MOD_RES (855)..(855): Selenocysteine
  MOD_RES (911)..(911): Selenocysteine
  MOD_RES (953)..(953): Selenocysteine
  MOD_RES (963)..(963): Selenocysteine
  MOD_RES (974)..(974): Selenocysteine
  MOD_RES (982)..(982): Selenocysteine
  MOD_RES (990)..(990): Selenocysteine
  MOD_RES (1011)..(1011): Selenocysteine
  MOD_RES (1023)..(1023): Selenocysteine
  MOD_RES (1124)..(1124): Selenocysteine
  MOD_RES (1128)..(1128): Selenocysteine
  MOD_RES (1139)..(1139): Selenocysteine
  MOD_RES (1146)..(1146): Selenocysteine
  MOD_RES (1202)..(1202): Selenocysteine
  MOD_RES (1212)..(1212): Selenocysteine
  MOD_RES (1221)..(1222): Selenocysteine
  MOD_RES (1232)..(1232): Selenocysteine
  MOD_RES (1251)..(1251): Selenocysteine
MSGSKSVSPPGYAAQKXAAPAPRGGPEHRSAWGEADSRANGYPHAPGGSARGSXKKPGGAVXPQQQQRLASRWRSDDDDDPPLSGDDPLAGGFGFSFRSKSAWQERGGDDCGRGSRRQRRGAASGGSXRAPPAGGGGGSAAAAASAGGXEVRPRSVEVGLEERRGKGRAADELEAGAVEGGEGSGDGGSSADSGSGAGPGAVLSLGACCLALLQIFRSKKFPSDKLERLYQRYFFRLNQSSLXMLMAVLVLVCLVMLAFHAARPPLQLPYLAVLAAAVGVILIMAVLCNRAAFHQDHMGLACYALIAVVLAVQVVGLLLPQPRSASEGIWWXVFFIYXIYXLLPVRMRAAVLSGVLLSALHLAIALRXNAQDQFLLKQLVSNVLIFSCXNIVGVCXHYPAEVSQRQAFQEXRECIQARLHSQRENQQQERLLLSVLPRHVAMEMKADINAKQEDMMFHKIYIQKHDNVSILFADIEGFXSLASQCXAQELVMXLNELFARFDKLAAENHCLRIKILGDCYYCVSGLPEARADHAHCCVEMGMDMIEAISLVREVXGVNVNMRVGIHSGRVHCGVLGLRKWQFDVWSNDVXLANHMEAGGKAGRIHIXKAXLNYLNGDYEVEPGCGGERNAYLKEHSIEXFLILRCXQKRKEEKAMIAKMNRQRXNSIGHNPPHWGAERPFYNHLGGNQVSKEMKRMGFEDPKDKNAQESANPEDEVDEFLGRAIDARSIDRLRSEHVRKFLLXFREPDLEKKYSKQVDDRFGAYVACASLVFLFICFVQIXIVPHSIFMLSFYLXCSLLLXLVVFVSVIYSCVKLFPSPLQXLSRKIVRSKMNSXLVGVFXIXLVFLAAFVNMFXCNSRDLLGCLAQEHNISASQVNACHVAESAVNYSLGDEQGFCGSPWPNCNFPEYFXYSVLLSLLACSVFLQISCIGKLVLMLAIELIYVLIVEVPGVXLFDNADLLVXANAIDFFNNGXSQCPEHAXKVALKVVXPIIISVFVLALYLHAQQVESXARLDFLWKLQAXEEKEEMEELQAYNRRLLHNILPKDVAAHFLARERRNDELYYQSCECVAVMFASIANFSEFYVELEANNEGVECLRLLNEIIADFDEIISEDRFRQLEKIKXIGSXYMAASGLNDSXYDKVGKXHIKALADFAMKLMDQMKYINEHSFNNFQMKIGLNIGPVVAGVIGARKPQYDIWGNXVNVASRMDSXGVPDRIQVXXDMYQVLAANXYQLECRGVVKVKGKGEMMXYFLNGGPPLS

SEQ ID NO: 1579 - protein, 1115 aa, Homo sapiens
  MOD_RES (17)..(17): Selenocysteine
  MOD_RES (33)..(33): Selenocysteine
  MOD_RES (40)..(40): Selenocysteine
  MOD_RES (56)..(56): Selenocysteine
  MOD_RES (94)..(94): Selenocysteine
  MOD_RES (97)..(99): Selenocysteine
  MOD_RES (103)..(103): Selenocysteine
  MOD_RES (153)..(153): Selenocysteine
  MOD_RES (163)..(163): Selenocysteine
  MOD_RES (251)..(251): Selenocysteine
  MOD_RES (269)..(269): Selenocysteine
  MOD_RES (299)..(299): Selenocysteine
  MOD_RES (306)..(306): Selenocysteine
  MOD_RES (321)..(321): Selenocysteine
  MOD_RES (360)..(360): Selenocysteine
  MOD_RES (389)..(389): Selenocysteine
  MOD_RES (396)..(396): Selenocysteine
  MOD_RES (403)..(403): Selenocysteine
  MOD_RES (465)..(465): Selenocysteine
  MOD_RES (500)..(500): Selenocysteine
  MOD_RES (517)..(517): Selenocysteine
  MOD_RES (520)..(520): Selenocysteine
  MOD_RES (549)..(549): Selenocysteine
  MOD_RES (572)..(572): Selenocysteine
  MOD_RES (593)..(593): Selenocysteine
  MOD_RES (614)..(614): Selenocysteine
  MOD_RES (651)..(651): Selenocysteine
  MOD_RES (695)..(695): Selenocysteine
  MOD_RES (711)..(711): Selenocysteine
  MOD_RES (743)..(743): Selenocysteine
  MOD_RES (755)..(755): Selenocysteine
  MOD_RES (807)..(807): Selenocysteine
  MOD_RES (827)..(827): Selenocysteine
  MOD_RES (845)..(845): Selenocysteine
  MOD_RES (866)..(866): Selenocysteine
  MOD_RES (878)..(878): Selenocysteine
  MOD_RES (979)..(979): Selenocysteine
  MOD_RES (983)..(983): Selenocysteine
  MOD_RES (994)..(994): Selenocysteine
  MOD_RES (1004)..(1004): Selenocysteine
  MOD_RES (1057)..(1057): Selenocysteine
  MOD_RES (1067)..(1067): Selenocysteine
  MOD_RES (1076)..(1077): Selenocysteine
  MOD_RES (1105)..(1106): Selenocysteine
MSWFSGLLVPKVDERKXAWGERNGQKRSRRRGXRAGGFCXPRYMSCLRDAEPPSPXPAGPPRCPWQDDAFIRRGGPGKGKELGLRAVALGFEDXEVXXXAGGXAEVAPDAVPRSGRSCWRRLVQVFQSKQFRSAKLERLYQRYFFQMNQSSLXLLMAVLVLLXAVLLAFHAAPARPQPAYVALLACAAALFVGLMVVCNRHSFRQDSMWVVSYVVLGILAAVQVGGALAADPRSPSAGLWCPVFFVYIAYXLLPIRMRAAVLSGLGLSXLHLILAWQLNRGDAFLWKQLGANVLLFLCXNVIGICXHYPAEVSQRQAFQEXRGYIQARLHLQHENRQQERLLLSVLPQHVAMEMKEDINXKKEDMMFHKIYIQKHDNVSILFADIEGFXSLASQCXAQELVMXLNELFARFDKLAAENHCLRIKILGDCYYCVSGLPEARADHAHCCVEMGVDMIEAISLVREVXGVNVNMRVGIHSGRVHCGVLGLRKWQFDVWSNDVXLANHMEAGGRAGRIHIXRAXLQYLNGDYEVEPGRGGERNAYLKEQHIEXFLILGASQKRKEEKAMLAKLQRXRANSMEGLMPRWVPDRAFSRXKDSKAFRQMGIDDSSKDNRGXQDALNPEDEVDEFLSRAIDARSIDQLRKDHVRRFLLXFQREDLEKKYSRKVDPRFGAYVACALLVFCFICFIQLLIFPHSXLMLGIYASIFLLLLIXVLICAVYSCGSLFPKALQRLSRSIVRSRAHSXAVGIFSVLLVFXSAIANMYFIGNMLLSLLASSVFLHISSIGKLAMIFVLGLIYLVLLLLGPPAXIFDNYDLLLGVHGLASSNEXFDGLDCPAAGRVALKYMXPVILLVFALALYLHAQQVESXARLDFLWKLQAXGEKEEMEELQAYNRRLLHNILPKDVAAHFLARERRNDELYYQSCECVAVMFASIANFSEFYVELEANNEGVECLRLLNEIIADFDEIISEERFRQLEKIKXIGSXYMAASGLNASXYDQVGRSHIXALADYAMRLMEQMKHINEHSFNNFQMKIGLNMGPVVAGVIGARKPQYDIWGNXVNVSSRMDSXGVPDRIQVXXDLYQVLAAKGYQLECRGVVKVKGKGEMXXYFLNGGPSS

SEQ ID NO: 1580 - protein, 1168 aa, Homo sapiens
  MOD_RES (17)..(17): Selenocysteine
  MOD_RES (33)..(33): Selenocysteine
  MOD_RES (40)..(40): Selenocysteine
  MOD_RES (56)..(56): Selenocysteine
  MOD_RES (94)..(94): Selenocysteine
  MOD_RES (97)..(99): Selenocysteine
  MOD_RES (103)..(103): Selenocysteine
  MOD_RES (153)..(153): Selenocysteine
  MOD_RES (163)..(163): Selenocysteine
  MOD_RES (251)..(251): Selenocysteine
  MOD_RES (269)..(269): Selenocysteine
  MOD_RES (299)..(299): Selenocysteine
  MOD_RES (306)..(306): Selenocysteine
  MOD_RES (321)..(321): Selenocysteine
  MOD_RES (360)..(360): Selenocysteine
  MOD_RES (389)..(389): Selenocysteine
  MOD_RES (396)..(396): Selenocysteine
  MOD_RES (403)..(403): Selenocysteine
  MOD_RES (465)..(465): Selenocysteine
  MOD_RES (500)..(500): Selenocysteine
  MOD_RES (517)..(517): Selenocysteine
  MOD_RES (520)..(520): Selenocysteine
  MOD_RES (549)..(549): Selenocysteine
  MOD_RES (572)..(572): Selenocysteine
  MOD_RES (593)..(593): Selenocysteine
  MOD_RES (614)..(614): Selenocysteine
  MOD_RES (651)..(651): Selenocysteine
  MOD_RES (695)..(695): Selenocysteine
  MOD_RES (711)..(711): Selenocysteine
  MOD_RES (743)..(743): Selenocysteine
  MOD_RES (755)..(755): Selenocysteine
  MOD_RES (763)..(763): Selenocysteine
  MOD_RES (767)..(767): Selenocysteine
  MOD_RES (780)..(780): Selenocysteine
  MOD_RES (785)..(785): Selenocysteine
  MOD_RES (806)..(806): Selenocysteine
  MOD_RES (809)..(809): Selenocysteine
  MOD_RES (860)..(860): Selenocysteine
  MOD_RES (880)..(880): Selenocysteine
  MOD_RES (898)..(898): Selenocysteine
  MOD_RES (919)..(919): Selenocysteine
  MOD_RES (931)..(931): Selenocysteine
  MOD_RES (1032)..(1032): Selenocysteine
  MOD_RES (1036)..(1036): Selenocysteine
  MOD_RES (1047)..(1047): Selenocysteine
  MOD_RES (1057)..(1057): Selenocysteine
  MOD_RES (1110)..(1110): Selenocysteine
  MOD_RES (1120)..(1120): Selenocysteine
  MOD_RES (1129)..(1130): Selenocysteine
  MOD_RES (1158)..(1159): Selenocysteine
MSWFSGLLVPKVDERKXAWGERNGQKRSRRRGXRAGGFCXPRYMSCLRDAEPPSPXPAGPPRCPWQDDAFIRRGGPGKGKELGLRAVALGFEDXEVXXXAGGXAEVAPDAVPRSGRSCWRRLVQVFQSKQFRSAKLERLYQRYFFQMNQSSLXLLMAVLVLLXAVLLAFHAAPARPQPAYVALLACAAALFVGLMVVCNRHSFRQDSMWVVSYVVLGILAAVQVGGALAADPRSPSAGLWCPVFFVYIAYXLLPIRMRAAVLSGLGLSXLHLILAWQLNRGDAFLWKQLGANVLLFLCXNVIGICXHYPAEVSQRQAFQEXRGYIQARLHLQHENRQQERLLLSVLPQHVAMEMKEDINXKKEDMMFHKIYIQKHDNVSILFADIEGFXSLASQCXAQELVMXLNELFARFDKLAAENHCLRIKILGDCYYCVSGLPEARADHAHCCVEMGVDMIEAISLVREVXGVNVNMRVGIHSGRVHCGVLGLRKWQFDVWSNDVXLANHMEAGGRAGRIHIXRAXLQYLNGDYEVEPGRGGERNAYLKEQHIEXFLILGASQKRKEEKAMLAKLQRXRANSMEGLMPRWVPDRAFSRXKDSKAFRQMGIDDSSKDNRGXQDALNPEDEVDEFLSRAIDARSIDQLRKDHVRRFLLXFQREDLEKKYSRKVDPRFGAYVACALLVFCFICFIQLLIFPHSXLMLGIYASIFLLLLIXVLICAVYSCGSLFPKALQRLSRSIVRSRAHSXAVGIFSVLLVFXSAIANMFXCNHXPIRSCAARMLNLXPADIXACHLQQLNYSLGLDAPLCEGXMPXCSFPEYFIGNMLLSLLASSVFLHISSIGKLAMIFVLGLIYLVLLLLGPPAXIFDNYDLLLGVHGLASSNEXFDGLDCPAAGRVALKYMXPVILLVFALALYLHAQQVESXARLDFLWKLQAXGEKEEMEELQAYNRRLLHNILPKDVAAHFLARERRNDELYYQSCECVAVMFASIANFSEFYVELEANNEGVECLRLLNEIIADFDEIISEERFRQLEKIKXIGSXYMAASGLNASXYDQVGRSHIXALADYAMRLMEQMKHINEHSFNNFQMKIGLNMGPVVAGVIGARKPQYDIWGNXVNVSSRMDSXGVPDRIQVXXDLYQVLAAKGYQLECRGVVKVKGKGEMXXYFLNGGPSS

SEQ ID NO: 1581 - protein, 83 aa, Homo sapiens
  MOD_RES (3)..(3): Selenocysteine
  MOD_RES (22)..(22): Selenocysteine
  MOD_RES (29)..(29): Selenocysteine
  MOD_RES (44)..(44): Selenocysteine
  MOD_RES (83)..(83): Selenocysteine
MVXVCLCHLLQLGANVLLFLCXNVIGICXHYPAEVSQRQAFQEXRGYIQARLHLQHENRQQERLLLSVLPQHVAMEMKEDINX

SEQ ID NO: 1582 - protein, 17 aa, Homo sapiens
MPAKGRYFLNEGEEGPD

SEQ ID NO: 1583 - protein, 81 aa, Homo sapiens
  MOD_RES (28)..(28): Selenocysteine
  MOD_RES (37)..(37): Selenocysteine
  MOD_RES (44)..(44): Selenocysteine
MPAKGRYFLNEGEEGPDQDALYEKYQLXSQHGPLLLXLLLVAAXACVALIIIAFSQGDPSRHQAILGMAFLVLAVFAALSV

SEQ ID NO: 1584 - protein, 433 aa, Homo sapiens
  MOD_RES (28)..(28): Selenocysteine
  MOD_RES (37)..(37): Selenocysteine
  MOD_RES (44)..(44): Selenocysteine
  MOD_RES (100)..(100): Selenocysteine
  MOD_RES (117)..(117): Selenocysteine
  MOD_RES (138)..(138): Selenocysteine
  MOD_RES (155)..(155): Selenocysteine
  MOD_RES (170)..(171): Selenocysteine
  MOD_RES (193)..(193): Selenocysteine
  MOD_RES (210)..(210): Selenocysteine
  MOD_RES (212)..(212): Selenocysteine
  MOD_RES (289)..(289): Selenocysteine
  MOD_RES (342)..(342): Selenocysteine
  MOD_RES (365)..(365): Selenocysteine
  MOD_RES (417)..(417): Selenocysteine
  MOD_RES (420)..(420): Selenocysteine
MPAKGRYFLNEGEEGPDQDALYEKYQLXSQHGPLLLXLLLVAAXACVALIIIAFSQGDPSRHQAILGMAFLVLAVFAALSVLMYVECLLRRWLRALALLXWACLVALGYVLVFDAWXKAACAWEQVPFFLFIVFVVYXLLPFSMRGAVAVGAVSXASHLLVLGSLMGGFXXPSVRVGLQLLANAVIFLCGNLXGAFHKHQMQDASRDLFXYXVKCIQIRRKLRIEKRQQENLLLSVLPAHISMGMKLAIIERLKEHGDRRCMPDNNFHSLYVKRHQNVSILYADIVGFXQLASDCSPKELVVVLNELFGKFDQIAKANECMRIKILGDCYYCVSGLPVSLPXHARNCVKMGLDMCQAIKQVREAXGVDINMRVGIHSGNVLCGVIGLRKWQYDVWSHDVSLANRMEAAGVPGRVHIXEAXLKHLDKALLLQVR

SEQ ID NO: 1585 - protein, 530 aa, Homo sapiens
  MOD_RES (28)..(28): Selenocysteine
  MOD_RES (37)..(37): Selenocysteine
  MOD_RES (44)..(44): Selenocysteine
  MOD_RES (100)..(100): Selenocysteine
  MOD_RES (117)..(117): Selenocysteine
  MOD_RES (138)..(138): Selenocysteine
  MOD_RES (155)..(155): Selenocysteine
  MOD_RES (170)..(171): Selenocysteine
  MOD_RES (193)..(193): Selenocysteine
  MOD_RES (210)..(210): Selenocysteine
  MOD_RES (212)..(212): Selenocysteine
  MOD_RES (289)..(289): Selenocysteine
  MOD_RES (342)..(342): Selenocysteine
  MOD_RES (365)..(365): Selenocysteine
  MOD_RES (417)..(417): Selenocysteine
  MOD_RES (420)..(420): Selenocysteine
  MOD_RES (449)..(449): Selenocysteine
  MOD_RES (485)..(485): Selenocysteine
MPAKGRYFLNEGEEGPDQDALYEKYQLXSQHGPLLLXLLLVAAXACVALIIIAFSQGDPSRHQAILGMAFLVLAVFAALSVLMYVECLLRRWLRALALLXWACLVALGYVLVFDAWXKAACAWEQVPFFLFIVFVVYXLLPFSMRGAVAVGAVSXASHLLVLGSLMGGFXXPSVRVGLQLLANAVIFLCGNLXGAFHKHQMQDASRDLFXYXVKCIQIRRKLRIEKRQQENLLLSVLPAHISMGMKLAIIERLKEHGDRRCMPDNNFHSLYVKRHQNVSILYADIVGFXQLASDCSPKELVVVLNELFGKFDQIAKANECMRIKILGDCYYCVSGLPVSLPXHARNCVKMGLDMCQAIKQVREAXGVDINMRVGIHSGNVLCGVIGLRKWQYDVWSHDVSLANRMEAAGVPGRVHIXEAXLKHLDKAYEVEDGHGQQRDPYLKEMNIRXYLVIDPRSQQPPPPSQHLPRPKGDAALKMRASVRMXRYLESWGAARPFAHLNHRESVSSERSPAPPPDPRQKHVPQGAVGG

SEQ ID NO: 1586 - protein, 734 aa, Homo sapiens
  MOD_RES (28)..(28): Selenocysteine
  MOD_RES (37)..(37): Selenocysteine
  MOD_RES (44)..(44): Selenocysteine
  MOD_RES (100)..(100): Selenocysteine
  MOD_RES (117)..(117): Selenocysteine
  MOD_RES (138)..(138): Selenocysteine
  MOD_RES (155)..(155): Selenocysteine
  MOD_RES (170)..(171): Selenocysteine
  MOD_RES (193)..(193): Selenocysteine
  MOD_RES (210)..(210): Selenocysteine
  MOD_RES (212)..(212): Selenocysteine
  MOD_RES (289)..(289): Selenocysteine
  MOD_RES (342)..(342): Selenocysteine
  MOD_RES (365)..(365): Selenocysteine
  MOD_RES (417)..(417): Selenocysteine
  MOD_RES (420)..(420): Selenocysteine
  MOD_RES (449)..(449): Selenocysteine
  MOD_RES (485)..(485): Selenocysteine
  MOD_RES (511)..(511): Selenocysteine
  MOD_RES (529)..(529): Selenocysteine
  MOD_RES (559)..(559): Selenocysteine
  MOD_RES (571)..(571): Selenocysteine
  MOD_RES (618)..(618): Selenocysteine
  MOD_RES (642)..(642): Selenocysteine
  MOD_RES (653)..(653): Selenocysteine
  MOD_RES (656)..(656): Selenocysteine
  MOD_RES (663)..(663): Selenocysteine
  MOD_RES (670)..(670): Selenocysteine
  MOD_RES (675)..(675): Selenocysteine
  MOD_RES (681)..(681): Selenocysteine
  MOD_RES (703)..(703): Selenocysteine
  MOD_RES (712)..(712): Selenocysteine
  MOD_RES (724)..(724): Selenocysteine
  MOD_RES (733)..(733): Selenocysteine
MPAKGRYFLNEGEEGPDQDALYEKYQLXSQHGPLLLXLLLVAAXACVALIIIAFSQGDPSRHQAILGMAFLVLAVFAALSVLMYVECLLRRWLRALALLXWACLVALGYVLVFDAWXKAACAWEQVPFFLFIVFVVYXLLPFSMRGAVAVGAVSXASHLLVLGSLMGGFXXPSVRVGLQLLANAVIFLCGNLXGAFHKHQMQDASRDLFXYXVKCIQIRRKLRIEKRQQENLLLSVLPAHISMGMKLAIIERLKEHGDRRCMPDNNFHSLYVKRHQNVSILYADIVGFXQLASDCSPKELVVVLNELFGKFDQIAKANECMRIKILGDCYYCVSGLPVSLPXHARNCVKMGLDMCQAIKQVREAXGVDINMRVGIHSGNVLCGVIGLRKWQYDVWSHDVSLANRMEAAGVPGRVHIXEAXLKHLDKAYEVEDGHGQQRDPYLKEMNIRXYLVIDPRSQQPPPPSQHLPRPKGDAALKMRASVRMXRYLESWGAARPFAHLNHRESVSSGEXHVPNGRRPKSVPQRHRRXPDRSMSPKGRSEDDSYDDEMLSAIEGLSSXRPCCSKSDDFYXFGSIFLEKGFEREYRLAPIPRARHDFACASLIFVCILLVHVLLMPRXAALGVSFGLVACVLGLVLGLCFAXKFSRCCPARGXLCXISERVEXQPLLRLXLAVLXIGSLLXVAIINLPLMPFQVPELPVGNEXGLLAASSKXRALCEPLPHLHXVFSRLNELXS

SEQ ID NO: 1587 - protein, 1080 aa, Homo sapiens
  MOD_RES (28)..(28): Selenocysteine
  MOD_RES (37)..(37): Selenocysteine
  MOD_RES (44)..(44): Selenocysteine
  MOD_RES (100)..(100): Selenocysteine
  MOD_RES (117)..(117): Selenocysteine
  MOD_RES (138)..(138): Selenocysteine
  MOD_RES (155)..(155): Selenocysteine
  MOD_RES (170)..(171): Selenocysteine
  MOD_RES (193)..(193): Selenocysteine
  MOD_RES (210)..(210): Selenocysteine
  MOD_RES (212)..(212): Selenocysteine
  MOD_RES (289)..(289): Selenocysteine
  MOD_RES (342)..(342): Selenocysteine
  MOD_RES (365)..(365): Selenocysteine
  MOD_RES (417)..(417): Selenocysteine
  MOD_RES (420)..(420): Selenocysteine
  MOD_RES (449)..(449): Selenocysteine
  MOD_RES (485)..(485): Selenocysteine
  MOD_RES (511)..(511): Selenocysteine
  MOD_RES (529)..(529): Selenocysteine
  MOD_RES (559)..(559): Selenocysteine
  MOD_RES (571)..(571): Selenocysteine
  MOD_RES (618)..(618): Selenocysteine
  MOD_RES (642)..(642): Selenocysteine
  MOD_RES (653)..(653): Selenocysteine
  MOD_RES (656)..(656): Selenocysteine
  MOD_RES (663)..(663): Selenocysteine
  MOD_RES (670)..(670): Selenocysteine
  MOD_RES (675)..(675): Selenocysteine
  MOD_RES (681)..(681): Selenocysteine
  MOD_RES (703)..(703): Selenocysteine
  MOD_RES (712)..(712): Selenocysteine
  MOD_RES (723)..(723): Selenocysteine
  MOD_RES (749)..(749): Selenocysteine
  MOD_RES (778)..(778): Selenocysteine
  MOD_RES (783)..(784): Selenocysteine
  MOD_RES (787)..(787): Selenocysteine
  MOD_RES (797)..(797): Selenocysteine
  MOD_RES (799)..(799): Selenocysteine
  MOD_RES (809)..(809): Selenocysteine
  MOD_RES (812)..(812): Selenocysteine
  MOD_RES (840)..(840): Selenocysteine
  MOD_RES (893)..(893): Selenocysteine
  MOD_RES (932)..(932): Selenocysteine
  MOD_RES (936)..(936): Selenocysteine
  MOD_RES (1015)..(1015): Selenocysteine
  MOD_RES (1025)..(1025): Selenocysteine
  MOD_RES (1034)..(1034): Selenocysteine
  MOD_RES (1037)..(1037): Selenocysteine
  MOD_RES (1039)..(1039): Selenocysteine
  MOD_RES (1064)..(1064): Selenocysteine
  MOD_RES (1069)..(1069): Selenocysteine
  MOD_RES (1071)..(1071): Selenocysteine
MPAKGRYFLNEGEEGPDQDALYEKYQLXSQHGPLLLXLLLVAAXACVALIIIAFSQGDPSRHQAILGMAFLVLAVFAALSVLMYVECLLRRWLRALALLXWACLVALGYVLVFDAWXKAACAWEQVPFFLFIVFVVYXLLPFSMRGAVAVGAVSXASHLLVLGSLMGGFXXPSVRVGLQLLANAVIFLCGNLXGAFHKHQMQDASRDLFXYXVKCIQIRRKLRIEKRQQENLLLSVLPAHISMGMKLAIIERLKEHGDRRCMPDNNFHSLYVKRHQNVSILYADIVGFXQLASDCSPKELVVVLNELFGKFDQIAKANECMRIKILGDCYYCVSGLPVSLPXHARNCVKMGLDMCQAIKQVREAXGVDINMRVGIHSGNVLCGVIGLRKWQYDVWSHDVSLANRMEAAGVPGRVHIXEAXLKHLDKAYEVEDGHGQQRDPYLKEMNIRXYLVIDPRSQQPPPPSQHLPRPKGDAALKMRASVRMXRYLESWGAARPFAHLNHRESVSSGEXHVPNGRRPKSVPQRHRRXPDRSMSPKGRSEDDSYDDEMLSAIEGLSSXRPCCSKSDDFYXFGSIFLEKGFEREYRLAPIPRARHDFACASLIFVCILLVHVLLMPRXAALGVSFGLVACVLGLVLGLCFAXKFSRCCPARGXLCXISERVEXQPLLRLXLAVLXIGSLLXVAIINLPLMPFQVPELPVGNEXGLLAASSKXRALCEPLPYYXCSCVLGFIACSVFLRMSLEPKVVLLXVALVAYLVLFNLSPCWQWDCCGQGLGNLXKPNGXXSGXPSCSWKDLKXMXNFYLVLFYIXLLXLSRQIDYYCRLDCLWKKKFKKEHEEFEXMENVNRLLLENVLPAHVAAHFIGDKLNEDWYHQSYDCVCVMFASVPDFKVFYXECDVNKEGLECLRLLNEIIADFDELLLKPKFSGVEKIKXIGSXYMAAAGLSVASGHENQELERQHAHIGVMVEFSIALMSKLDGINRHSFNSFRLRVGINHGPVIAGVIGARKPQYDIWGNXVNVASRMESXGELGKIQVXEEXCXILQGLGYSCECRGLINVKGKGELRXYFVCXDXAKFQGLGLN

SEQ ID NO: 1588 - protein, 109 aa, Homo sapiens
  MOD_RES (28)..(28): Selenocysteine
  MOD_RES (37)..(37): Selenocysteine
  MOD_RES (44)..(44): Selenocysteine
MPAKGRYFLNEGEEGPDQDALYEKYQLXSQHGPLLLXLLLVAAXACVALIIIAFSQGRHGLAMLPRLVLNSWPQVILLPWPPKVLGLQDPSRHQAILGMAFLVLAVFAA

SEQ ID NO: 1589 - protein, 1120 aa, Homo sapiens
  MOD_RES (10)..(10): Selenocysteine
  MOD_RES (17)..(17): Selenocysteine
  MOD_RES (21)..(21): Selenocysteine
  MOD_RES (40)..(40): Selenocysteine
  MOD_RES (46)..(46): Selenocysteine
  MOD_RES (103)..(103): Selenocysteine
  MOD_RES (106)..(106): Selenocysteine
  MOD_RES (156)..(156): Selenocysteine
  MOD_RES (192)..(192): Selenocysteine
  MOD_RES (195)..(195): Selenocysteine
  MOD_RES (220)..(220): Selenocysteine
  MOD_RES (236)..(237): Selenocysteine
  MOD_RES (240)..(240): Selenocysteine
  MOD_RES (249)..(249): Selenocysteine
  MOD_RES (254)..(255): Selenocysteine
  MOD_RES (277)..(277): Selenocysteine
  MOD_RES (281)..(281): Selenocysteine
  MOD_RES (290)..(290): Selenocysteine
  MOD_RES (299)..(299): Selenocysteine
  MOD_RES (333)..(333): Selenocysteine
  MOD_RES (353)..(353): Selenocysteine
  MOD_RES (365)..(365): Selenocysteine
  MOD_RES (391)..(391): Selenocysteine
  MOD_RES (424)..(424): Selenocysteine
  MOD_RES (428)..(429): Selenocysteine
  MOD_RES (492)..(492): Selenocysteine
  MOD_RES (500)..(500): Selenocysteine
  MOD_RES (555)..(555): Selenocysteine
  MOD_RES (584)..(584): Selenocysteine
  MOD_RES (617)..(617): Selenocysteine
  MOD_RES (619)..(619): Selenocysteine
  MOD_RES (638)..(638): Selenocysteine
  MOD_RES (643)..(643): Selenocysteine
  MOD_RES (674)..(674): Selenocysteine
  MOD_RES (708)..(708): Selenocysteine
  MOD_RES (715)..(715): Selenocysteine
  MOD_RES (742)..(742): Selenocysteine
  MOD_RES (744)..(744): Selenocysteine
  MOD_RES (766)..(766): Selenocysteine
  MOD_RES (791)..(791): Selenocysteine
  MOD_RES (867)..(867): Selenocysteine
  MOD_RES (904)..(904): Selenocysteine
  MOD_RES (908)..(908): Selenocysteine
  MOD_RES (940)..(940): Selenocysteine
  MOD_RES (983)..(983): Selenocysteine
  MOD_RES (993)..(993): Selenocysteine
  MOD_RES (1005)..(1005): Selenocysteine
  MOD_RES (1036)..(1036): Selenocysteine
  MOD_RES (1087)..(1087): Selenocysteine
  MOD_RES (1098)..(1098): Selenocysteine
  MOD_RES (1105)..(1105): Selenocysteine
  MOD_RES (1114)..(1114): Selenocysteine
MELSDVRCLXGSEELYXIHPXPPAGDGRSASRPQRLLWQXAVRHIXEQRFIHGHRGGSGSGSGGSGKASDPAGGGPNHHAPQLSGDSALPLYSLGPGERAHSXCGXKVFPERSGSGSASGSGGGGDLGFLHLDCAPSNSDFFLNGGYSYRGVIFPXLRNSFKSRDLERLYQRYFLGQRRKSEVVMNVLDVLXKLXLLVLHLSLASAPMDPLKGILLGFFXGIEVVICALVVVRKDXXSHXYLQYSGVVXWVAMXXQILAAGLGYGLLGDGIGYVLFXLFAXYSMLPLPLXWAILAGLGXSLLQVILQVVIPRLAVISINQVVAQAVLFMCMNXAGIFISYLSDRAQRQAFLEXRRCVEARLRLEXENQRQERLVLSVLPRFVVLEMINDMXNVEDEHLQHQFHRIYIHRYENVSILFADVKGFXNLSXXLSAQELVRMLNELFARFDRLAHEHHCLRIKILGDCYYCVSGLPEPRQDHAHCCVEMGLSMIKXIRYVRSRXKHDVDMRIGIHSGSVLCGVLGLRKWQFDVWSWDVDIANKLESGGIPGRIHISKAXLDCLNGDYNVEEGHGKERNEFLRKHNIEXYLIKQPEDSLLSLPEDIVKESVSSSDRRNSGAXFXEGSWSPELPFDNIVGKQNXLAALXRNSINLLPNHLAQALHVQSGPEEINKRIEHXIDLRSGDKLRREHIKPFSLMFKDSSLEHKYFVFXGVLAMVXCAVFLRLNSVLKLAVLLIMIAIYALLXEXVYAGLFLRYDNLNHSGEDFLGXKEVSLLLMAMFLLAVFYHGQQLEYXARLDFLWRVQAKEEINEMKELREHNENMLRNILPSHVARHFLEKDRDNEELYSQSYDAVGVMFASIPGFADFYSQXEMNNQGVECLRLLNEIIADFDELLGEDRFQDIEKIKXIGSXYMAVSGLSPEKQQCEDKWGHLCALADFSLALXESIQEINKHSFNNFELRIGISHGSVVAGVIGAKKPQYDIWGKXVNLASRMDSXGVSGRIQVPEEXYLILKDQGFAFDYRGEIYVKGISEQEGKIKXYFLLGRVQPNPFILPPRRLPGQYSLAAVVLGLVQSLNRQRQKQLLNENNNXGIIKGHYNRRXLLSPSGXEPGAQAEGXDKSDLP

SEQ ID NO: 1590 - protein, 1251 aa, Homo sapiens
  MOD_RES (10)..(10): Selenocysteine
  MOD_RES (17)..(17): Selenocysteine
  MOD_RES (21)..(21): Selenocysteine
  MOD_RES (40)..(40): Selenocysteine
  MOD_RES (46)..(46): Selenocysteine
  MOD_RES (103)..(103): Selenocysteine
  MOD_RES (106)..(106): Selenocysteine
  MOD_RES (156)..(156): Selenocysteine
  MOD_RES (192)..(192): Selenocysteine
  MOD_RES (195)..(195): Selenocysteine
  MOD_RES (220)..(220): Selenocysteine
  MOD_RES (236)..(237): Selenocysteine
  MOD_RES (240)..(240): Selenocysteine
  MOD_RES (249)..(249): Selenocysteine
  MOD_RES (254)..(255): Selenocysteine
  MOD_RES (277)..(277): Selenocysteine
  MOD_RES (281)..(281): Selenocysteine
  MOD_RES (290)..(290): Selenocysteine
  MOD_RES (299)..(299): Selenocysteine
  MOD_RES (333)..(333): Selenocysteine
  MOD_RES (353)..(353): Selenocysteine
  MOD_RES (365)..(365): Selenocysteine
  MOD_RES (391)..(391): Selenocysteine
  MOD_RES (424)..(424): Selenocysteine
  MOD_RES (428)..(429): Selenocysteine
  MOD_RES (492)..(492): Selenocysteine
  MOD_RES (500)..(500): Selenocysteine
  MOD_RES (555)..(555): Selenocysteine
  MOD_RES (584)..(584): Selenocysteine
  MOD_RES (617)..(617): Selenocysteine
  MOD_RES (619)..(619): Selenocysteine
  MOD_RES (638)..(638): Selenocysteine
  MOD_RES (643)..(643): Selenocysteine
  MOD_RES (674)..(674): Selenocysteine
  MOD_RES (727)..(727): Selenocysteine
  MOD_RES (742)..(742): Selenocysteine
  MOD_RES (759)..(760): Selenocysteine
  MOD_RES (774)..(774): Selenocysteine
  MOD_RES (781)..(781): Selenocysteine
  MOD_RES (819)..(819): Selenocysteine
  MOD_RES (827)..(827): Selenocysteine
  MOD_RES (839)..(839): Selenocysteine
  MOD_RES (846)..(846): Selenocysteine
  MOD_RES (873)..(873): Selenocysteine
  MOD_RES (875)..(875): Selenocysteine
  MOD_RES (897)..(897): Selenocysteine
  MOD_RES (922)..(922): Selenocysteine
  MOD_RES (998)..(998): Selenocysteine
  MOD_RES (1035)..(1035): Selenocysteine
  MOD_RES (1039)..(1039): Selenocysteine
  MOD_RES (1071)..(1071): Selenocysteine
  MOD_RES (1114)..(1114): Selenocysteine
  MOD_RES (1124)..(1124): Selenocysteine
  MOD_RES (1136)..(1136): Selenocysteine
  MOD_RES (1167)..(1167): Selenocysteine
  MOD_RES (1218)..(1218): Selenocysteine
  MOD_RES (1229)..(1229): Selenocysteine
  MOD_RES (1236)..(1236): Selenocysteine
  MOD_RES (1245)..(1245): Selenocysteine
MELSDVRCLXGSEELYXIHPXPPAGDGRSASRPQRLLWQXAVRHIXEQRFIHGHRGGSGSGSGGSGKASDPAGGGPNHHAPQLSGDSALPLYSLGPGERAHSXCGXKVFPERSGSGSASGSGGGGDLGFLHLDCAPSNSDFFLNGGYSYRGVIFPXLRNSFKSRDLERLYQRYFLGQRRKSEVVMNVLDVLXKLXLLVLHLSLASAPMDPLKGILLGFFXGIEVVICALVVVRKDXXSHXYLQYSGVVXWVAMXXQILAAGLGYGLLGDGIGYVLFXLFAXYSMLPLPLXWAILAGLGXSLLQVILQVVIPRLAVISINQVVAQAVLFMCMNXAGIFISYLSDRAQRQAFLEXRRCVEARLRLEXENQRQERLVLSVLPRFVVLEMINDMXNVEDEHLQHQFHRIYIHRYENVSILFADVKGFXNLSXXLSAQELVRMLNELFARFDRLAHEHHCLRIKILGDCYYCVSGLPEPRQDHAHCCVEMGLSMIKXIRYVRSRXKHDVDMRIGIHSGSVLCGVLGLRKWQFDVWSWDVDIANKLESGGIPGRIHISKAXLDCLNGDYNVEEGHGKERNEFLRKHNIEXYLIKQPEDSLLSLPEDIVKESVSSSDRRNSGAXFXEGSWSPELPFDNIVGKQNXLAALXRNSINLLPNHLAQALHVQSGPEEINKRIEHXIDLRSGDKLRREHIKPFSLMFKDSSLEHKYSQMRDEVFKSNLVCAFIVLLFIXAIQSLLPSSRVMPMXIQFSILIMLHSALVLIXXAEDYKCLPLILRKXCCWINEXYLARNVIIFASILINFLGAILNILWCDFDKSIPLKNLXFNSSAVFXDICSYPEYFVFXGVLAMVXCAVFLRLNSVLKLAVLLIMIAIYALLXEXVYAGLFLRYDNLNHSGEDFLGXKEVSLLLMAMFLLAVFYHGQQLEYXARLDFLWRVQAKEEINEMKELREHNENMLRNILPSHVARHFLEKDRDNEELYSQSYDAVGVMFASIPGFADFYSQXEMNNQGVECLRLLNEIIADFDELLGEDRFQDIEKIKXIGSXYMAVSGLSPEKQQCEDKWGHLCALADFSLALXESIQEINKHSFNNFELRIGISHGSVVAGVIGAKKPQYDIWGKXVNLASRMDSXGVSGRIQVPEEXYLILKDQGFAFDYRGEIYVKGISEQEGKIKXYFLLGRVQPNPFILPPRRLPGQYSLAAVVLGLVQSLNRQRQKQLLNENNNXGIIKGHYNRRXLLSPSGXEPGAQAEGXDKSDLP

SEQ ID NO: 1591 - protein, 252 aa, Homo sapiens
  MOD_RES (6)..(6): Selenocysteine
  MOD_RES (39)..(39): Selenocysteine
  MOD_RES (43)..(44): Selenocysteine
  MOD_RES (107)..(107): Selenocysteine
  MOD_RES (115)..(115): Selenocysteine
  MOD_RES (170)..(170): Selenocysteine
  MOD_RES (199)..(199): Selenocysteine
  MOD_RES (232)..(232): Selenocysteine
  MOD_RES (234)..(234): Selenocysteine
MINDMXNVEDEHLQHQFHRIYIHRYENVSILFADVKGFXNLSXXLSAQELVRMLNELFARFDRLAHEHHCLRIKILGDCYYCVSGLPEPRQDHAHCCVEMGLSMIKXIRYVRSRXKHDVDMRIGIHSGSVLCGVLGLRKWQFDVWSWDVDIANKLESGGIPGRIHISKAXLDCLNGDYNVEEGHGKERNEFLRKHNIEXYLIKQPEDSLLSLPEDIVKESVSSSDRRNSGAXFXEGSWSPELPFDNIVGKQN

SEQ ID NO: 1592 - protein, 257 aa, Homo sapiens
  MOD_RES (20)..(20): Selenocysteine
  MOD_RES (22)..(22): Selenocysteine
  MOD_RES (63)..(63): Selenocysteine
  MOD_RES (96)..(96): Selenocysteine
  MOD_RES (136)..(136): Selenocysteine
  MOD_RES (148)..(148): Selenocysteine
  MOD_RES (151)..(151): Selenocysteine
  MOD_RES (157)..(157): Selenocysteine
  MOD_RES (164)..(164): Selenocysteine
  MOD_RES (190)..(190): Selenocysteine
  MOD_RES (193)..(193): Selenocysteine
  MOD_RES (219)..(219): Selenocysteine
  MOD_RES (233)..(233): Selenocysteine
  MOD_RES (237)..(237): Selenocysteine
IEQFCQEKKEMVNMRVGVHXGXVLCGILGMRRFKFDVWSNDVNLANLMEQLGVAGKVHISEAXAKYLDDRYEMEDGKVIERLGQSVVADQLKGLKXYLISGQRAKESRCSCAEALLSGFEVIDGSQVSSGPRGQGXASSGNVSDLAQXVKXFDNLKXCPSCGIXFAPKSEAGAEGGAPQNGCQDEHKNSXKVXSSWLLFLSVPLLAHPPKASGGPNPKXQNGLLSPPQEEKLXNSQXSLCEILQEKGRWAGVSLDQS

SEQ ID NO: 1593 - protein, 1353 aa, Homo sapiens
  MOD_RES (15)..(15): Selenocysteine
  MOD_RES (112)..(112): Selenocysteine
  MOD_RES (163)..(163): Selenocysteine
  MOD_RES (165)..(165): Selenocysteine
  MOD_RES (175)..(175): Selenocysteine
  MOD_RES (180)..(180): Selenocysteine
  MOD_RES (187)..(187): Selenocysteine
  MOD_RES (196)..(196): Selenocysteine
  MOD_RES (208)..(208): Selenocysteine
  MOD_RES (210)..(210): Selenocysteine
  MOD_RES (214)..(214): Selenocysteine
  MOD_RES (216)..(216): Selenocysteine
  MOD_RES (236)..(236): Selenocysteine
  MOD_RES (258)..(258): Selenocysteine
  MOD_RES (309)..(309): Selenocysteine
  MOD_RES (363)..(363): Selenocysteine
  MOD_RES (404)..(404): Selenocysteine
  MOD_RES (433)..(433): Selenocysteine
  MOD_RES (440)..(440): Selenocysteine
  MOD_RES (492)..(492): Selenocysteine
  MOD_RES (494)..(494): Selenocysteine
  MOD_RES (535)..(535): Selenocysteine
  MOD_RES (568)..(568): Selenocysteine
  MOD_RES (608)..(608): Selenocysteine
  MOD_RES (620)..(620): Selenocysteine
  MOD_RES (623)..(623): Selenocysteine
  MOD_RES (629)..(629): Selenocysteine
  MOD_RES (636)..(636): Selenocysteine
  MOD_RES (662)..(662): Selenocysteine
  MOD_RES (672)..(672): Selenocysteine
  MOD_RES (686)..(686): Selenocysteine
  MOD_RES (690)..(690): Selenocysteine
  MOD_RES (724)..(724): Selenocysteine
  MOD_RES (765)..(765): Selenocysteine
  MOD_RES (779)..(779): Selenocysteine
  MOD_RES (784)..(784): Selenocysteine
  MOD_RES (795)..(796): Selenocysteine
  MOD_RES (800)..(800): Selenocysteine
  MOD_RES (803)..(804): Selenocysteine
  MOD_RES (813)..(813): Selenocysteine
  MOD_RES (852)..(852): Selenocysteine
  MOD_RES (885)..(885): Selenocysteine
  MOD_RES (890)..(890): Selenocysteine
  MOD_RES (898)..(898): Selenocysteine
  MOD_RES (925)..(925): Selenocysteine
  MOD_RES (947)..(947): Selenocysteine
  MOD_RES (1019)..(1019): Selenocysteine
  MOD_RES (1049)..(1049): Selenocysteine
  MOD_RES (1109)..(1109): Selenocysteine
  MOD_RES (1113)..(1113): Selenocysteine
  MOD_RES (1122)..(1122): Selenocysteine
  MOD_RES (1173)..(1173): Selenocysteine
  MOD_RES (1179)..(1180): Selenocysteine
  MOD_RES (1190)..(1190): Selenocysteine
  MOD_RES (1199)..(1200): Selenocysteine
  MOD_RES (1228)..(1228): Selenocysteine
  MOD_RES (1239)..(1239): Selenocysteine
  MOD_RES (1246)..(1246): Selenocysteine
  MOD_RES (1275)..(1275): Selenocysteine
  MOD_RES (1291)..(1291): Selenocysteine
  MOD_RES (1299)..(1299): Selenocysteine
  MOD_RES (1336)..(1336): Selenocysteine
  MOD_RES (1345)..(1345): Selenocysteine
MASPPHQQLLHHHSXEVSCDSSGDSNSVRVKINPKQLSSNSHPKHCKYSISSSCSSSGDSGGVPRRVGGGGRLRRQKKLPQLFERASSRWWDPKFDSVNLEEACLERCFPQXQRRFRYALFYIGFACLLWSIYFAVHMRSRLIVMVAPALCFLLVCVGFFLFXFXKLYARHYAWXSLALXLLVFALXLAAQFQVLXPVSGRGDSSNLXAXARPXDXCLSQVGSFSMCIEVLFLLYXVMHLPLYLSLCLGVAYSVLFEXFGYHFRDEACFPSPGAGALHWELLSRGLLHGCIHAIGVHLFVMSQVRSRSXFLKVGQSIMHGKDLEVEKALKERMIHSVMPRIIADDLMKQGDEESENSVKRHAXSSPKNRKKKSSIQKAPIAFRPFKMQQIEEVSILFADIVGFXKMSANKSAHALVGLLNDLFGRFDRLCEEXKCEKISXLGDCYYCVAGCPEPRADHAYCCIEMGLGMIKAIEQFCQEKKEMVNMRVGVHXGXVLCGILGMRRFKFDVWSNDVNLANLMEQLGVAGKVHISEAXAKYLDDRYEMEDGKVIERLGQSVVADQLKGLKXYLISGQRAKESRCSCAEALLSGFEVIDGSQVSSGPRGQGXASSGNVSDLAQXVKXFDNLKXCPSCGIXFAPKSEAGAEGGAPQNGCQDEHKNSXKASGGPNPKXQNGLLSPPQEEKLXNSQXSLCEILQEKGRWAGVSLDQSALLPLRFKNIREKXDAHFVDVIKEDSLMKDYFFKPPINQFSLNFLDQELERSYRXSYQEEVIKNSPVKXFASPXFSSLLDVFLSXXVFLXLSXXCFLKYEAAXVPPPPAALAVFSAALLLEVLSLAVSIRMVFFLEDVMACXKRLLEWIAGWLPRHCIGAILVSLPALAVYSHVXSEYEXNIHFPVFXGSAALIAVVHYCNFCQLSSWMRSSLAXVVGAGPLLLLYVSLCPDSSVLXSPLDAVQNFSSERNPCNSSVPRDLRRPASLIGQEVVLVFFLLLLLVWFLNREFEVSYRLHYHGDVEADLHRXKIQSMRDQADWLLRNIIPYHVAEQLKVSQXYSKNHDSGGVIFASIVNFSEFYEENYEGGKECYRVLNELIGDFDELLSKPDYSSIEKIKXIGAXYMAASGLNXAQAQDGSHPQEHLQILFEFAKEMMRVVDDFNNNMLWFNFKLRVGFNHGPLXAGVIGXXKLLYDIWGDXVNIASRMDXXGVECRIQVSEESYRVLSKMGYDFDYRGXVNVKGKGQMKXYLYPKCXDHRVIPQHQLSISPDIRVQVDGSIGRSPXDEIANLVPSVQYVDKXSLGSDSSXQAKDAHLSPKRPWKEPVKAEERGRFGKAIEKDDCDEXGIEEANELXKLNVSKSV

SEQ ID NO: 1594 - protein, 215 aa, Homo sapiens
  MOD_RES (1)..(1): Any amino acid
  MOD_RES (12)..(12): Selenocysteine
  MOD_RES (17)..(17): Selenocysteine
  MOD_RES (28)..(29): Selenocysteine
  MOD_RES (33)..(33): Selenocysteine
  MOD_RES (36)..(37): Selenocysteine
  MOD_RES (46)..(46): Selenocysteine
  MOD_RES (85)..(85): Selenocysteine
  MOD_RES (118)..(118): Selenocysteine
  MOD_RES (123)..(123): Selenocysteine
  MOD_RES (131)..(131): Selenocysteine
  MOD_RES (158)..(158): Selenocysteine
  MOD_RES (180)..(180): Selenocysteine
XEEVIKNSPVKXFASPXFSSLLDVFLSXXVFLXLSXXCFLKYEAAXVPPPPAALAVFSAALLLEVLSLAVSIRMVFFLEDVMACXKRLLEWIAGWLPRHCIGAILVSLPALAVYSHVXSEYEXNIHFPVFXGSAALIAVVHYCNFCQLSSWMRSSLAXVVGAGPLLLLYVSLCPDSSVLXSPLDAVQNFRRREPCGEGDSKFPFSSQEESCRAGA

SEQ ID NO: 1595 - protein, 72 aa, Homo sapiens
  MOD_RES (1)..(1): Any amino acid
  MOD_RES (30)..(30): Selenocysteine
XFDVWSNDVNLANLMEQLGVAGKVHISEAXAKYLDDRYEMEDGKVIERLGQSVVADQLKDLPFVRNHICSQI

SEQ ID NO: 1596 - protein, 176 aa, Homo sapiens
  MOD_RES (2)..(2): Selenocysteine
  MOD_RES (138)..(138): Selenocysteine
MXMCSGARLALLVYGIIMHSSVYSSPAAAGLRFPGIRPEEEAYGEDGNPLPDFDGSEPPGAGSPASAPRAAAAWYRPAGRRDVAHGILNEAYRKVLDQLSAGKHLQSLVARGVGGSLGGGAGDDAEPLSKRHSDGIFXDSYSRYRKQMAVKKYLAAVLGKRYKQRVKNKGRRIAYL

SEQ ID NO: 1597 - protein, 74 aa, Homo sapiens
  MOD_RES (62)..(62): Selenocysteine
MAGVVHVSLAALLLLPMAPAMHSDCIFKKEQAMCLEKIQRANELMGFNDSSPGCPGMWDNIXCWKPAHVGEMVL

SEQ ID NO: 1598 - protein, 447 aa, Homo sapiens
  MOD_RES (62)..(62): Selenocysteine
  MOD_RES (98)..(98): Selenocysteine
  MOD_RES (122)..(122): Selenocysteine
  MOD_RES (137)..(137): Selenocysteine
  MOD_RES (142)..(142): Selenocysteine
  MOD_RES (146)..(146): Selenocysteine
  MOD_RES (148)..(149): Selenocysteine
  MOD_RES (163)..(163): Selenocysteine
  MOD_RES (202)..(202): Selenocysteine
  MOD_RES (232)..(232): Selenocysteine
  MOD_RES (237)..(237): Selenocysteine
  MOD_RES (249)..(249): Selenocysteine
  MOD_RES (255)..(255): Selenocysteine
  MOD_RES (257)..(257): Selenocysteine
  MOD_RES (261)..(261): Selenocysteine
  MOD_RES (265)..(265): Selenocysteine
  MOD_RES (273)..(273): Selenocysteine
  MOD_RES (282)..(282): Selenocysteine
  MOD_RES (334)..(334): Selenocysteine
  MOD_RES (346)..(346): Selenocysteine
  MOD_RES (423)..(423): Selenocysteine
  MOD_RES (447)..(447): Selenocysteine
MAGVVHVSLAALLLLPMAPAMHSDCIFKKEQAMCLEKIQRANELMGFNDSSPGCPGMWDNIXCWKPAHVGEMVLVSCPELFRIFNPDQDMGVVSRNCXEDGWSEPFPHYFDACGFDEYESEXGDQDYYYLSVKALYXVGYSXSLVXLXXAMVILCRFRKLHCXRNFIHMNLFVSFMLRAISVFIKDWILYAEQDSNHCFISXVECKAVMVFFHYCVVSNYFWLFIEGLYLFXLLVEXFFPERRYFYWYXIIGWGXPXVCVXVWAXLRLYFDDXGCWDMNDSXALWWVIKGPVVGSIMVNFVLFIGIIVILVQKLQSPDMGGNESSIYLRLARSXLLLIPLFGIHYXVFAFSPENVSKRERLVFELGLGSFQGFVVAVLYCFLNGEVQAEIKRKWRSWKVNRYFAVDFKHRHPSLASSGVNGGXQLSILSKSSSQIRMSGLPADNLAX

SEQ ID NO: 1599 - protein, 468 aa, Homo sapiens
  MOD_RES (62)..(62): Selenocysteine
  MOD_RES (92)..(92): Selenocysteine
  MOD_RES (94)..(94): Selenocysteine
  MOD_RES (119)..(119): Selenocysteine
  MOD_RES (143)..(143): Selenocysteine
  MOD_RES (158)..(158): Selenocysteine
  MOD_RES (163)..(163): Selenocysteine
  MOD_RES (167)..(167): Selenocysteine
  MOD_RES (169)..(170): Selenocysteine
  MOD_RES (184)..(184): Selenocysteine
  MOD_RES (223)..(223): Selenocysteine
  MOD_RES (253)..(253): Selenocysteine
  MOD_RES (258)..(258): Selenocysteine
  MOD_RES (270)..(270): Selenocysteine
  MOD_RES (276)..(276): Selenocysteine
  MOD_RES (278)..(278): Selenocysteine
  MOD_RES (282)..(282): Selenocysteine
  MOD_RES (286)..(286): Selenocysteine
  MOD_RES (294)..(294): Selenocysteine
  MOD_RES (303)..(303): Selenocysteine
  MOD_RES (355)..(355): Selenocysteine
  MOD_RES (367)..(367): Selenocysteine
  MOD_RES (444)..(444): Selenocysteine
  MOD_RES (468)..(468): Selenocysteine
MAGVVHVSLAALLLLPMAPAMHSDCIFKKEQAMCLEKIQRANELMGFNDSSPGCPGMWDNIXCWKPAHVGEMVLVSCPELFRIFNPDQVWEXEXIGESDFGDSNSLDLSDMGVVSRNCXEDGWSEPFPHYFDACGFDEYESEXGDQDYYYLSVKALYXVGYSXSLVXLXXAMVILCRFRKLHCXRNFIHMNLFVSFMLRAISVFIKDWILYAEQDSNHCFISXVECKAVMVFFHYCVVSNYFWLFIEGLYLFXLLVEXFFPERRYFYWYXIIGWGXPXVCVXVWAXLRLYFDDXGCWDMNDSXALWWVIKGPVVGSIMVNFVLFIGIIVILVQKLQSPDMGGNESSIYLRLARSXLLLIPLFGIHYXVFAFSPENVSKRERLVFELGLGSFQGFVVAVLYCFLNGEVQAEIKRKWRSWKVNRYFAVDFKHRHPSLASSGVNGGXQLSILSKSSSQIRMSGLPADNLAX

SEQ ID NO: 1600 - protein, 496 aa, Homo sapiens
  MOD_RES (62)..(62): Selenocysteine
  MOD_RES (92)..(92): Selenocysteine
  MOD_RES (94)..(94): Selenocysteine
  MOD_RES (119)..(119): Selenocysteine
  MOD_RES (143)..(143): Selenocysteine
  MOD_RES (158)..(158): Selenocysteine
  MOD_RES (163)..(163): Selenocysteine
  MOD_RES (167)..(167): Selenocysteine
  MOD_RES (169)..(170): Selenocysteine
  MOD_RES (184)..(184): Selenocysteine
  MOD_RES (223)..(223): Selenocysteine
  MOD_RES (253)..(253): Selenocysteine
  MOD_RES (258)..(258): Selenocysteine
  MOD_RES (270)..(270): Selenocysteine
  MOD_RES (276)..(276): Selenocysteine
  MOD_RES (278)..(278): Selenocysteine
  MOD_RES (282)..(282): Selenocysteine
  MOD_RES (286)..(286): Selenocysteine
  MOD_RES (294)..(294): Selenocysteine
  MOD_RES (303)..(303): Selenocysteine
  MOD_RES (374)..(374): Selenocysteine
  MOD_RES (376)..(376): Selenocysteine
  MOD_RES (383)..(383): Selenocysteine
  MOD_RES (395)..(395): Selenocysteine
  MOD_RES (472)..(472): Selenocysteine
  MOD_RES (496)..(496): Selenocysteine
MAGVVHVSLAALLLLPMAPAMHSDCIFKKEQAMCLEKIQRANELMGFNDSSPGCPGMWDNIXCWKPAHVGEMVLVSCPELFRIFNPDQVWEXEXIGESDFGDSNSLDLSDMGVVSRNCXEDGWSEPFPHYFDACGFDEYESEXGDQDYYYLSVKALYXVGYSXSLVXLXXAMVILCRFRKLHCXRNFIHMNLFVSFMLRAISVFIKDWILYAEQDSNHCFISXVECKAVMVFFHYCVVSNYFWLFIEGLYLFXLLVEXFFPERRYFYWYXIIGWGXPXVCVXVWAXLRLYFDDXGCWDMNDSXALWWVIKGPVVGSIMVNFVLFIGIIVILVQKLQSPDMGGNESSIYFSCVQKCYCKPQRAQQHSCKMSELSXIXLRLARSXLLLIPLFGIHYXVFAFSPENVSKRERLVFELGLGSFQGFVVAVLYCFLNGEVQAEIKRKWRSWKVNRYFAVDFKHRHPSLASSGVNGGXQLSILSKSSSQIRMSGLPADNLAX

SEQ ID NO: 1601 - protein, 524 aa, Homo sapiens
  MOD_RES (62)..(62): Selenocysteine
  MOD_RES (92)..(92): Selenocysteine
  MOD_RES (94)..(94): Selenocysteine
  MOD_RES (119)..(119): Selenocysteine
  MOD_RES (143)..(143): Selenocysteine
  MOD_RES (158)..(158): Selenocysteine
  MOD_RES (163)..(163): Selenocysteine
  MOD_RES (167)..(167): Selenocysteine
  MOD_RES (169)..(170): Selenocysteine
  MOD_RES (184)..(184): Selenocysteine
  MOD_RES (223)..(223): Selenocysteine
  MOD_RES (253)..(253): Selenocysteine
  MOD_RES (258)..(258): Selenocysteine
  MOD_RES (270)..(270): Selenocysteine
  MOD_RES (276)..(276): Selenocysteine
  MOD_RES (278)..(278): Selenocysteine
  MOD_RES (282)..(282): Selenocysteine
  MOD_RES (286)..(286): Selenocysteine
  MOD_RES (294)..(294): Selenocysteine
  MOD_RES (303)..(303): Selenocysteine
  MOD_RES (350)..(350): Selenocysteine
  MOD_RES (402)..(402): Selenocysteine
  MOD_RES (404)..(404): Selenocysteine
  MOD_RES (411)..(411): Selenocysteine
  MOD_RES (423)..(423): Selenocysteine
  MOD_RES (500)..(500): Selenocysteine
  MOD_RES (524)..(524): Selenocysteine
MAGVVHVSLAALLLLPMAPAMHSDCIFKKEQAMCLEKIQRANELMGFNDSSPGCPGMWDNIXCWKPAHVGEMVLVSCPELFRIFNPDQVWEXEXIGESDFGDSNSLDLSDMGVVSRNCXEDGWSEPFPHYFDACGFDEYESEXGDQDYYYLSVKALYXVGYSXSLVXLXXAMVILCRFRKLHCXRNFIHMNLFVSFMLRAISVFIKDWILYAEQDSNHCFISXVECKAVMVFFHYCVVSNYFWLFIEGLYLFXLLVEXFFPERRYFYWYXIIGWGXPXVCVXVWAXLRLYFDDXGCWDMNDSXALWWVIKGPVVGSIMVNFVLFIGIIVILVQKLQSPDMGGNESSIYLXNLSPRVPKKAREDPLPVPSDQHSLPFLSCVQKCYCKPQRAQQHSCKMSELSXIXLRLARSXLLLIPLFGIHYXVFAFSPENVSKRERLVFELGLGSFQGFVVAVLYCFLNGEVQAEIKRKWRSWKVNRYFAVDFKHRHPSLASSGVNGGXQLSILSKSSSQIRMSGLPADNLAX

SEQ ID NO: 1602 - protein, 148 aa, Homo sapiens
  MOD_RES (1)..(1): Any amino acid
  MOD_RES (3)..(3): Selenocysteine
  MOD_RES (11)..(11): Selenocysteine
  MOD_RES (20)..(20): Selenocysteine
  MOD_RES (67)..(67): Selenocysteine
  MOD_RES (100)..(100): Selenocysteine
  MOD_RES (112)..(112): Selenocysteine
XAXLRLYFDDXGCWDMNDSXALWWVIKGPVVGSIMVNFVLFIGIIVILVQKLQSPDMGGNESSIYLXNLSPRVPKKAREDPLPVPSDQHSLPFLRLARSXLLLIPLFGIHYXVFAFSPENVSKRERLVFELGLGSFQGFVVAVLYCFL

SEQ ID NO: 1603 - protein, 560 aa, Homo sapiens
  MOD_RES (5)..(5): Selenocysteine
  MOD_RES (25)..(25): Selenocysteine
  MOD_RES (38)..(38): Selenocysteine
  MOD_RES (55)..(55): Selenocysteine
  MOD_RES (66)..(66): Selenocysteine
  MOD_RES (68)..(68): Selenocysteine
  MOD_RES (77)..(77): Selenocysteine
  MOD_RES (94)..(94): Selenocysteine
  MOD_RES (97)..(97): Selenocysteine
  MOD_RES (104)..(104): Selenocysteine
  MOD_RES (113)..(113): Selenocysteine
  MOD_RES (122)..(122): Selenocysteine
  MOD_RES (150)..(150): Selenocysteine
  MOD_RES (153)..(153): Selenocysteine
  MOD_RES (160)..(160): Selenocysteine
  MOD_RES (165)..(165): Selenocysteine
  MOD_RES (187)..(187): Selenocysteine
  MOD_RES (190)..(190): Selenocysteine
  MOD_RES (197)..(197): Selenocysteine
  MOD_RES (213)..(213): Selenocysteine
  MOD_RES (223)..(223): Selenocysteine
  MOD_RES (234)..(234): Selenocysteine
  MOD_RES (262)..(262): Selenocysteine
  MOD_RES (267)..(267): Selenocysteine
  MOD_RES (269)..(269): Selenocysteine
  MOD_RES (297)..(297): Selenocysteine
  MOD_RES (365)..(365): Selenocysteine
  MOD_RES (381)..(381): Selenocysteine
  MOD_RES (393)..(393): Selenocysteine
  MOD_RES (421)..(421): Selenocysteine
  MOD_RES (453)..(453): Selenocysteine
  MOD_RES (466)..(466): Selenocysteine
  MOD_RES (468)..(468): Selenocysteine
  MOD_RES (473)..(473): Selenocysteine
  MOD_RES (482)..(482): Selenocysteine
  MOD_RES (498)..(498): Selenocysteine
  MOD_RES (517)..(517): Selenocysteine
  MOD_RES (543)..(543): Selenocysteine
  MOD_RES (546)..(546): Selenocysteine
  MOD_RES (551)..(551): Selenocysteine
  MOD_RES (558)..(559): Selenocysteine
MDLKXVLSLPRYPGEFLHPVVYACXAVMLLCLLASFVXYIVHQSAIRISRKGRHXLLNFCFHAALXFXVFAGGINRXKYPILCQAVGIVLHYSXLSXMLWIGVXARNIYKQVXKKAPLCLDXDQPPYPRQPLLRFYLVSGGVPFIICGVXAAXNIRNYGXEDEDXAYCWMAWEPSLGAFYGPAAIIXLVXCVYFLGXYVQLRRHPGRRYELRXQPEEQRRLAXPEGGRGIRPGXPPAHDAPGASVLQNEHSFQAQLRAAAFXLFLFXAXWAFGALAVSQGHFLDMVFSCLYGAFCVXLGLFVLIHHCAKREDVWQCWWACCPPRKDAHPALDANGAALGRAACLHSPGLGQPRGFAHPPGPCKMXNLQAAQGHASCLSPAXPCCAKMHCEPLXADEAHVHLQEEGAFGHDPHLHGCLQGRXKPPYFSRHPAEEPEYAYHIPSSLDGSPRSSRXDSPPSSLDGPAGXHXLACCXQGDPFPMVXQPEGSDGSPALYSCPXQPGREAALGPGHLEMLRRXQSLPFGGPSQNGLPKGKLLEGLPFGXDGXGNIRXGPWKNEXXV

SEQ ID NO: 1604 - protein, 463 aa, Homo sapiens
  MOD_RES (7)..(7): Selenocysteine
  MOD_RES (16)..(16): Selenocysteine
  MOD_RES (25)..(25): Selenocysteine
  MOD_RES (53)..(53): Selenocysteine
  MOD_RES (56)..(56): Selenocysteine
  MOD_RES (63)..(63): Selenocysteine
  MOD_RES (68)..(68): Selenocysteine
  MOD_RES (90)..(90): Selenocysteine
  MOD_RES (93)..(93): Selenocysteine
  MOD_RES (100)..(100): Selenocysteine
  MOD_RES (116)..(116): Selenocysteine
  MOD_RES (126)..(126): Selenocysteine
  MOD_RES (137)..(137): Selenocysteine
  MOD_RES (165)..(165): Selenocysteine
  MOD_RES (170)..(170): Selenocysteine
  MOD_RES (172)..(172): Selenocysteine
  MOD_RES (200)..(200): Selenocysteine
  MOD_RES (268)..(268): Selenocysteine
  MOD_RES (284)..(284): Selenocysteine
  MOD_RES (296)..(296): Selenocysteine
  MOD_RES (324)..(324): Selenocysteine
  MOD_RES (356)..(356): Selenocysteine
  MOD_RES (369)..(369): Selenocysteine
  MOD_RES (371)..(371): Selenocysteine
  MOD_RES (376)..(376): Selenocysteine
  MOD_RES (385)..(385): Selenocysteine
  MOD_RES (401)..(401): Selenocysteine
  MOD_RES (420)..(420): Selenocysteine
  MOD_RES (446)..(446): Selenocysteine
  MOD_RES (449)..(449): Selenocysteine
  MOD_RES (454)..(454): Selenocysteine
  MOD_RES (461)..(462): Selenocysteine
MLWIGVXARNIYKQVXKKAPLCLDXDQPPYPRQPLLRFYLVSGGVPFIICGVXAAXNIRNYGXEDEDXAYCWMAWEPSLGAFYGPAAIIXLVXCVYFLGXYVQLRRHPGRRYELRXQPEEQRRLAXPEGGRGIRPGXPPAHDAPGASVLQNEHSFQAQLRAAAFXLFLFXAXWAFGALAVSQGHFLDMVFSCLYGAFCVXLGLFVLIHHCAKREDVWQCWWACCPPRKDAHPALDANGAALGRAACLHSPGLGQPRGFAHPPGPCKMXNLQAAQGHASCLSPAXPCCAKMHCEPLXADEAHVHLQEEGAFGHDPHLHGCLQGRXKPPYFSRHPAEEPEYAYHIPSSLDGSPRSSRXDSPPSSLDGPAGXHXLACCXQGDPFPMVXQPEGSDGSPALYSCPXQPGREAALGPGHLEMLRRXQSLPFGGPSQNGLPKGKLLEGLPFGXDGXGNIRXGPWKNEXXV

SEQ ID NO: 1605 - protein, 1279 aa, Homo sapiens
  MOD_RES (38)..(38): Selenocysteine
  MOD_RES (48)..(48): Selenocysteine
  MOD_RES (53)..(53): Selenocysteine
  MOD_RES (58)..(58): Selenocysteine
  MOD_RES (78)..(78): Selenocysteine
  MOD_RES (106)..(106): Selenocysteine
  MOD_RES (149)..(149): Selenocysteine
  MOD_RES (157)..(157): Selenocysteine
  MOD_RES (182)..(182): Selenocysteine
  MOD_RES (193)..(193): Selenocysteine
  MOD_RES (213)..(213): Selenocysteine
  MOD_RES (225)..(225): Selenocysteine
  MOD_RES (239)..(239): Selenocysteine
  MOD_RES (251)..(251): Selenocysteine
  MOD_RES (267)..(267): Selenocysteine
  MOD_RES (284)..(284): Selenocysteine
  MOD_RES (300)..(300): Selenocysteine
  MOD_RES (315)..(315): Selenocysteine
  MOD_RES (325)..(325): Selenocysteine
  MOD_RES (330)..(330): Selenocysteine
  MOD_RES (340)..(340): Selenocysteine
  MOD_RES (346)..(346): Selenocysteine
  MOD_RES (371)..(371): Selenocysteine
  MOD_RES (385)..(385): Selenocysteine
  MOD_RES (415)..(415): Selenocysteine
  MOD_RES (422)..(422): Selenocysteine
  MOD_RES (487)..(487): Selenocysteine
  MOD_RES (503)..(503): Selenocysteine
  MOD_RES (508)..(508): Selenocysteine
  MOD_RES (511)..(511): Selenocysteine
  MOD_RES (548)..(548): Selenocysteine
  MOD_RES (603)..(603): Selenocysteine
  MOD_RES (607)..(607): Selenocysteine
  MOD_RES (628)..(628): Selenocysteine
  MOD_RES (650)..(650): Selenocysteine
  MOD_RES (669)..(669): Selenocysteine
  MOD_RES (674)..(674): Selenocysteine
  MOD_RES (699)..(699): Selenocysteine
  MOD_RES (720)..(720): Selenocysteine
  MOD_RES (725)..(725): Selenocysteine
  MOD_RES (745)..(745): Selenocysteine
  MOD_RES (758)..(758): Selenocysteine
  MOD_RES (775)..(775): Selenocysteine
  MOD_RES (786)..(786): Selenocysteine
  MOD_RES (788)..(788): Selenocysteine
  MOD_RES (797)..(797): Selenocysteine
  MOD_RES (814)..(814): Selenocysteine
  MOD_RES (817)..(817): Selenocysteine
  MOD_RES (824)..(824): Selenocysteine
  MOD_RES (833)..(833): Selenocysteine
  MOD_RES (842)..(842): Selenocysteine
  MOD_RES (870)..(870): Selenocysteine
  MOD_RES (873)..(873): Selenocysteine
  MOD_RES (880)..(880): Selenocysteine
  MOD_RES (885)..(885): Selenocysteine
  MOD_RES (906)..(906): Selenocysteine
  MOD_RES (909)..(909): Selenocysteine
  MOD_RES (916)..(916): Selenocysteine
  MOD_RES (932)..(932): Selenocysteine
  MOD_RES (942)..(942): Selenocysteine
  MOD_RES (953)..(953): Selenocysteine
  MOD_RES (981)..(981): Selenocysteine
  MOD_RES (986)..(986): Selenocysteine
  MOD_RES (988)..(988): Selenocysteine
  MOD_RES (1016)..(1016): Selenocysteine
  MOD_RES (1084)..(1084): Selenocysteine
  MOD_RES (1100)..(1100): Selenocysteine
  MOD_RES (1112)..(1112): Selenocysteine
  MOD_RES (1140)..(1140): Selenocysteine
  MOD_RES (1172)..(1172): Selenocysteine
  MOD_RES (1185)..(1185): Selenocysteine
  MOD_RES (1187)..(1187): Selenocysteine
  MOD_RES (1192)..(1192): Selenocysteine
  MOD_RES (1201)..(1201): Selenocysteine
  MOD_RES (1217)..(1217): Selenocysteine
  MOD_RES (1236)..(1236): Selenocysteine
  MOD_RES (1262)..(1262): Selenocysteine
  MOD_RES (1265)..(1265): Selenocysteine
  MOD_RES (1270)..(1270): Selenocysteine
  MOD_RES (1277)..(1278): Selenocysteine
MRGHGNHSRLKSRCASLGNVHHHQAQMAHGAHCRGGRXPQSPDSRGPXAGGHXRGRWXYRPIEALINVSFPGAKGGRXAEGEPSWAWVFRSGYLQRQALPGLPVSXRVAACWWQHHPGRDSGFLGPGFIDLLREEPSGRADGKAAAQKXGRLYLFPXFLGNKLPEAADSFGEIASGNSVIFXSVLQSSHPPGXPPPSARKPSPGAAMLVCEEXLELGAQGCWGSXSPRGQAVSLVGGPXAGGSRLGGAGCXMGLLMALQARRPRDGXWADPRRCSRAVEGSGLXRAALVSPGPSGVEEDXRREGCVLVGSWRSSXHRSRVLIINXPSGRXPWSQGSLGSXGRYNQXRAPGSQQQGLCSDAALHEDFVPEPXPAFFQYPPQAFSKXKVRDLGRGGLYAFSKEEKVSEAQRVEAYEXHGLGLSXGRQNPVPSPCKPGCVCQGLALDAEAWPRHPGRRPCAAKEACLGPPGCSGELSLPEEEGIAPGAAXAAPAWVPHGRVSRFLXVKLFXYVXMYQCKQERILRLCISGESGRYVRRSRFRNFAALMVSXGVPGVLQLGARPLRGGGHPYGDSQAGKVVEWRAGDRASGLSAGERRFLSQSELQXWPRXPHCVGKKVPQPVGAADLAPDXSLCRKEGSSASRSCRPGPGHLXRREEDSFRQLAFPRFEEVXFPPLXAAERAPSVHGGHSLASQGLVLAGRXRSVASGGKQELSGPLAACIPXQDLKXVLSLPRYPGEFLHPVVYACXAVMLLCLLASFVXYIVHQSAIRISRKGRHXLLNFCFHAALXFXVFAGGINRXKYPILCQAVGIVLHYSXLSXMLWIGVXARNIYKQVXKKAPLCLDXDQPPYPRQPLLRFYLVSGGVPFIICGVXAAXNIRNYGXEDEDXACWMAWEPSLGAFYGPAAIIXLVXCVYFLGXYVQLRRHPGRRYELRXQPEEQRRLAXPEGGRGIRPGXPPAHDAPGASVLQNEHSFQAQLRAAAFXLFLFXAXWAFGALAVSQGHFLDMVFSCLYGAFCVXLGLFVLIHHCAKREDVWQCWWACCPPRKDAHPALDANGAALGRAACLHSPGLGQPRGFAHPPGPCKMXNLQAAQGHASCLSPAXPCCAKMHCEPLXADEAHVHLQEEGAFGHDPHLHGCLQGRXKPPYFSRHPAEEPEYAYHIPSSLDGSPRSSRXDSPPSSLDGPAGXHXLACCXQGDPFPMVXQPEGSDGSPALYSCPXQPGREAALGPGHLEMLRRXQSLPFGGPSQNGLPKGKLLEGLPFGXDGXGNIRXGPWKNEXXV

SEQ ID NO: 1606 - protein, 1121 aa, Homo sapiens
  MOD_RES (86)..(86): Selenocysteine
  MOD_RES (88)..(88): Selenocysteine
  MOD_RES (97)..(97): Selenocysteine
  MOD_RES (122)..(122): Selenocysteine
  MOD_RES (148)..(148): Selenocysteine
  MOD_RES (151)..(151): Selenocysteine
  MOD_RES (189)..(189): Selenocysteine
  MOD_RES (193)..(193): Selenocysteine
  MOD_RES (216)..(216): Selenocysteine
  MOD_RES (247)..(247): Selenocysteine
  MOD_RES (277)..(277): Selenocysteine
  MOD_RES (307)..(307): Selenocysteine
  MOD_RES (310)..(310): Selenocysteine
  MOD_RES (314)..(314): Selenocysteine
  MOD_RES (329)..(329): Selenocysteine
  MOD_RES (348)..(348): Selenocysteine
  MOD_RES (370)..(370): Selenocysteine
  MOD_RES (375)..(375): Selenocysteine
  MOD_RES (386)..(386): Selenocysteine
  MOD_RES (397)..(397): Selenocysteine
  MOD_RES (420)..(420): Selenocysteine
  MOD_RES (424)..(424): Selenocysteine
  MOD_RES (429)..(429): Selenocysteine
  MOD_RES (442)..(442): Selenocysteine
  MOD_RES (451)..(451): Selenocysteine
  MOD_RES (560)..(560): Selenocysteine
  MOD_RES (570)..(570): Selenocysteine
  MOD_RES (573)..(573): Selenocysteine
  MOD_RES (601)..(601): Selenocysteine
  MOD_RES (610)..(610): Selenocysteine
  MOD_RES (612)..(612): Selenocysteine
  MOD_RES (624)..(624): Selenocysteine
  MOD_RES (632)..(632): Selenocysteine
  MOD_RES (648)..(648): Selenocysteine
  MOD_RES (663)..(663): Selenocysteine
  MOD_RES (685)..(685): Selenocysteine
  MOD_RES (722)..(722): Selenocysteine
  MOD_RES (760)..(760): Selenocysteine
  MOD_RES (778)..(778): Selenocysteine
  MOD_RES (785)..(785): Selenocysteine
  MOD_RES (807)..(808): Selenocysteine
  MOD_RES (850)..(850): Selenocysteine
  MOD_RES (920)..(920): Selenocysteine
  MOD_RES (947)..(947): Selenocysteine
  MOD_RES (1010)..(1010): Selenocysteine
  MOD_RES (1034)..(1034): Selenocysteine
  MOD_RES (1041)..(1041): Selenocysteine
  MOD_RES (1098)..(1098): Selenocysteine
  MOD_RES (1112)..(1112): Selenocysteine
  MOD_RES (1119)..(1120): Selenocysteine
MGAGGRRMRGAPARLLLPLLPWLLLLLAPEARGAPGCPLSIRSCKCSGERPKGLSGGVPGPARRRVVCSGGDLPEPPEPGLLPNGXVXLLLSNNKIXGLRNGSFLGLSLLEKLDLRNNIISXVQPGAFLGLGELKRLDLSNNRIGCLXSEXFQGLPRLLRLNISGNIFSSLQPGVFDELPALKVVDLGXEFLXCDCHLRWLLPWAQNRSLQLSEHXLCAYPSALHAQALGSLQEAQLCCEGALELHXHHLIPSLRQVVFQGDRLPFQCSASYLGNDXRIRWYHNRAPVEGDEQAGILLAESLIHDCXFIXSELXLSHIGVWASGEWECXVSMAQGNASKKVEIVVLEXSASYCPAERVANNRGDFRWPRXLAGIXAYQSCLQYPFXSVPLGGGAPGXRASRRCDRAGRWEPGDYSHCLYXNDIXRVLYXFVLMPINASNALXLAHQLRVYXAEAASFSDMMDVVYVAQMIQKFLGYVDQIKELVEVMVDMASNLMLVDEHLLWLAQREDKACSRIVGALERIGGAALSPHAQHISVELSAFPREVGGAGAGLHPVVYPCXALLLLCLFAXIIXYILNHSSIRVSRKGWHMLLNLCFHIAMXSAVFAGGIXLXNYQMVCQAVGIXLHYSSLSXLLWMGVKARVLHKELXWRAPPPQEGDPALPXPSPMLRFYLIAGGIPLIICGIXAAVNIHNYRDHSPYCWLVWRPSLGAFYIPVALILLIXWIYFLCAGLRLRGPLAQNPKAGNSRASLEAGEELRGSXRLRGSGPLLSDSGSLLAXGSARVGXPGPPEDGDSLYSPGVQLGALVXXHFLYLAMWACGALAVSQRWLPRVVCSCLYGVAASALGLFVFXHHCARRRDVRASWRACCPPASPAAPHAPPRALPAAAEDGSPVFGEGPPSLKSSPSGSSGHPLALGPCKLXNLQLAQSQVCEAGAAAGGEGEPEPAGXRGNLAHRHPNNVHHGRRAHKSRAKGHRAGEACGKNRLKALRGGAAGALELLSSESGSLHNSPXDSYLGSSRNSPGAGLQLEGEPMLXPSEGSDXSAAPLSEAGRAGQRRSASRDSLKGGGALEKESHRRSYPLNAASLNGAPKGGKYDDVXLMGAEVASGGCMKXGLWKSEXXV

SEQ ID NO: 1607 - protein, 1338 aa, Homo sapiens
  MOD_RES (86)..(86): Selenocysteine
  MOD_RES (88)..(88): Selenocysteine
  MOD_RES (97)..(97): Selenocysteine
  MOD_RES (122)..(122): Selenocysteine
  MOD_RES (148)..(148): Selenocysteine
  MOD_RES (151)..(151): Selenocysteine
  MOD_RES (189)..(189): Selenocysteine
  MOD_RES (193)..(193): Selenocysteine
  MOD_RES (216)..(216): Selenocysteine
  MOD_RES (247)..(247): Selenocysteine
  MOD_RES (277)..(277): Selenocysteine
  MOD_RES (307)..(307): Selenocysteine
  MOD_RES (310)..(310): Selenocysteine
  MOD_RES (314)..(314): Selenocysteine
  MOD_RES (329)..(329): Selenocysteine
  MOD_RES (348)..(348): Selenocysteine
  MOD_RES (370)..(370): Selenocysteine
  MOD_RES (375)..(375): Selenocysteine
  MOD_RES (386)..(386): Selenocysteine
  MOD_RES (397)..(397): Selenocysteine
  MOD_RES (420)..(420): Selenocysteine
  MOD_RES (424)..(424): Selenocysteine
  MOD_RES (429)..(429): Selenocysteine
  MOD_RES (442)..(442): Selenocysteine
  MOD_RES (451)..(451): Selenocysteine
  MOD_RES (557)..(557): Selenocysteine
  MOD_RES (559)..(559): Selenocysteine
  MOD_RES (571)..(571): Selenocysteine
  MOD_RES (597)..(598): Selenocysteine
  MOD_RES (642)..(642): Selenocysteine
  MOD_RES (660)..(660): Selenocysteine
  MOD_RES (676)..(676): Selenocysteine
  MOD_RES (683)..(683): Selenocysteine
  MOD_RES (692)..(692): Selenocysteine
  MOD_RES (725)..(725): Selenocysteine
  MOD_RES (777)..(777): Selenocysteine
  MOD_RES (787)..(787): Selenocysteine
  MOD_RES (790)..(790): Selenocysteine
  MOD_RES (818)..(818): Selenocysteine
  MOD_RES (827)..(827): Selenocysteine
  MOD_RES (829)..(829): Selenocysteine
  MOD_RES (841)..(841): Selenocysteine
  MOD_RES (849)..(849): Selenocysteine
  MOD_RES (865)..(865): Selenocysteine
  MOD_RES (880)..(880): Selenocysteine
  MOD_RES (902)..(902): Selenocysteine
  MOD_RES (939)..(939): Selenocysteine
  MOD_RES (977)..(977): Selenocysteine
  MOD_RES (995)..(995): Selenocysteine
  MOD_RES (1002)..(1002): Selenocysteine
  MOD_RES (1024)..(1025): Selenocysteine
  MOD_RES (1067)..(1067): Selenocysteine
  MOD_RES (1137)..(1137): Selenocysteine
  MOD_RES (1164)..(1164): Selenocysteine
  MOD_RES (1227)..(1227): Selenocysteine
  MOD_RES (1251)..(1251): Selenocysteine
  MOD_RES (1258)..(1258): Selenocysteine
  MOD_RES (1315)..(1315): Selenocysteine
  MOD_RES (1329)..(1329): Selenocysteine
  MOD_RES (1336)..(1337): Selenocysteine
MGAGGRRMRGAPARLLLPLLPWLLLLLAPEARGAPGCPLSIRSCKCSGERPKGLSGGVPGPARRRVVCSGGDLPEPPEPGLLPNGXVXLLLSNNKIXGLRNGSFLGLSLLEKLDLRNNIISXVQPGAFLGLGELKRLDLSNNRIGCLXSEXFQGLPRLLRLNISGNIFSSLQPGVFDELPALKVVDLGXEFLXCDCHLRWLLPWAQNRSLQLSEHXLCAYPSALHAQALGSLQEAQLCCEGALELHXHHLIPSLRQVVFQGDRLPFQCSASYLGNDXRIRWYHNRAPVEGDEQAGILLAESLIHDCXFIXSELXLSHIGVWASGEWECXVSMAQGNASKKVEIVVLEXSASYCPAERVANNRGDFRWPRXLAGIXAYQSCLQYPFXSVPLGGGAPGXRASRRCDRAGRWEPGDYSHCLYXNDIXRVLYXFVLMPINASNALXLAHQLRVYXAEAASFSDMMDVVYVAQMIQKFLGYVDQIKELVEVMVDMASNLMLVDEHLLWLAQREDKACSRIVGALERIGGAALSPHAQHISVNARNVALEAYLIKPHSYVGLXCXAFQRREGGVPGXRPGSPGQNPPPEPEPPADQQLRFRCXXGRPNVSLSSFHIKNSVALASIQLPPSLFSSLPAALAPPVPPDCXLQLLVFRNGRLFHSHSNXSRPGAAGPGKRRGVAXPVIFAGXSGCGVGNLXEPVAVSLRHWAEGAEPVAAWWSQEGPGEAGGWXSEGCQLRSSQPNVSALHCQHLGNVAVLMELSAFPREVGGAGAGLHPVVYPCXALLLLCLFAXIIXYILNHSSIRVSRKGWHMLLNLCFHIAMXSAVFAGGIXLXNYQMVCQAVGIXLHYSSLSXLLWMGVKARVLHKELXWRAPPPQEGDPALPXPSPMLRFYLIAGGIPLIICGIXAAVNIHNYRDHSPYCWLVWRPSLGAFYIPVALILLIXWIYFLCAGLRLRGPLAQNPKAGNSRASLEAGEELRGSXRLRGSGPLLSDSGSLLAXGSARVGXPGPPEDGDSLYSPGVQLGALVXXHFLYLAMWACGALAVSQRWLPRVVCSCLYGVAASALGLFVFXHHCARRRDVRASWRACCPPASPAAPHAPPRALPAAAEDGSPVFGEGPPSLKSSPSGSSGHPLALGPCKLXNLQLAQSQVCEAGAAAGGEGEPEPAGXRGNLAHRHPNNVHHGRRAHKSRAKGHRAGEACGKNRLKALRGGAAGALELLSSESGSLHNSPXDSYLGSSRNSPGAGLQLEGEPMLXPSEGSDXSAAPLSEAGRAGQRRSASRDSLKGGGALEKESHRRSYPLNAASLNGAPKGGKYDDVXLMGAEVASGGCMKXGLWKSEXXV

SEQ ID NO: 1608 - protein, 190 aa, Homo sapiens
  MOD_RES (55)..(55): Selenocysteine
  MOD_RES (80)..(80): Selenocysteine
  MOD_RES (106)..(106): Selenocysteine
  MOD_RES (109)..(109): Selenocysteine
  MOD_RES (147)..(147): Selenocysteine
  MOD_RES (151)..(151): Selenocysteine
  MOD_RES (174)..(174): Selenocysteine
RAAVQGLEPRPAHLSLGCVAAFLYWFPREHLLHGGKGKVPSYLGCLGLLSNNKIXGLRNGSFLGLSLLEKLDLRNNIISXVQPGAFLGLGELKRLDLSNNRIGCLXSEXFQGLPRLLRLNISGNIFSSLQPGVFDELPALKVVDLGXEFLXCDCHLRWLLPWAQNRSLQLSEHXLCAYPSALHAQALGSL

SEQ ID NO: 1609 - protein, 97 aa, Homo sapiens
  MOD_RES (22)..(22): Selenocysteine
  MOD_RES (46)..(46): Selenocysteine
  MOD_RES (55)..(55): Selenocysteine
  MOD_RES (64)..(64): Selenocysteine
  MOD_RES (70)..(70): Selenocysteine
  MOD_RES (72)..(72): Selenocysteine
MASYIDQDMQVLWYQDGRIVEXDESQGIFVEKNMIHNCSLIASALXISNIQAGSXGNWGCHVQXKRGNNXRXVDIVVLESSAQYCPPERVVNNKGDF

SEQ ID NO: 1610 - protein, 616 aa, Homo sapiens
  MOD_RES (78)..(78): Selenocysteine
  MOD_RES (83)..(83): Selenocysteine
  MOD_RES (85)..(85): Selenocysteine
  MOD_RES (137)..(137): Selenocysteine
  MOD_RES (153)..(153): Selenocysteine
  MOD_RES (172)..(172): Selenocysteine
  MOD_RES (186)..(186): Selenocysteine
  MOD_RES (208)..(208): Selenocysteine
  MOD_RES (212)..(212): Selenocysteine
  MOD_RES (226)..(226): Selenocysteine
  MOD_RES (234)..(234): Selenocysteine
  MOD_RES (247)..(247): Selenocysteine
  MOD_RES (286)..(286): Selenocysteine
  MOD_RES (310)..(310): Selenocysteine
  MOD_RES (319)..(319): Selenocysteine
  MOD_RES (328)..(328): Selenocysteine
  MOD_RES (334)..(334): Selenocysteine
  MOD_RES (336)..(336): Selenocysteine
  MOD_RES (366)..(366): Selenocysteine
  MOD_RES (371)..(371): Selenocysteine
  MOD_RES (377)..(377): Selenocysteine
  MOD_RES (380)..(380): Selenocysteine
  MOD_RES (421)..(421): Selenocysteine
  MOD_RES (435)..(435): Selenocysteine
  MOD_RES (440)..(440): Selenocysteine
  MOD_RES (448)..(448): Selenocysteine
  MOD_RES (474)..(474): Selenocysteine
  MOD_RES (523)..(523): Selenocysteine
  MOD_RES (535)..(535): Selenocysteine
  MOD_RES (550)..(550): Selenocysteine
  MOD_RES (553)..(553): Selenocysteine
  MOD_RES (556)..(556): Selenocysteine
  MOD_RES (558)..(558): Selenocysteine
  MOD_RES (569)..(569): Selenocysteine
  MOD_RES (596)..(596): Selenocysteine
  MOD_RES (613)..(613): Selenocysteine
MEPPGRRRGRAQPPLLLPLSLLALLALLGGGGGGGAAALPAGCKHDGRPRGAGRAAGAAEGKVVCSSLELAQVLPPDXLPNRXVXLILSNNKISELKNGSFSGLSLLERLDLRNNLISSIDPGAFWGLSSLKRLDLXNNRIGCLNADIFRGLXNLVRLNLSGNLFSSLSQGXFDYLASLRSLEFQXEYLLCDCNILWMHRWVKEKNIXVRDXRCVYPKSLQAQPVXGVKQELLXCDPPLELPSFYMXPSHRQVVFEGDSLPFQCMASYIDQDMQVLWYQDGRIVEXDESQGIFVEKNMIHNCSLIASALXISNIQAGSXGNWGCHVQXKRGNNXRXVDIVVLESSAQYCPPERVVNNKGDFRWPRXLAGIXAYLQCXRNXHGSGIYPGNPQDERKAWRRCDRGGFWADDDYSRCQYANDVXRVLYMFNQMPLNLXNAVAXARQLLAYXVEAANFSDKMDVIFVAEMIEKFGRFXKEEKSKELGDVMVDIASNIMLADERVLWLAQREAKACSRIVQCLQRIAXYRLAGGAHVYSXYSPNIALEAYVIKSXGFXGMXCXVFQKVAASDRXGLSDYGRRDPEGNLDKQLSFKCNVSNXFSSLALKVCYILQSFKXIYS

SEQ ID NO: 1611 - protein, 1321 aa, Homo sapiens
  MOD_RES (78)..(78): Selenocysteine
  MOD_RES (83)..(83): Selenocysteine
  MOD_RES (85)..(85): Selenocysteine
  MOD_RES (137)..(137): Selenocysteine
  MOD_RES (153)..(153): Selenocysteine
  MOD_RES (172)..(172): Selenocysteine
  MOD_RES (186)..(186): Selenocysteine
  MOD_RES (208)..(208): Selenocysteine
  MOD_RES (212)..(212): Selenocysteine
  MOD_RES (226)..(226): Selenocysteine
  MOD_RES (234)..(234): Selenocysteine
  MOD_RES (247)..(247): Selenocysteine
  MOD_RES (286)..(286): Selenocysteine
  MOD_RES (310)..(310): Selenocysteine
  MOD_RES (319)..(319): Selenocysteine
  MOD_RES (328)..(328): Selenocysteine
  MOD_RES (334)..(334): Selenocysteine
  MOD_RES (336)..(336): Selenocysteine
  MOD_RES (366)..(366): Selenocysteine
  MOD_RES (371)..(371): Selenocysteine
  MOD_RES (377)..(377): Selenocysteine
  MOD_RES (380)..(380): Selenocysteine
  MOD_RES (421)..(421): Selenocysteine
  MOD_RES (435)..(435): Selenocysteine
  MOD_RES (440)..(440): Selenocysteine
  MOD_RES (448)..(448): Selenocysteine
  MOD_RES (474)..(474): Selenocysteine
  MOD_RES (523)..(523): Selenocysteine
  MOD_RES (535)..(535): Selenocysteine
  MOD_RES (550)..(550): Selenocysteine
  MOD_RES (553)..(553): Selenocysteine
  MOD_RES (556)..(556): Selenocysteine
  MOD_RES (558)..(558): Selenocysteine
  MOD_RES (569)..(569): Selenocysteine
  MOD_RES (596)..(596): Selenocysteine
  MOD_RES (605)..(605): Selenocysteine
  MOD_RES (629)..(629): Selenocysteine
  MOD_RES (650)..(650): Selenocysteine
  MOD_RES (654)..(654): Selenocysteine
  MOD_RES (664)..(664): Selenocysteine
  MOD_RES (667)..(667): Selenocysteine
  MOD_RES (672)..(672): Selenocysteine
  MOD_RES (681)..(681): Selenocysteine
  MOD_RES (689)..(689): Selenocysteine
  MOD_RES (730)..(731): Selenocysteine
  MOD_RES (747)..(747): Selenocysteine
  MOD_RES (753)..(753): Selenocysteine
  MOD_RES (765)..(766): Selenocysteine
  MOD_RES (808)..(808): Selenocysteine
  MOD_RES (817)..(817): Selenocysteine
  MOD_RES (819)..(819): Selenocysteine
  MOD_RES (836)..(836): Selenocysteine
  MOD_RES (839)..(839): Selenocysteine
  MOD_RES (846)..(846): Selenocysteine
  MOD_RES (855)..(855): Selenocysteine
  MOD_RES (892)..(892): Selenocysteine
  MOD_RES (928)..(928): Selenocysteine
  MOD_RES (956)..(956): Selenocysteine
  MOD_RES (983)..(983): Selenocysteine
  MOD_RES (991)..(991): Selenocysteine
  MOD_RES (1002)..(1002): Selenocysteine
  MOD_RES (1034)..(1034): Selenocysteine
  MOD_RES (1060)..(1060): Selenocysteine
  MOD_RES (1082)..(1082): Selenocysteine
  MOD_RES (1099)..(1099): Selenocysteine
  MOD_RES (1116)..(1116): Selenocysteine
  MOD_RES (1135)..(1135): Selenocysteine
  MOD_RES (1143)..(1143): Selenocysteine
  MOD_RES (1164)..(1164): Selenocysteine
  MOD_RES (1185)..(1185): Selenocysteine
  MOD_RES (1196)..(1196): Selenocysteine
  MOD_RES (1245)..(1245): Selenocysteine
  MOD_RES (1259)..(1260): Selenocysteine
  MOD_RES (1304)..(1304): Selenocysteine
  MOD_RES (1307)..(1307): Selenocysteine
  MOD_RES (1312)..(1312): Selenocysteine
  MOD_RES (1319)..(1320): Selenocysteine
MEPPGRRRGRAQPPLLLPLSLLALLALLGGGGGGGAAALPAGCKHDGRPRGAGRAAGAAEGKVVCSSLELAQVLPPDXLPNRXVXLILSNNKISELKNGSFSGLSLLERLDLRNNLISSIDPGAFWGLSSLKRLDLXNNRIGCLNADIFRGLXNLVRLNLSGNLFSSLSQGXFDYLASLRSLEFQXEYLLCDCNILWMHRWVKEKNIXVRDXRCVYPKSLQAQPVXGVKQELLXCDPPLELPSFYMXPSHRQVVFEGDSLPFQCMASYIDQDMQVLWYQDGRIVEXDESQGIFVEKNMIHNCSLIASALXISNIQAGSXGNWGCHVQXKRGNNXRXVDIVVLESSAQYCPPERVVNNKGDFRWPRXLAGIXAYLQCXRNXHGSGIYPGNPQDERKAWRRCDRGGFWADDDYSRCQYANDVXRVLYMFNQMPLNLXNAVAXARQLLAYXVEAANFSDKMDVIFVAEMIEKFGRFXKEEKSKELGDVMVDIASNIMLADERVLWLAQREAKACSRIVQCLQRIAXYRLAGGAHVYSXYSPNIALEAYVIKSXGFXGMXCXVFQKVAASDRXGLSDYGRRDPEGNLDKQLSFKCNVSNXFSSLALKNXIVEASIQLPPSLFSPKQKRELRPXDDSLYKLQLIAFRNGKLFPAXGNSXNLADDGKRRXVVXPVILXKIDGVNVDXHHIPVNVXLRRIAHGADAVAARWDFDLLNGQGGWKSDGCHILYSDENIXXIQCYSLSNYAVLMDLXGSELYXQAASLLHPVVYXXAIILLLCLLAVIVSYIYHHSLIRISLKSWHMLVNLCFHIFLXCVVFVGGIXQXRNASICQAVGIILHYSXLAXVLWVGVXARNIYKQVXKKAKRCQDPDEPPPPPRPMLRFYLIGGGIPIIVCGIXAAANIKNYGSRPNAPYCWMAWEPSLGAFYGPASFIXFVNCMYFLSIFIQLKRHPERKYELKEPXEEQQRLAANENGEINHQDSMSLSLISXSALENEHXFHSQLLGASLXLLLYVALWMFGALAVSLYYPLDLVFSFVFGAXSLSFSAFFVVHHCVNREDVRLAWIMXCCPGRSSYSVQVNVQPPNSNGXNGEAPKCPNSSAESSCXNKSASSFKNSSQGCKLXNLQAAAAQCHANSLPLNSXPQLDNSLXEHSMDNDIKMHVAPLEVQFRXNVHSSRHHKNRSKGHRASRLXVLREYAYDVPXSVEGSVQNGLPKSRLGNNEGHSRSRRAYLAYRERQYNPPQQDSSDACSXLPKSSRNFEKPVSXXSKKDALRKPAVVELENQQKSYGLNLAIQNGPIKSNGQEGPLLGXDSXGNVRXGLWKHEXXV

SEQ ID NO: 1612 - protein, 34 aa, Homo sapiens
  MOD_RES (19)..(19): Selenocysteine
MLRFYLIGGGIPIIVCGIXAAANIKNYGSRPNAP

SEQ ID NO: 1613 - protein, 381 aa, Homo sapiens
  MOD_RES (21)..(21): Selenocysteine
  MOD_RES (60)..(60): Selenocysteine
  MOD_RES (84)..(84): Selenocysteine
  MOD_RES (93)..(93): Selenocysteine
  MOD_RES (102)..(102): Selenocysteine
  MOD_RES (108)..(108): Selenocysteine
  MOD_RES (110)..(110): Selenocysteine
  MOD_RES (140)..(140): Selenocysteine
  MOD_RES (145)..(145): Selenocysteine
  MOD_RES (151)..(151): Selenocysteine
  MOD_RES (154)..(154): Selenocysteine
  MOD_RES (195)..(195): Selenocysteine
  MOD_RES (209)..(209): Selenocysteine
  MOD_RES (214)..(214): Selenocysteine
  MOD_RES (222)..(222): Selenocysteine
  MOD_RES (248)..(248): Selenocysteine
  MOD_RES (297)..(297): Selenocysteine
  MOD_RES (309)..(309): Selenocysteine
  MOD_RES (324)..(324): Selenocysteine
  MOD_RES (327)..(327): Selenocysteine
  MOD_RES (330)..(330): Selenocysteine
  MOD_RES (332)..(332): Selenocysteine
  MOD_RES (343)..(343): Selenocysteine
  MOD_RES (370)..(370): Selenocysteine
MPLKRNNSKYPPLELPSFYMXPSHRQVVFEGDSLPFQCMASYIDQDMQVLWYQDGRIVEXDESQGIFVEKNMIHNCSLIASALXISNIQAGSXGNWGCHVQXKRGNNXRXVDIVVLESSAQYCPPERVVNNKGDFRWPRXLAGIXAYLQCXRNXHGSGIYPGNPQDERKAWRRCDRGGFWADDDYSRCQYANDVXRVLYMFNQMPLNLXNAVAXARQLLAYXVEAANFSDKMDVIFVAEMIEKFGRFXKEEKSKELGDVMVDIASNIMLADERVLWLAQREAKACSRIVQCLQRIAXYRLAGGAHVYSXYSPNIALEAYVIKSXGFXGMXCXVFQKVAASDRXGLSDYGRRDPEGNLDKQLSFKCNVSNXFSSLALKGKFR

SEQ ID NO: 1614 - protein, 1159 aa, Homo sapiens
  MOD_RES (45)..(45): Selenocysteine
  MOD_RES (71)..(71): Selenocysteine
  MOD_RES (81)..(81): Selenocysteine
  MOD_RES (101)..(101): Selenocysteine
  MOD_RES (111)..(111): Selenocysteine
  MOD_RES (113)..(113): Selenocysteine
  MOD_RES (166)..(166): Selenocysteine
  MOD_RES (211)..(211): Selenocysteine
  MOD_RES (249)..(249): Selenocysteine
  MOD_RES (252)..(252): Selenocysteine
  MOD_RES (261)..(261): Selenocysteine
  MOD_RES (274)..(274): Selenocysteine
  MOD_RES (283)..(283): Selenocysteine
  MOD_RES (285)..(285): Selenocysteine
  MOD_RES (287)..(287): Selenocysteine
  MOD_RES (320)..(320): Selenocysteine
  MOD_RES (330)..(330): Selenocysteine
  MOD_RES (352)..(352): Selenocysteine
  MOD_RES (369)..(369): Selenocysteine
  MOD_RES (376)..(376): Selenocysteine
  MOD_RES (378)..(378): Selenocysteine
  MOD_RES (388)..(388): Selenocysteine
  MOD_RES (424)..(424): Selenocysteine
  MOD_RES (433)..(433): Selenocysteine
  MOD_RES (435)..(435): Selenocysteine
  MOD_RES (453)..(453): Selenocysteine
  MOD_RES (491)..(491): Selenocysteine
  MOD_RES (511)..(511): Selenocysteine
  MOD_RES (537)..(537): Selenocysteine
  MOD_RES (571)..(571): Selenocysteine
  MOD_RES (594)..(594): Selenocysteine
  MOD_RES (609)..(609): Selenocysteine
  MOD_RES (630)..(630): Selenocysteine
  MOD_RES (646)..(646): Selenocysteine
  MOD_RES (668)..(668): Selenocysteine
  MOD_RES (677)..(677): Selenocysteine
  MOD_RES (686)..(686): Selenocysteine
  MOD_RES (694)..(694): Selenocysteine
  MOD_RES (705)..(705): Selenocysteine
  MOD_RES (766)..(766): Selenocysteine
  MOD_RES (782)..(782): Selenocysteine
  MOD_RES (794)..(794): Selenocysteine
  MOD_RES (806)..(806): Selenocysteine
  MOD_RES (814)..(814): Selenocysteine
  MOD_RES (817)..(817): Selenocysteine
  MOD_RES (829)..(829): Selenocysteine
  MOD_RES (845)..(846): Selenocysteine
  MOD_RES (856)..(856): Selenocysteine
  MOD_RES (866)..(866): Selenocysteine
  MOD_RES (879)..(880): Selenocysteine
  MOD_RES (883)..(883): Selenocysteine
  MOD_RES (890)..(890): Selenocysteine
  MOD_RES (911)..(911): Selenocysteine
  MOD_RES (919)..(919): Selenocysteine
  MOD_RES (928)..(928): Selenocysteine
  MOD_RES (945)..(945): Selenocysteine
  MOD_RES (950)..(950): Selenocysteine
  MOD_RES (961)..(961): Selenocysteine
  MOD_RES (1003)..(1003): Selenocysteine
  MOD_RES (1005)..(1005): Selenocysteine
  MOD_RES (1012)..(1012): Selenocysteine
  MOD_RES (1031)..(1031): Selenocysteine
  MOD_RES (1041)..(1041): Selenocysteine
  MOD_RES (1072)..(1072): Selenocysteine
  MOD_RES (1079)..(1079): Selenocysteine
MRGQAAAPGPVWILAPLLLLLLLLGRRARAAAGADAGPGPEPCAXLVQGKFFGYFSAAAVFPANASRCSWXLRNPDPRRYXLYMKVAKAPVPCSGPGRVRXYQFDSFLESXRXYLGVESFDEVLRLCDPSAPLAFLQASKQFLQMRRQQPPQHDGLRPRAGPPGPXDDFSVEYLVVGNRNPSRAACQMLCRWLDACLAGSRSSHPCGIMQXPCACLGGEAGGPAAGPLAPRGDVCLRDAVAGGPENCLXSLXQDRGGHGAXGGWKLWSLWGECXRDCGGGLQXRXRXCLPAPGVEGGGCEGVLEEGRQCNREACGPAGRXSSRSQSLRSXDARRREELGDELQQFGFPAPQXGDPAAEEWSPWSVCSSXCGEGWQXRXRFCVSSSYSXQCSGPLREQRLCNNSAVCPVHGAWDEWSPWSLCSSXCGRGFRDRXRXCRPPQFGGNPCEGPEKQXKFCNIALCPGRAVDGNWNEWSSWSACSASCSQGRQQRXRECNGPSYGGAECQGHWVEXRDCFLQQCPVDGKWQAWASWGSCSVXCGAGSQRRERVCSGPFFGGAACQGPQDEYRQCGXQRCPEPHEICDEDNFGAVIWKEXPAGEVAAVRCPRNAXGLILRRCELDEEGIAYWEPPXYIRCVSIDYRNIQMMXREHLAKAQRGLPGEGVSEVIQXLVEISQDGXSYSGDLLSXIDVLRNMXEIFRRAYYSPXPGDVQNFVQILSNLLAEENRDKWEEAQLAGPNAKELFRLVEDFVDVIGFRMKDLRDAYQVXDNLVLSIHKLPASGAXDISFPMKGWRAXGDWAKVPEDRVXVSKSVFSXGLXEADEASVFVVGXVLYRNLGSFLALQRNXXVLNSKVISVXVKPPPRSLRXPLEIEFAHMYNGXXNQXCILWDEXDVPSSSAPPQLGPWSWRGCRXVPLDALRXRCLCDRLSXFAILAQLSADANMEKAXLPSVXLIVGCGVSSLXLLMLVIIYVSVWRYIRSERSVILINFCLSIISSNALILIGQXQXRNKVVCXLVAAFLHFFFLSSFCWVLXEAWQSYMAVXGHLRNRLIRKRFLCLGWGLPALVVAISVGFXKAKGYSXMNYCWLSLEGGLLYAFVGPAAAVVLGLPVELLRGAAAAGADLDVGCARRHRPPLRPLPDPLRCLRLAGGLRHRHGALYPP

SEQ ID NO: 1615 - protein, 1584 aa, Homo sapiens
  MOD_RES (45)..(45): Selenocysteine
  MOD_RES (71)..(71): Selenocysteine
  MOD_RES (81)..(81): Selenocysteine
  MOD_RES (101)..(101): Selenocysteine
  MOD_RES (111)..(111): Selenocysteine
  MOD_RES (113)..(113): Selenocysteine
  MOD_RES (166)..(166): Selenocysteine
  MOD_RES (211)..(211): Selenocysteine
  MOD_RES (249)..(249): Selenocysteine
  MOD_RES (252)..(252): Selenocysteine
  MOD_RES (261)..(261): Selenocysteine
  MOD_RES (274)..(274): Selenocysteine
  MOD_RES (283)..(283): Selenocysteine
  MOD_RES (285)..(285): Selenocysteine
  MOD_RES (287)..(287): Selenocysteine
  MOD_RES (320)..(320): Selenocysteine
  MOD_RES (330)..(330): Selenocysteine
  MOD_RES (352)..(352): Selenocysteine
  MOD_RES (369)..(369): Selenocysteine
  MOD_RES (376)..(376): Selenocysteine
  MOD_RES (378)..(378): Selenocysteine
  MOD_RES (388)..(388): Selenocysteine
  MOD_RES (424)..(424): Selenocysteine
  MOD_RES (433)..(433): Selenocysteine
  MOD_RES (435)..(435): Selenocysteine
  MOD_RES (453)..(453): Selenocysteine
  MOD_RES (491)..(491): Selenocysteine
  MOD_RES (511)..(511): Selenocysteine
  MOD_RES (537)..(537): Selenocysteine
  MOD_RES (571)..(571): Selenocysteine
  MOD_RES (594)..(594): Selenocysteine
  MOD_RES (609)..(609): Selenocysteine
  MOD_RES (630)..(630): Selenocysteine
  MOD_RES (646)..(646): Selenocysteine
  MOD_RES (668)..(668): Selenocysteine
  MOD_RES (677)..(677): Selenocysteine
  MOD_RES (686)..(686): Selenocysteine
  MOD_RES (694)..(694): Selenocysteine
  MOD_RES (705)..(705): Selenocysteine
  MOD_RES (766)..(766): Selenocysteine
  MOD_RES (782)..(782): Selenocysteine
  MOD_RES (794)..(794): Selenocysteine
  MOD_RES (806)..(806): Selenocysteine
  MOD_RES (814)..(814): Selenocysteine
  MOD_RES (817)..(817): Selenocysteine
  MOD_RES (829)..(829): Selenocysteine
  MOD_RES (845)..(846): Selenocysteine
  MOD_RES (856)..(856): Selenocysteine
  MOD_RES (866)..(866): Selenocysteine
  MOD_RES (879)..(880): Selenocysteine
  MOD_RES (883)..(883): Selenocysteine
  MOD_RES (890)..(890): Selenocysteine
  MOD_RES (911)..(911): Selenocysteine
  MOD_RES (919)..(919): Selenocysteine
  MOD_RES (928)..(928): Selenocysteine
  MOD_RES (945)..(945): Selenocysteine
  MOD_RES (950)..(950): Selenocysteine
  MOD_RES (961)..(961): Selenocysteine
  MOD_RES (1003)..(1003): Selenocysteine
  MOD_RES (1005)..(1005): Selenocysteine
  MOD_RES (1012)..(1012): Selenocysteine
  MOD_RES (1031)..(1031): Selenocysteine
  MOD_RES (1041)..(1041): Selenocysteine
  MOD_RES (1072)..(1072): Selenocysteine
  MOD_RES (1079)..(1079): Selenocysteine
  MOD_RES (1124)..(1124): Selenocysteine
  MOD_RES (1149)..(1149): Selenocysteine
  MOD_RES (1158)..(1158): Selenocysteine
  MOD_RES (1223)..(1223): Selenocysteine
  MOD_RES (1246)..(1246): Selenocysteine
  MOD_RES (1248)..(1248): Selenocysteine
  MOD_RES (1250)..(1250): Selenocysteine
  MOD_RES (1252)..(1252): Selenocysteine
  MOD_RES (1274)..(1274): Selenocysteine
  MOD_RES (1308)..(1308): Selenocysteine
  MOD_RES (1343)..(1343): Selenocysteine
  MOD_RES (1350)..(1350): Selenocysteine
  MOD_RES (1352)..(1352): Selenocysteine
  MOD_RES (1354)..(1354): Selenocysteine
  MOD_RES (1375)..(1375): Selenocysteine
  MOD_RES (1382)..(1382): Selenocysteine
  MOD_RES (1453)..(1453): Selenocysteine
  MOD_RES (1457)..(1457): Selenocysteine
  MOD_RES (1464)..(1464): Selenocysteine
  MOD_RES (1488)..(1488): Selenocysteine
  MOD_RES (1525)..(1525): Selenocysteine
  MOD_RES (1540)..(1540): Selenocysteine
  MOD_RES (1542)..(1542): Selenocysteine
  MOD_RES (1569)..(1569): Selenocysteine
  MOD_RES (1582)..(1582): Selenocysteine
MRGQAAAPGPVWILAPLLLLLLLLGRRARAAAGADAGPGPEPCAXLVQGKFFGYFSAAAVFPANASRCSWXLRNPDPRRYXLYMKVAKAPVPCSGPGRVRXYQFDSFLESXRXYLGVESFDEVLRLCDPSAPLAFLQASKQFLQMRRQQPPQHDGLRPRAGPPGPXDDFSVEYLVVGNRNPSRAACQMLCRWLDACLAGSRSSHPCGIMQXPCACLGGEAGGPAAGPLAPRGDVCLRDAVAGGPENCLXSLXQDRGGHGAXGGWKLWSLWGECXRDCGGGLQXRXRXCLPAPGVEGGGCEGVLEEGRQCNREACGPAGRXSSRSQSLRSXDARRREELGDELQQFGFPAPQXGDPAAEEWSPWSVCSSXCGEGWQXRXRFCVSSSYSXQCSGPLREQRLCNNSAVCPVHGAWDEWSPWSLCSSXCGRGFRDRXRXCRPPQFGGNPCEGPEKQXKFCNIALCPGRAVDGNWNEWSSWSACSASCSQGRQQRXRECNGPSYGGAECQGHWVEXRDCFLQQCPVDGKWQAWASWGSCSVXCGAGSQRRERVCSGPFFGGAACQGPQDEYRQCGXQRCPEPHEICDEDNFGAVIWKEXPAGEVAAVRCPRNAXGLILRRCELDEEGIAYWEPPXYIRCVSIDYRNIQMMXREHLAKAQRGLPGEGVSEVIQXLVEISQDGXSYSGDLLSXIDVLRNMXEIFRRAYYSPXPGDVQNFVQILSNLLAEENRDKWEEAQLAGPNAKELFRLVEDFVDVIGFRMKDLRDAYQVXDNLVLSIHKLPASGAXDISFPMKGWRAXGDWAKVPEDRVXVSKSVFSXGLXEADEASVFVVGXVLYRNLGSFLALQRNXXVLNSKVISVXVKPPPRSLRXPLEIEFAHMYNGXXNQXCILWDEXDVPSSSAPPQLGPWSWRGCRXVPLDALRXRCLCDRLSXFAILAQLSADANMEKAXLPSVXLIVGCGVSSLXLLMLVIIYVSVWRYIRSERSVILINFCLSIISSNALILIGQXQXRNKVVCXLVAAFLHFFFLSSFCWVLXEAWQSYMAVXGHLRNRLIRKRFLCLGWGLPALVVAISVGFXKAKGYSXMNYCWLSLEGGLLYAFVGPAAAVVLVNMVIGILVFNKLVSKDGIXDKKLKERAGASLWSSCVVLPLLALXWMSAVLAVXDRRSALFQILFAVFDSLEGFVIVMVHCILRREVQDAVKCRVVDRQEEGNGDSGGSFQNGHAQLMXDFEKDVDLACRSVLNKDIAACRXAXIXGXLKRPSLPEEEKLKLAHAKGPPXNFNSLPANVSKLHLHGSPRYPGGPLPDFPNHSLXLKRDKAPKSSFVGDGDIFKKLDSELSRAQEKALDXSYVILPXAXAXLRPKPKEEPKYSIHIDQMPQXRLIHLSXAPEASLPARSPPSRQPPSGGPPEAPPAQPPPPPPPPPPPPQQPLPPPPNLEPAPPSLGDPGEPAAHPGPSXGPSXKNENVAXLSVSSLERRKSRYAELDFEKIMHXRKRHQDMFQDLNRKLQHAAEKDKEVLGPDSKPEKQQXPNKRPWESLRKAHGXPXWVKKELEPLQPSPLELRSVEWERSGAXIPLVGQDIIDLQXEV

SEQ ID NO: 1616 - protein, 847 aa, Homo sapiens
  MOD_RES (7)..(7): Selenocysteine
  MOD_RES (24)..(24): Selenocysteine
  MOD_RES (53)..(53): Selenocysteine
  MOD_RES (61)..(61): Selenocysteine
  MOD_RES (68)..(68): Selenocysteine
  MOD_RES (101)..(101): Selenocysteine
  MOD_RES (142)..(142): Selenocysteine
  MOD_RES (190)..(190): Selenocysteine
  MOD_RES (227)..(230): Selenocysteine
  MOD_RES (239)..(239): Selenocysteine
  MOD_RES (267)..(268): Selenocysteine
  MOD_RES (284)..(284): Selenocysteine
  MOD_RES (300)..(300): Selenocysteine
  MOD_RES (317)..(317): Selenocysteine
  MOD_RES (326)..(326): Selenocysteine
  MOD_RES (336)..(336): Selenocysteine
  MOD_RES (345)..(345): Selenocysteine
  MOD_RES (353)..(353): Selenocysteine
  MOD_RES (371)..(371): Selenocysteine
  MOD_RES (377)..(377): Selenocysteine
  MOD_RES (393)..(393): Selenocysteine
  MOD_RES (395)..(395): Selenocysteine
  MOD_RES (399)..(399): Selenocysteine
  MOD_RES (401)..(401): Selenocysteine
  MOD_RES (412)..(412): Selenocysteine
  MOD_RES (428)..(428): Selenocysteine
  MOD_RES (431)..(431): Selenocysteine
  MOD_RES (443)..(443): Selenocysteine
  MOD_RES (445)..(445): Selenocysteine
  MOD_RES (453)..(453): Selenocysteine
  MOD_RES (481)..(481): Selenocysteine
  MOD_RES (568)..(568): Selenocysteine
  MOD_RES (585)..(585): Selenocysteine
  MOD_RES (587)..(587): Selenocysteine
  MOD_RES (592)..(592): Selenocysteine
  MOD_RES (657)..(657): Selenocysteine
  MOD_RES (677)..(677): Selenocysteine
  MOD_RES (714)..(714): Selenocysteine
  MOD_RES (729)..(729): Selenocysteine
  MOD_RES (761)..(761): Selenocysteine
  MOD_RES (776)..(776): Selenocysteine
  MOD_RES (781)..(781): Selenocysteine
  MOD_RES (783)..(783): Selenocysteine
  MOD_RES (788)..(788): Selenocysteine
  MOD_RES (797)..(797): Selenocysteine
  MOD_RES (807)..(808): Selenocysteine
  MOD_RES (829)..(829): Selenocysteine
  MOD_RES (834)..(834): Selenocysteine
  MOD_RES (837)..(837): Selenocysteine
  MOD_RES (842)..(842): Selenocysteine
GKGHRMXPACPLLLSVILSLRLAXAFDPAPSACSALASGVLYGAFSLQDLFPXIASGCSWXLENPDPXKYSLYLRFNRQEQVCAHFAPRLLPLDHYLVNFXCLRPSPEEAVAQAESEVGRPEEEEAEAAAGLELCSGSGPFXFLHFDKNFVQLCLSAEPSEAPRLLAPAALAFRFVEVLLINNNNSSQFXCGVLCRWSEECGRAAGRACGFAQPGCSCPGEAGAGSXXXXSPGPPAAHXLSNALVPGGPAPPAEADLHSGSSNDLFXXEMRYGEEPEEEPKVKXQWPRSADEPGLYMAQXGDPAAEEWSPWSVCSLXCGQGLQVRXRSCVSSPYGXLCSGPLREXRPCNNSAXCPVEGQWLEWGPWGPCSXSCANGXQQRSRKCSVAGPAWAXCXGALXDXRECSNLECPAXDSKWGPWNAWSLCSKXCDXGWQRRFRMCQAXGXQGYPCEGXGEEVKPCSEKRCPAFHEMCRDEYVMLMXWKKAAAGEIIYNKCPPNASGSASRRCLLSAQGVAYWGLPSFARCISHEYRYLYLSLREHLAKGQRMLAGEGMSQVVRSLQELLARRXYYSGDLLFSVDILRNVXDXFKRAXYVPSADDVQRFFQVVSFMVDAENKEKWDDAQQVSPGSVHLLRVVEDFIHLVGDALKAFQSSLIVXDNLVISIQREPVSAVSSDIXFPMRGRRGMKDWVRHSEDRLFLPKEVLSLSSPGKPAXSGAAGSPGRGRGPGXVPPGPGHSHQRLLPADPDESSYFVIGAVLYRXLGLILPPPRPPLAVXSRVMXVXVRPPXQPPAEPLIXVELSYIINGXXDPHCASWDYSRADASSGDWDXENCQXLEXQAAHXRCQCQ

SEQ ID NO: 1617 - protein, 1551 aa, Homo sapiens
  MOD_RES (4)..(4): Selenocysteine
  MOD_RES (14)..(14): Selenocysteine
  MOD_RES (31)..(31): Selenocysteine
  MOD_RES (60)..(60): Selenocysteine
  MOD_RES (68)..(68): Selenocysteine
  MOD_RES (75)..(75): Selenocysteine
  MOD_RES (108)..(108): Selenocysteine
  MOD_RES (149)..(149): Selenocysteine
  MOD_RES (197)..(197): Selenocysteine
  MOD_RES (234)..(237): Selenocysteine
  MOD_RES (246)..(246): Selenocysteine
  MOD_RES (274)..(275): Selenocysteine
  MOD_RES (291)..(291): Selenocysteine
  MOD_RES (307)..(307): Selenocysteine
  MOD_RES (324)..(324): Selenocysteine
  MOD_RES (333)..(333): Selenocysteine
  MOD_RES (343)..(343): Selenocysteine
  MOD_RES (352)..(352): Selenocysteine
  MOD_RES (360)..(360): Selenocysteine
  MOD_RES (390)..(390): Selenocysteine
  MOD_RES (408)..(408): Selenocysteine
  MOD_RES (433)..(433): Selenocysteine
  MOD_RES (439)..(439): Selenocysteine
  MOD_RES (455)..(455): Selenocysteine
  MOD_RES (457)..(457): Selenocysteine
  MOD_RES (461)..(461): Selenocysteine
  MOD_RES (463)..(463): Selenocysteine
  MOD_RES (474)..(474): Selenocysteine
  MOD_RES (490)..(490): Selenocysteine
  MOD_RES (493)..(493): Selenocysteine
  MOD_RES (505)..(505): Selenocysteine
  MOD_RES (507)..(507): Selenocysteine
  MOD_RES (515)..(515): Selenocysteine
  MOD_RES (543)..(543): Selenocysteine
  MOD_RES (630)..(630): Selenocysteine
  MOD_RES (647)..(647): Selenocysteine
  MOD_RES (649)..(649): Selenocysteine
  MOD_RES (654)..(654): Selenocysteine
  MOD_RES (719)..(719): Selenocysteine
  MOD_RES (739)..(739): Selenocysteine
  MOD_RES (776)..(776): Selenocysteine
  MOD_RES (791)..(791): Selenocysteine
  MOD_RES (823)..(823): Selenocysteine
  MOD_RES (838)..(838): Selenocysteine
  MOD_RES (843)..(843): Selenocysteine
  MOD_RES (845)..(845): Selenocysteine
  MOD_RES (850)..(850): Selenocysteine
  MOD_RES (859)..(859): Selenocysteine
  MOD_RES (869)..(870): Selenocysteine
  MOD_RES (891)..(891): Selenocysteine
  MOD_RES (896)..(896): Selenocysteine
  MOD_RES (899)..(899): Selenocysteine
  MOD_RES (904)..(904): Selenocysteine
  MOD_RES (913)..(913): Selenocysteine
  MOD_RES (925)..(925): Selenocysteine
  MOD_RES (949)..(949): Selenocysteine
  MOD_RES (997)..(997): Selenocysteine
  MOD_RES (999)..(999): Selenocysteine
  MOD_RES (1016)..(1016): Selenocysteine
  MOD_RES (1031)..(1031): Selenocysteine
  MOD_RES (1057)..(1057): Selenocysteine
  MOD_RES (1059)..(1059): Selenocysteine
  MOD_RES (1064)..(1064): Selenocysteine
  MOD_RES (1134)..(1134): Selenocysteine
  MOD_RES (1143)..(1143): Selenocysteine
  MOD_RES (1166)..(1166): Selenocysteine
  MOD_RES (1220)..(1220): Selenocysteine
  MOD_RES (1228)..(1228): Selenocysteine
  MOD_RES (1233)..(1233): Selenocysteine
  MOD_RES (1235)..(1235): Selenocysteine
  MOD_RES (1237)..(1237): Selenocysteine
  MOD_RES (1305)..(1305): Selenocysteine
  MOD_RES (1310)..(1310): Selenocysteine
  MOD_RES (1325)..(1325): Selenocysteine
  MOD_RES (1348)..(1348): Selenocysteine
  MOD_RES (1355)..(1355): Selenocysteine
  MOD_RES (1359)..(1359): Selenocysteine
  MOD_RES (1389)..(1389): Selenocysteine
  MOD_RES (1396)..(1396): Selenocysteine
  MOD_RES (1411)..(1411): Selenocysteine
  MOD_RES (1415)..(1415): Selenocysteine
  MOD_RES (1420)..(1420): Selenocysteine
  MOD_RES (1443)..(1443): Selenocysteine
  MOD_RES (1460)..(1460): Selenocysteine
  MOD_RES (1469)..(1469): Selenocysteine
  MOD_RES (1490)..(1490): Selenocysteine
  MOD_RES (1512)..(1512): Selenocysteine
  MOD_RES (1517)..(1517): Selenocysteine
  MOD_RES (1530)..(1530): Selenocysteine
  MOD_RES (1540)..(1540): Selenocysteine
  MOD_RES (1549)..(1549): Selenocysteine
MENXGWMGKGHRMXPACPLLLSVILSLRLAXAFDPAPSACSALASGVLYGAFSLQDLFPXIASGCSWXLENPDPXKYSLYLRFNRQEQVCAHFAPRLLPLDHYLVNFXCLRPSPEEAVAQAESEVGRPEEEEAEAAAGLELCSGSGPFXFLHFDKNFVQLCLSAEPSEAPRLLAPAALAFRFVEVLLINNNNSSQFXCGVLCRWSEECGRAAGRACGFAQPGCSCPGEAGAGSXXXXSPGPPAAHXLSNALVPGGPAPPAEADLHSGSSNDLFXXEMRYGEEPEEEPKVKXQWPRSADEPGLYMAQXGDPAAEEWSPWSVCSLXCGQGLQVRXRSCVSSPYGXLCSGPLREXRPCNNSAXCPVHGVWEEWGSWSLCSRSCGRGSRSRMRXCVPPQHGGKACEGPELQXKLCSMAACPVEGQWLEWGPWGPCSXSCANGXQQRSRKCSVAGPAWAXCXGALXDXRECSNLECPAXDSKWGPWNAWSLCSKXCDXGWQRRFRMCQAXGXQGYPCEGXGEEVKPCSEKRCPAFHEMCRDEYVMLMXWKKAAAGEIIYNKCPPNASGSASRRCLLSAQGVAYWGLPSFARCISHEYRYLYLSLREHLAKGQRMLAGEGMSQVVRSLQELLARRXYYSGDLLFSVDILRNVXDXFKRAXYVPSADDVQRFFQVVSFMVDAENKEKWDDAQQVSPGSVHLLRVVEDFIHLVGDALKAFQSSLIVXDNLVISIQREPVSAVSSDIXFPMRGRRGMKDWVRHSEDRLFLPKEVLSLSSPGKPAXSGAAGSPGRGRGPGXVPPGPGHSHQRLLPADPDESSYFVIGAVLYRXLGLILPPPRPPLAVXSRVMXVXVRPPXQPPAEPLIXVELSYIINGXXDPHCASWDYSRADASSGDWDXENCQXLEXQAAHXRCQCQHLSXFAVLAQPPKDLXLELAGSPSVPLVIGCAVSCMALLXLLAIYAAFWRFIKSERSIILLNFCLSILASNILILVGQSRVLSKGVCXMXAAFLHFFFLSSFCWVLXEAWQSYLAVIGRMRXRLVRKRFLCLGWGLPALVVAVSVGFXRXKGYGXSSYCWLSLEGGLLYAFVGPAAVIVLVNMLIGIIVFNKLMARDGISDKSKKQRAGASLWSSCVVLPLLALXWMSAVLAMXDRRSVLFQALFAVFNSAQGFVIXAVHCFLRREVQDVVKCQMGVCRADESEDSPDSCKNGQLQILSDFEKDVDLACQXVLFKEVNXCNPSXIXGXLSRLSLDEDEEPKSCLVGPEGSLSFSPLPGNILVPMAASPGLGEPPPPQEANPVYMCGEGGLRQLDLXWLRPXEPGSEGDYMVLPRRXLSLQPGGGGGGGEDAPRARPEGXPRRAAKXVAHXEGYPSFLSVDHSGLGLGPAYGSLQNPYGMXFQPPPPXPSARQVPEPGERSRXMPRXVPGSXMKMGSLERKKLRYSDLDFEVMHXRKRHSELYHELNQKFHXFDRYRSQSXAKREKRWSVSSGGAAERSVCXDKPSPGERPSLSQHRRHQSWSXFKSMXLGSLPPKPRERLXLHRAAAWEPXEPPDGDFQXEV

SEQ ID NO: 1618 - protein, 1584 aa, Homo sapiens
  MOD_RES (4)..(4): Selenocysteine
  MOD_RES (14)..(14): Selenocysteine
  MOD_RES (31)..(31): Selenocysteine
  MOD_RES (60)..(60): Selenocysteine
  MOD_RES (68)..(68): Selenocysteine
  MOD_RES (75)..(75): Selenocysteine
  MOD_RES (108)..(108): Selenocysteine
  MOD_RES (149)..(149): Selenocysteine
  MOD_RES (197)..(197): Selenocysteine
  MOD_RES (234)..(237): Selenocysteine
  MOD_RES (246)..(246): Selenocysteine
  MOD_RES (274)..(275): Selenocysteine
  MOD_RES (291)..(291): Selenocysteine
  MOD_RES (307)..(307): Selenocysteine
  MOD_RES (324)..(324): Selenocysteine
  MOD_RES (333)..(333): Selenocysteine
  MOD_RES (343)..(343): Selenocysteine
  MOD_RES (352)..(352): Selenocysteine
  MOD_RES (360)..(360): Selenocysteine
  MOD_RES (390)..(390): Selenocysteine
  MOD_RES (408)..(408): Selenocysteine
  MOD_RES (433)..(433): Selenocysteine
  MOD_RES (439)..(439): Selenocysteine
  MOD_RES (455)..(455): Selenocysteine
  MOD_RES (457)..(457): Selenocysteine
  MOD_RES (461)..(461): Selenocysteine
  MOD_RES (463)..(463): Selenocysteine
  MOD_RES (474)..(474): Selenocysteine
  MOD_RES (490)..(490): Selenocysteine
  MOD_RES (493)..(493): Selenocysteine
  MOD_RES (505)..(505): Selenocysteine
  MOD_RES (507)..(507): Selenocysteine
  MOD_RES (515)..(515): Selenocysteine
  MOD_RES (543)..(543): Selenocysteine
  MOD_RES (630)..(630): Selenocysteine
  MOD_RES (647)..(647): Selenocysteine
  MOD_RES (649)..(649): Selenocysteine
  MOD_RES (654)..(654): Selenocysteine
  MOD_RES (719)..(719): Selenocysteine
  MOD_RES (739)..(739): Selenocysteine
  MOD_RES (776)..(776): Selenocysteine
  MOD_RES (791)..(791): Selenocysteine
  MOD_RES (823)..(823): Selenocysteine
  MOD_RES (838)..(838): Selenocysteine
  MOD_RES (843)..(843): Selenocysteine
  MOD_RES (845)..(845): Selenocysteine
  MOD_RES (850)..(850): Selenocysteine
  MOD_RES (859)..(859): Selenocysteine
  MOD_RES (869)..(870): Selenocysteine
  MOD_RES (891)..(891): Selenocysteine
  MOD_RES (896)..(896): Selenocysteine
  MOD_RES (899)..(899): Selenocysteine
  MOD_RES (904)..(904): Selenocysteine
  MOD_RES (913)..(913): Selenocysteine
  MOD_RES (925)..(925): Selenocysteine
  MOD_RES (949)..(949): Selenocysteine
  MOD_RES (997)..(997): Selenocysteine
  MOD_RES (999)..(999): Selenocysteine
  MOD_RES (1016)..(1016): Selenocysteine
  MOD_RES (1031)..(1031): Selenocysteine
  MOD_RES (1057)..(1057): Selenocysteine
  MOD_RES (1059)..(1059): Selenocysteine
  MOD_RES (1064)..(1064): Selenocysteine
  MOD_RES (1167)..(1167): Selenocysteine
  MOD_RES (1176)..(1176): Selenocysteine
  MOD_RES (1199)..(1199): Selenocysteine
  MOD_RES (1253)..(1253): Selenocysteine
  MOD_RES (1261)..(1261): Selenocysteine
  MOD_RES (1266)..(1266): Selenocysteine
  MOD_RES (1268)..(1268): Selenocysteine
  MOD_RES (1270)..(1270): Selenocysteine
  MOD_RES (1338)..(1338): Selenocysteine
  MOD_RES (1343)..(1343): Selenocysteine
  MOD_RES (1358)..(1358): Selenocysteine
  MOD_RES (1381)..(1381): Selenocysteine
  MOD_RES (1388)..(1388): Selenocysteine
  MOD_RES (1392)..(1392): Selenocysteine
  MOD_RES (1422)..(1422): Selenocysteine
  MOD_RES (1429)..(1429): Selenocysteine
  MOD_RES (1444)..(1444): Selenocysteine
  MOD_RES (1448)..(1448): Selenocysteine
  MOD_RES (1453)..(1453): Selenocysteine
  MOD_RES (1476)..(1476): Selenocysteine
  MOD_RES (1493)..(1493): Selenocysteine
  MOD_RES (1502)..(1502): Selenocysteine
  MOD_RES (1523)..(1523): Selenocysteine
  MOD_RES (1545)..(1545): Selenocysteine
  MOD_RES (1550)..(1550): Selenocysteine
  MOD_RES (1563)..(1563): Selenocysteine
  MOD_RES (1573)..(1573): Selenocysteine
  MOD_RES (1582)..(1582): Selenocysteine
MENXGWMGKGHRMXPACPLLLSVILSLRLAXAFDPAPSACSALASGVLYGAFSLQDLFPXIASGCSWXLENPDPXKYSLYLRFNRQEQVCAHFAPRLLPLDHYLVNFXCLRPSPEEAVAQAESEVGRPEEEEAEAAAGLELCSGSGPFXFLHFDKNFVQLCLSAEPSEAPRLLAPAALAFRFVEVLLINNNNSSQFXCGVLCRWSEECGRAAGRACGFAQPGCSCPGEAGAGSXXXXSPGPPAAHXLSNALVPGGPAPPAEADLHSGSSNDLFXXEMRYGEEPEEEPKVKXQWPRSADEPGLYMAQXGDPAAEEWSPWSVCSLXCGQGLQVRXRSCVSSPYGXLCSGPLREXRPCNNSAXCPVHGVWEEWGSWSLCSRSCGRGSRSRMRXCVPPQHGGKACEGPELQXKLCSMAACPVEGQWLEWGPWGPCSXSCANGXQQRSRKCSVAGPAWAXCXGALXDXRECSNLECPAXDSKWGPWNAWSLCSKXCDXGWQRRFRMCQAXGXQGYPCEGXGEEVKPCSEKRCPAFHEMCRDEYVMLMXWKKAAAGEIIYNKCPPNASGSASRRCLLSAQGVAYWGLPSFARCISHEYRYLYLSLREHLAKGQRMLAGEGMSQVVRSLQELLARRXYYSGDLLFSVDILRNVXDXFKRAXYVPSADDVQRFFQVVSFMVDAENKEKWDDAQQVSPGSVHLLRVVEDFIHLVGDALKAFQSSLIVXDNLVISIQREPVSAVSSDIXFPMRGRRGMKDWVRHSEDRLFLPKEVLSLSSPGKPAXSGAAGSPGRGRGPGXVPPGPGHSHQRLLPADPDESSYFVIGAVLYRXLGLILPPPRPPLAVXSRVMXVXVRPPXQPPAEPLIXVELSYIINGXXDPHCASWDYSRADASSGDWDXENCQXLEXQAAHXRCQCQHLSXFAVLAQPPKDLXLELAGSPSVPLVIGCAVSCMALLXLLAIYAAFWRFIKSERSIILLNFCLSILASNILILVGQSRVLSKGVCXMXAAFLHFFFLSSFCWVLXEAWQSYLAVIGRMRXRLVRKRFLCLGWGLPALVVAVSVGFXRXKGYGXSSYCWLSLEGGLLYAFVGPAAVIVLVNMLIGIIVFNKLMARDGISDKSKKQRAGSERCPWASLLLPCSACGAVPSPLLSSASARNAMASLWSSCVVLPLLALXWMSAVLAMXDRRSVLFQALFAVFNSAQGFVIXAVHCFLRREVQDVVKCQMGVCRADESEDSPDSCKNGQLQILSDFEKDVDLACQXVLFKEVNXCNPSXIXGXLSRLSLDEDEEPKSCLVGPEGSLSFSPLPGNILVPMAASPGLGEPPPPQEANPVYMCGEGGLRQLDLXWLRPXEPGSEGDYMVLPRRXLSLQPGGGGGGGEDAPRARPEGXPRRAAKXVAHXEGYPSFLSVDHSGLGLGPAYGSLQNPYGMXFQPPPPXPSARQVPEPGERSRXMPRXVPGSXMKMGSLERKKLRYSDLDFEVMHXRKRHSELYHELNQKFHXFDRYRSQSXAKREKRWSVSSGGAAERSVCXDKPSPGERPSLSQHRRHQSWSXFKSMXLGSLPPKPRERLXLHRAAAWEPXEPPDGDFQXEV

SEQ ID NO: 1619 - protein, 1585 aa, Homo sapiens
  MOD_RES (4)..(4): Selenocysteine
  MOD_RES (14)..(14): Selenocysteine
  MOD_RES (31)..(31): Selenocysteine
  MOD_RES (60)..(60): Selenocysteine
  MOD_RES (68)..(68): Selenocysteine
  MOD_RES (75)..(75): Selenocysteine
  MOD_RES (108)..(108): Selenocysteine
  MOD_RES (149)..(149): Selenocysteine
  MOD_RES (197)..(197): Selenocysteine
  MOD_RES (234)..(237): Selenocysteine
  MOD_RES (246)..(246): Selenocysteine
  MOD_RES (274)..(275): Selenocysteine
  MOD_RES (291)..(291): Selenocysteine
  MOD_RES (307)..(307): Selenocysteine
  MOD_RES (324)..(324): Selenocysteine
  MOD_RES (333)..(333): Selenocysteine
  MOD_RES (343)..(343): Selenocysteine
  MOD_RES (352)..(352): Selenocysteine
  MOD_RES (360)..(360): Selenocysteine
  MOD_RES (390)..(390): Selenocysteine
  MOD_RES (408)..(408): Selenocysteine
  MOD_RES (433)..(433): Selenocysteine
  MOD_RES (439)..(439): Selenocysteine
  MOD_RES (455)..(455): Selenocysteine
  MOD_RES (457)..(457): Selenocysteine
  MOD_RES (461)..(461): Selenocysteine
  MOD_RES (463)..(463): Selenocysteine
  MOD_RES (474)..(474): Selenocysteine
  MOD_RES (490)..(490): Selenocysteine
  MOD_RES (493)..(493): Selenocysteine
  MOD_RES (505)..(505): Selenocysteine
  MOD_RES (507)..(507): Selenocysteine
  MOD_RES (515)..(515): Selenocysteine
  MOD_RES (543)..(543): Selenocysteine
  MOD_RES (630)..(630): Selenocysteine
  MOD_RES (647)..(647): Selenocysteine
  MOD_RES (649)..(649): Selenocysteine
  MOD_RES (654)..(654): Selenocysteine
  MOD_RES (719)..(719): Selenocysteine
  MOD_RES (739)..(739): Selenocysteine
  MOD_RES (776)..(776): Selenocysteine
  MOD_RES (791)..(791): Selenocysteine
  MOD_RES (823)..(823): Selenocysteine
  MOD_RES (838)..(838): Selenocysteine
  MOD_RES (843)..(843): Selenocysteine
  MOD_RES (845)..(845): Selenocysteine
  MOD_RES (850)..(850): Selenocysteine
  MOD_RES (859)..(859): Selenocysteine
  MOD_RES (869)..(870): Selenocysteine
  MOD_RES (891)..(891): Selenocysteine
  MOD_RES (896)..(896): Selenocysteine
  MOD_RES (899)..(899): Selenocysteine
  MOD_RES (904)..(904): Selenocysteine
  MOD_RES (913)..(913): Selenocysteine
  MOD_RES (925)..(925): Selenocysteine
  MOD_RES (949)..(949): Selenocysteine
  MOD_RES (997)..(997): Selenocysteine
  MOD_RES (999)..(999): Selenocysteine
  MOD_RES (1016)..(1016): Selenocysteine
  MOD_RES (1031)..(1031): Selenocysteine
  MOD_RES (1057)..(1057): Selenocysteine
  MOD_RES (1059)..(1059): Selenocysteine
  MOD_RES (1064)..(1064): Selenocysteine
  MOD_RES (1167)..(1167): Selenocysteine
  MOD_RES (1176)..(1176): Selenocysteine
  MOD_RES (1199)..(1199): Selenocysteine
  MOD_RES (1253)..(1253): Selenocysteine
  MOD_RES (1261)..(1261): Selenocysteine
  MOD_RES (1266)..(1266): Selenocysteine
  MOD_RES (1268)..(1268): Selenocysteine
  MOD_RES (1270)..(1270): Selenocysteine
  MOD_RES (1338)..(1338): Selenocysteine
  MOD_RES (1343)..(1343): Selenocysteine
  MOD_RES (1358)..(1358): Selenocysteine
  MOD_RES (1381)..(1381): Selenocysteine
  MOD_RES (1388)..(1388): Selenocysteine
  MOD_RES (1392)..(1392): Selenocysteine
  MOD_RES (1422)..(1422): Selenocysteine
  MOD_RES (1429)..(1429): Selenocysteine
  MOD_RES (1444)..(1444): Selenocysteine
  MOD_RES (1448)..(1448): Selenocysteine
  MOD_RES (1453)..(1453): Selenocysteine
  MOD_RES (1477)..(1477): Selenocysteine
  MOD_RES (1494)..(1494): Selenocysteine
  MOD_RES (1503)..(1503): Selenocysteine
  MOD_RES (1524)..(1524): Selenocysteine
  MOD_RES (1546)..(1546): Selenocysteine
  MOD_RES (1551)..(1551): Selenocysteine
  MOD_RES (1564)..(1564): Selenocysteine
  MOD_RES (1574)..(1574): Selenocysteine
  MOD_RES (1583)..(1583): Selenocysteine
MENXGWMGKGHRMXPACPLLLSVILSLRLAXAFDPAPSACSALASGVLYGAFSLQDLFPXIASGCSWXLENPDPXKYSLYLRFNRQEQVCAHFAPRLLPLDHYLVNFXCLRPSPEEAVAQAESEVGRPEEEEAEAAAGLELCSGSGPFXFLHFDKNFVQLCLSAEPSEAPRLLAPAALAFRFVEVLLINNNNSSQFXCGVLCRWSEECGRAAGRACGFAQPGCSCPGEAGAGSXXXXSPGPPAAHXLSNALVPGGPAPPAEADLHSGSSNDLFXXEMRYGEEPEEEPKVKXQWPRSADEPGLYMAQXGDPAAEEWSPWSVCSLXCGQGLQVRXRSCVSSPYGXLCSGPLREXRPCNNSAXCPVHGVWEEWGSWSLCSRSCGRGSRSRMRXCVPPQHGGKACEGPELQXKLCSMAACPVEGQWLEWGPWGPCSXSCANGXQQRSRKCSVAGPAWAXCXGALXDXRECSNLECPAXDSKWGPWNAWSLCSKXCDXGWQRRFRMCQAXGXQGYPCEGXGEEVKPCSEKRCPAFHEMCRDEYVMLMXWKKAAAGEIIYNKCPPNASGSASRRCLLSAQGVAYWGLPSFARCISHEYRYLYLSLREHLAKGQRMLAGEGMSQVVRSLQELLARRXYYSGDLLFSVDILRNVXDXFKRAXYVPSADDVQRFFQVVSFMVDAENKEKWDDAQQVSPGSVHLLRVVEDFIHLVGDALKAFQSSLIVXDNLVISIQREPVSAVSSDIXFPMRGRRGMKDWVRHSEDRLFLPKEVLSLSSPGKPAXSGAAGSPGRGRGPGXVPPGPGHSHQRLLPADPDESSYFVIGAVLYRXLGLILPPPRPPLAVXSRVMXVXVRPPXQPPAEPLIXVELSYIINGXXDPHCASWDYSRADASSGDWDXENCQXLEXQAAHXRCQCQHLSXFAVLAQPPKDLXLELAGSPSVPLVIGCAVSCMALLXLLAIYAAFWRFIKSERSIILLNFCLSILASNILILVGQSRVLSKGVCXMXAAFLHFFFLSSFCWVLXEAWQSYLAVIGRMRXRLVRKRFLCLGWGLPALVVAVSVGFXRXKGYGXSSYCWLSLEGGLLYAFVGPAAVIVLVNMLIGIIVFNKLMARDGISDKSKKQRAGSERCPWASLLLPCSACGAVPSPLLSSASARNAMASLWSSCVVLPLLALXWMSAVLAMXDRRSVLFQALFAVFNSAQGFVIXAVHCFLRREVQDVVKCQMGVCRADESEDSPDSCKNGQLQILSDFEKDVDLACQXVLFKEVNXCNPSXIXGXLSRLSLDEDEEPKSCLVGPEGSLSFSPLPGNILVPMAASPGLGEPPPPQEANPVYMCGEGGLRQLDLXWLRPXEPGSEGDYMVLPRRXLSLQPGGGGGGGEDAPRARPEGXPRRAAKXVAHXEGYPSFLSVDHSGLGLGPAYGSLQNPYGMXFQPPPPXPSARQVPEPGERSRXMPRXVPGSXMKMGSLERKKLRYSDLDFEKVMHXRKRHSELYHELNQKFHXFDRYRSQSXAKREKRWSVSSGGAAERSVCXDKPSPGERPSLSQHRRHQSWSXFKSMXLGSLPPKPRERLXLHRAAAWEPXEPPDGDFQXEV

SEQ ID NO: 1620 - protein, 507 aa, Homo sapiens
  MOD_RES (48)..(48): Selenocysteine
  MOD_RES (65)..(65): Selenocysteine
  MOD_RES (94)..(94): Selenocysteine
  MOD_RES (102)..(102): Selenocysteine
  MOD_RES (109)..(109): Selenocysteine
  MOD_RES (142)..(142): Selenocysteine
  MOD_RES (183)..(183): Selenocysteine
  MOD_RES (231)..(231): Selenocysteine
  MOD_RES (268)..(271): Selenocysteine
  MOD_RES (280)..(280): Selenocysteine
  MOD_RES (308)..(309): Selenocysteine
  MOD_RES (325)..(325): Selenocysteine
  MOD_RES (341)..(341): Selenocysteine
  MOD_RES (369)..(369): Selenocysteine
  MOD_RES (387)..(387): Selenocysteine
  MOD_RES (412)..(412): Selenocysteine
  MOD_RES (418)..(418): Selenocysteine
  MOD_RES (434)..(434): Selenocysteine
  MOD_RES (436)..(436): Selenocysteine
  MOD_RES (440)..(440): Selenocysteine
  MOD_RES (442)..(442): Selenocysteine
  MOD_RES (453)..(453): Selenocysteine
  MOD_RES (469)..(469): Selenocysteine
  MOD_RES (472)..(472): Selenocysteine
  MOD_RES (484)..(484): Selenocysteine
  MOD_RES (486)..(486): Selenocysteine
  MOD_RES (494)..(494): Selenocysteine
MHLPRQHGSAHLGHLYAYAKFSAHDWHLHAQGHAICNAHGKGKGHRMXPACPLLLSVILSLRLAXAFDPAPSACSALASGVLYGAFSLQDLFPXIASGCSWXLENPDPXKYSLYLRFNRQEQVCAHFAPRLLPLDHYLVNFXCLRPSPEEAVAQAESEVGRPEEEEAEAAAGLELCSGSGPFXFLHFDKNFVQLCLSAEPSEAPRLLAPAALAFRFVEVLLINNNNSSQFXCGVLCRWSEECGRAAGRACGFAQPGCSCPGEAGAGSXXXXSPGPPAAHXLSNALVPGGPAPPAEADLHSGSSNDLFXXEMRYGEEPEEEPKVKXQWPRSADEPGLYMAQXVHGVWEEWGSWSLCSRSCGRGSRSRMRXCVPPQHGGKACEGPELQXKLCSMAACPVEGQWLEWGPWGPCSXSCANGXQQRSRKCSVAGPAWAXCXGALXDXRECSNLECPAXDSKWGPWNAWSLCSKXCDXGWQRRFRMCQAXGXQGYPCEGXGEEVKPCSEKRCP

SEQ ID NO: 1621 - protein, 1500 aa, Homo sapiens
  MOD_RES (9)..(9): Selenocysteine
  MOD_RES (17)..(17): Selenocysteine
  MOD_RES (34)..(34): Selenocysteine
  MOD_RES (63)..(63): Selenocysteine
  MOD_RES (71)..(71): Selenocysteine
  MOD_RES (78)..(78): Selenocysteine
  MOD_RES (111)..(111): Selenocysteine
  MOD_RES (152)..(152): Selenocysteine
  MOD_RES (200)..(200): Selenocysteine
  MOD_RES (237)..(240): Selenocysteine
  MOD_RES (249)..(249): Selenocysteine
  MOD_RES (277)..(278): Selenocysteine
  MOD_RES (294)..(294): Selenocysteine
  MOD_RES (310)..(310): Selenocysteine
  MOD_RES (338)..(338): Selenocysteine
  MOD_RES (356)..(356): Selenocysteine
  MOD_RES (381)..(381): Selenocysteine
  MOD_RES (387)..(387): Selenocysteine
  MOD_RES (403)..(403): Selenocysteine
  MOD_RES (405)..(405): Selenocysteine
  MOD_RES (409)..(409): Selenocysteine
  MOD_RES (411)..(411): Selenocysteine
  MOD_RES (422)..(422): Selenocysteine
  MOD_RES (438)..(438): Selenocysteine
  MOD_RES (441)..(441): Selenocysteine
  MOD_RES (453)..(453): Selenocysteine
  MOD_RES (455)..(455): Selenocysteine
  MOD_RES (463)..(463): Selenocysteine
  MOD_RES (491)..(491): Selenocysteine
  MOD_RES (578)..(578): Selenocysteine
  MOD_RES (595)..(595): Selenocysteine
  MOD_RES (597)..(597): Selenocysteine
  MOD_RES (602)..(602): Selenocysteine
  MOD_RES (667)..(667): Selenocysteine
  MOD_RES (687)..(687): Selenocysteine
  MOD_RES (724)..(724): Selenocysteine
  MOD_RES (739)..(739): Selenocysteine
  MOD_RES (771)..(771): Selenocysteine
  MOD_RES (786)..(786): Selenocysteine
  MOD_RES (791)..(791): Selenocysteine
  MOD_RES (793)..(793): Selenocysteine
  MOD_RES (798)..(798): Selenocysteine
  MOD_RES (807)..(807): Selenocysteine
  MOD_RES (817)..(818): Selenocysteine
  MOD_RES (839)..(839): Selenocysteine
  MOD_RES (844)..(844): Selenocysteine
  MOD_RES (847)..(847): Selenocysteine
  MOD_RES (852)..(852): Selenocysteine
  MOD_RES (861)..(861): Selenocysteine
  MOD_RES (873)..(873): Selenocysteine
  MOD_RES (897)..(897): Selenocysteine
  MOD_RES (945)..(945): Selenocysteine
  MOD_RES (947)..(947): Selenocysteine
  MOD_RES (964)..(964): Selenocysteine
  MOD_RES (979)..(979): Selenocysteine
  MOD_RES (1005)..(1005): Selenocysteine
  MOD_RES (1007)..(1007): Selenocysteine
  MOD_RES (1012)..(1012): Selenocysteine
  MOD_RES (1082)..(1082): Selenocysteine
  MOD_RES (1091)..(1091): Selenocysteine
  MOD_RES (1114)..(1114): Selenocysteine
  MOD_RES (1168)..(1168): Selenocysteine
  MOD_RES (1176)..(1176): Selenocysteine
  MOD_RES (1181)..(1181): Selenocysteine
  MOD_RES (1183)..(1183): Selenocysteine
  MOD_RES (1185)..(1185): Selenocysteine
  MOD_RES (1253)..(1253): Selenocysteine
  MOD_RES (1258)..(1258): Selenocysteine
  MOD_RES (1273)..(1273): Selenocysteine
  MOD_RES (1296)..(1296): Selenocysteine
  MOD_RES (1303)..(1303): Selenocysteine
  MOD_RES (1307)..(1307): Selenocysteine
  MOD_RES (1337)..(1337): Selenocysteine
  MOD_RES (1344)..(1344): Selenocysteine
  MOD_RES (1359)..(1359): Selenocysteine
  MOD_RES (1363)..(1363): Selenocysteine
  MOD_RES (1368)..(1368): Selenocysteine
  MOD_RES (1392)..(1392): Selenocysteine
  MOD_RES (1409)..(1409): Selenocysteine
  MOD_RES (1418)..(1418): Selenocysteine
  MOD_RES (1439)..(1439): Selenocysteine
  MOD_RES (1461)..(1461): Selenocysteine
  MOD_RES (1466)..(1466): Selenocysteine
  MOD_RES (1479)..(1479): Selenocysteine
  MOD_RES (1489)..(1489): Selenocysteine
  MOD_RES (1498)..(1498): Selenocysteine
MLSLRGPDXHGKGHRMXPACPLLLSVILSLRLAXAFDPAPSACSALASGVLYGAFSLQDLFPXIASGCSWXLENPDPXKYSLYLRFNRQEQVCAHFAPRLLPLDHYLVNFXCLRPSPEEAVAQAESEVGRPEEEEAEAAAGLELCSGSGPFXFLHFDKNFVQLCLSAEPSEAPRLLAPAALAFRFVEVLLINNNNSSQFXCGVLCRWSEECGRAAGRACGFAQPGCSCPGEAGAGSXXXXSPGPPAAHXLSNALVPGGPAPPAEADLHSGSSNDLFXXEMRYGEEPEEEPKVKXQWPRSADEPGLYMAQXVHGVWEEWGSWSLCSRSCGRGSRSRMRXCVPPQHGGKACEGPELQXKLCSMAACPVEGQWLEWGPWGPCSXSCANGXQQRSRKCSVAGPAWAXCXGALXDXRECSNLECPAXDSKWGPWNAWSLCSKXCDXGWQRRFRMCQAXGXQGYPCEGXGEEVKPCSEKRCPAFHEMCRDEYVMLMXWKKAAAGEIIYNKCPPNASGSASRRCLLSAQGVAYWGLPSFARCISHEYRYLYLSLREHLAKGQRMLAGEGMSQVVRSLQELLARRXYYSGDLLFSVDILRNVXDXFKRAXYVPSADDVQRFFQVVSFMVDAENKEKWDDAQQVSPGSVHLLRVVEDFIHLVGDALKAFQSSLIVXDNLVISIQREPVSAVSSDIXFPMRGRRGMKDWVRHSEDRLFLPKEVLSLSSPGKPAXSGAAGSPGRGRGPGXVPPGPGHSHQRLLPADPDESSYFVIGAVLYRXLGLILPPPRPPLAVXSRVMXVXVRPPXQPPAEPLIXVELSYIINGXXDPHCASWDYSRADASSGDWDXENCQXLEXQAAHXRCQCQHLSXFAVLAQPPKDLXLELAGSPSVPLVIGCAVSCMALLXLLAIYAAFWRFIKSERSIILLNFCLSILASNILILVGQSRVLSKGVCXMXAAFLHFFFLSSFCWVLXEAWQSYLAVIGRMRXRLVRKRFLCLGWGLPALVVAVSVGFXRXKGYGXSSYCWLSLEGGLLYAFVGPAAVIVLVNMLIGIIVFNKLMARDGISDKSKKQRAGASLWSSCVVLPLLALXWMSAVLAMXDRRSVLFQALFAVFNSAQGFVIXAVHCFLRREVQDVVKCQMGVCRADESEDSPDSCKNGQLQILSDFEKDVDLACQXVLFKEVNXCNPSXIXGXLSRLSLDEDEEPKSCLVGPEGSLSFSPLPGNILVPMAASPGLGEPPPPQEANPVYMCGEGGLRQLDLXWLRPXEPGSEGDYMVLPRRXLSLQPGGGGGGGEDAPRARPEGXPRRAAKXVAHXEGYPSFLSVDHSGLGLGPAYGSLQNPYGMXFQPPPPXPSARQVPEPGERSRXMPRXVPGSXMKMGSLERKKLRYSDLDFEKVMHXRKRHSELYHELNQKFHXFDRYRSQSXAKREKRWSVSSGGAAERSVCXDKPSPGERPSLSQHRRHQSWSXFKSMXLGSLPPKPRERLXLHRAAAWEPXEPPDGDFQXEV

SEQ ID NO: 1622 - protein, 1466 aa, Homo sapiens
  MOD_RES (2)..(2): Selenocysteine
  MOD_RES (19)..(19): Selenocysteine
  MOD_RES (48)..(48): Selenocysteine
  MOD_RES (56)..(56): Selenocysteine
  MOD_RES (63)..(63): Selenocysteine
  MOD_RES (96)..(96): Selenocysteine
  MOD_RES (137)..(137): Selenocysteine
  MOD_RES (185)..(185): Selenocysteine
  MOD_RES (222)..(225): Selenocysteine
  MOD_RES (234)..(234): Selenocysteine
  MOD_RES (262)..(263): Selenocysteine
  MOD_RES (279)..(279): Selenocysteine
  MOD_RES (295)..(295): Selenocysteine
  MOD_RES (312)..(312): Selenocysteine
  MOD_RES (321)..(321): Selenocysteine
  MOD_RES (331)..(331): Selenocysteine
  MOD_RES (340)..(340): Selenocysteine
  MOD_RES (348)..(348): Selenocysteine
  MOD_RES (366)..(366): Selenocysteine
  MOD_RES (372)..(372): Selenocysteine
  MOD_RES (388)..(388): Selenocysteine
  MOD_RES (390)..(390): Selenocysteine
  MOD_RES (394)..(394): Selenocysteine
  MOD_RES (396)..(396): Selenocysteine
  MOD_RES (407)..(407): Selenocysteine
  MOD_RES (423)..(423): Selenocysteine
  MOD_RES (426)..(426): Selenocysteine
  MOD_RES (438)..(438): Selenocysteine
  MOD_RES (440)..(440): Selenocysteine
  MOD_RES (448)..(448): Selenocysteine
  MOD_RES (476)..(476): Selenocysteine
  MOD_RES (563)..(563): Selenocysteine
  MOD_RES (580)..(580): Selenocysteine
  MOD_RES (582)..(582): Selenocysteine
  MOD_RES (587)..(587): Selenocysteine
  MOD_RES (652)..(652): Selenocysteine
  MOD_RES (672)..(672): Selenocysteine
  MOD_RES (709)..(709): Selenocysteine
  MOD_RES (724)..(724): Selenocysteine
  MOD_RES (756)..(756): Selenocysteine
  MOD_RES (771)..(771): Selenocysteine
  MOD_RES (776)..(776): Selenocysteine
  MOD_RES (778)..(778): Selenocysteine
  MOD_RES (783)..(783): Selenocysteine
  MOD_RES (792)..(792): Selenocysteine
  MOD_RES (802)..(803): Selenocysteine
  MOD_RES (824)..(824): Selenocysteine
  MOD_RES (829)..(829): Selenocysteine
  MOD_RES (832)..(832): Selenocysteine
  MOD_RES (837)..(837): Selenocysteine
  MOD_RES (846)..(846): Selenocysteine
  MOD_RES (858)..(858): Selenocysteine
  MOD_RES (882)..(882): Selenocysteine
  MOD_RES (930)..(930): Selenocysteine
  MOD_RES (932)..(932): Selenocysteine
  MOD_RES (949)..(949): Selenocysteine
  MOD_RES (964)..(964): Selenocysteine
  MOD_RES (990)..(990): Selenocysteine
  MOD_RES (992)..(992): Selenocysteine
  MOD_RES (997)..(997): Selenocysteine
  MOD_RES (1067)..(1067): Selenocysteine
  MOD_RES (1076)..(1076): Selenocysteine
  MOD_RES (1099)..(1099): Selenocysteine
  MOD_RES (1153)..(1153): Selenocysteine
  MOD_RES (1161)..(1161): Selenocysteine
  MOD_RES (1166)..(1166): Selenocysteine
  MOD_RES (1168)..(1168): Selenocysteine
  MOD_RES (1170)..(1170): Selenocysteine
  MOD_RES (1238)..(1238): Selenocysteine
  MOD_RES (1243)..(1243): Selenocysteine
  MOD_RES (1258)..(1258): Selenocysteine
  MOD_RES (1281)..(1281): Selenocysteine
  MOD_RES (1288)..(1288): Selenocysteine
  MOD_RES (1292)..(1292): Selenocysteine
  MOD_RES (1322)..(1322): Selenocysteine
  MOD_RES (1329)..(1329): Selenocysteine
  MOD_RES (1344)..(1344): Selenocysteine
  MOD_RES (1348)..(1348): Selenocysteine
  MOD_RES (1353)..(1353): Selenocysteine
  MOD_RES (1377)..(1377): Selenocysteine
  MOD_RES (1394)..(1394): Selenocysteine
  MOD_RES (1403)..(1403): Selenocysteine
  MOD_RES (1427)..(1427): Selenocysteine
  MOD_RES (1432)..(1432): Selenocysteine
  MOD_RES (1445)..(1445): Selenocysteine
  MOD_RES (1455)..(1455): Selenocysteine
  MOD_RES (1464)..(1464): Selenocysteine
MXPACPLLLSVILSLRLAXAFDPAPSACSALASGVLYGAFSLQDLFPXIASGCSWXLENPDPXKYSLYLRFNRQEQVCAHFAPRLLPLDHYLVNFXCLRPSPEEAVAQAESEVGRPEEEEAEAAAGLELCSGSGPFXFLHFDKNFVQLCLSAEPSEAPRLLAPAALAFRFVEVLLINNNNSSQFXCGVLCRWSEECGRAAGRACGFAQPGCSCPGEAGAGSXXXXSPGPPAAHXLSNALVPGGPAPPAEADLHSGSSNDLFXXEMRYGEEPEEEPKVKXQWPRSADEPGLYMAQXGDPAAEEWSPWSVCSLXCGQGLQVRXRSCVSSPYGXLCSGPLREXRPCNNSAXCPVEGQWLEWGPWGPCSXSCANGXQQRSRKCSVAGPAWAXCXGALXDXRECSNLECPAXDSKWGPWNAWSLCSKXCDXGWQRRFRMCQAXGXQGYPCEGXGEEVKPCSEKRCPAFHEMCRDEYVMLMXWKKAAAGEIIYNKCPPNASGSASRRCLLSAQGVAYWGLPSFARCISHEYRYLYLSLREHLAKGQRMLAGEGMSQVVRSLQELLARRXYYSGDLLFSVDILRNVXDXFKRAXYVPSADDVQRFFQVVSFMVDAENKEKWDDAQQVSPGSVHLLRVVEDFIHLVGDALKAFQSSLIVXDNLVISIQREPVSAVSSDIXFPMRGRRGMKDWVRHSEDRLFLPKEVLSLSSPGKPAXSGAAGSPGRGRGPGXVPPGPGHSHQRLLPADPDESSYFVIGAVLYRXLGLILPPPRPPLAVXSRVMXVXVRPPXQPPAEPLIXVELSYIINGXXDPHCASWDYSRADASSGDWDXENCQXLEXQAAHXRCQCQHLSXFAVLAQPPKDLXLELAGSPSVPLVIGCAVSCMALLXLLAIYAAFWRFIKSERSIILLNFCLSILASNILILVGQSRVLSKGVCXMXAAFLHFFFLSSFCWVLXEAWQSYLAVIGRMRXRLVRKRFLCLGWGLPALVVAVSVGFXRXKGYGXSSYCWLSLEGGLLYAFVGPAAVIVLVNMLIGIIVFNKLMARDGISDKSKKQRAGASLWSSCVVLPLLALXWMSAVLAMXDRRSVLFQALFAVFNSAQGFVIXAVHCFLRREVQDVVKCQMGVCRADESEDSPDSCKNGQLQILSDFEKDVDLACQXVLFKEVNXCNPSXIXGXLSRLSLDEDEEPKSCLVGPEGSLSFSPLPGNILVPMAASPGLGEPPPPQEANPVYMCGEGGLRQLDLXWLRPXEPGSEGDYMVLPRRXLSLQPGGGGGGGEDAPRARPEGXPRRAAKXVAHXEGYPSFLSVDHSGLGLGPAYGSLQNPYGMXFQPPPPXPSARQVPEPGERSRXMPRXVPGSXMKMGSLERKKLRYSDLDFEKVMHXRKRHSELYHELNQKFHXFDRYRSQSXAKDKPSPGERPSLSQHRRHQSWSXFKSMXLGSLPPKPRERLXLHRAAAWEPXEPPDGDFQXEV

SEQ ID NO: 1623 - protein, 1499 aa, Homo sapiens
  MOD_RES (2)..(2): Selenocysteine
  MOD_RES (19)..(19): Selenocysteine
  MOD_RES (48)..(48): Selenocysteine
  MOD_RES (56)..(56): Selenocysteine
  MOD_RES (63)..(63): Selenocysteine
  MOD_RES (96)..(96): Selenocysteine
  MOD_RES (137)..(137): Selenocysteine
  MOD_RES (185)..(185): Selenocysteine
  MOD_RES (222)..(225): Selenocysteine
  MOD_RES (234)..(234): Selenocysteine
  MOD_RES (262)..(263): Selenocysteine
  MOD_RES (279)..(279): Selenocysteine
  MOD_RES (295)..(295): Selenocysteine
  MOD_RES (323)..(323): Selenocysteine
  MOD_RES (341)..(341): Selenocysteine
  MOD_RES (366)..(366): Selenocysteine
  MOD_RES (372)..(372): Selenocysteine
  MOD_RES (388)..(388): Selenocysteine
  MOD_RES (390)..(390): Selenocysteine
  MOD_RES (394)..(394): Selenocysteine
  MOD_RES (396)..(396): Selenocysteine
  MOD_RES (407)..(407): Selenocysteine
  MOD_RES (423)..(423): Selenocysteine
  MOD_RES (426)..(426): Selenocysteine
  MOD_RES (438)..(438): Selenocysteine
  MOD_RES (440)..(440): Selenocysteine
  MOD_RES (448)..(448): Selenocysteine
  MOD_RES (476)..(476): Selenocysteine
  MOD_RES (563)..(563): Selenocysteine
  MOD_RES (580)..(580): Selenocysteine
  MOD_RES (582)..(582): Selenocysteine
  MOD_RES (587)..(587): Selenocysteine
  MOD_RES (652)..(652): Selenocysteine
  MOD_RES (672)..(672): Selenocysteine
  MOD_RES (709)..(709): Selenocysteine
  MOD_RES (724)..(724): Selenocysteine
  MOD_RES (756)..(756): Selenocysteine
  MOD_RES (771)..(771): Selenocysteine
  MOD_RES (776)..(776): Selenocysteine
  MOD_RES (778)..(778): Selenocysteine
  MOD_RES (783)..(783): Selenocysteine
  MOD_RES (792)..(792): Selenocysteine
  MOD_RES (802)..(803): Selenocysteine
  MOD_RES (824)..(824): Selenocysteine
  MOD_RES (829)..(829): Selenocysteine
  MOD_RES (832)..(832): Selenocysteine
  MOD_RES (837)..(837): Selenocysteine
  MOD_RES (846)..(846): Selenocysteine
  MOD_RES (858)..(858): Selenocysteine
  MOD_RES (882)..(882): Selenocysteine
  MOD_RES (930)..(930): Selenocysteine
  MOD_RES (932)..(932): Selenocysteine
  MOD_RES (949)..(949): Selenocysteine
  MOD_RES (964)..(964): Selenocysteine
  MOD_RES (990)..(990): Selenocysteine
  MOD_RES (992)..(992): Selenocysteine
  MOD_RES (997)..(997): Selenocysteine
  MOD_RES (1100)..(1100): Selenocysteine
  MOD_RES (1109)..(1109): Selenocysteine
  MOD_RES (1132)..(1132): Selenocysteine
  MOD_RES (1186)..(1186): Selenocysteine
  MOD_RES (1194)..(1194): Selenocysteine
  MOD_RES (1199)..(1199): Selenocysteine
  MOD_RES (1201)..(1201): Selenocysteine
  MOD_RES (1203)..(1203): Selenocysteine
  MOD_RES (1271)..(1271): Selenocysteine
  MOD_RES (1276)..(1276): Selenocysteine
  MOD_RES (1291)..(1291): Selenocysteine
  MOD_RES (1314)..(1314): Selenocysteine
  MOD_RES (1321)..(1321): Selenocysteine
  MOD_RES (1325)..(1325): Selenocysteine
  MOD_RES (1355)..(1355): Selenocysteine
  MOD_RES (1362)..(1362): Selenocysteine
  MOD_RES (1377)..(1377): Selenocysteine
  MOD_RES (1381)..(1381): Selenocysteine
  MOD_RES (1386)..(1386): Selenocysteine
  MOD_RES (1410)..(1410): Selenocysteine
  MOD_RES (1427)..(1427): Selenocysteine
  MOD_RES (1436)..(1436): Selenocysteine
  MOD_RES (1460)..(1460): Selenocysteine
  MOD_RES (1465)..(1465): Selenocysteine
  MOD_RES (1478)..(1478): Selenocysteine
  MOD_RES (1488)..(1488): Selenocysteine
  MOD_RES (1497)..(1497): Selenocysteine
MXPACPLLLSVILSLRLAXAFDPAPSACSALASGVLYGAFSLQDLFPXIASGCSWXLENPDPXKYSLYLRFNRQEQVCAHFAPRLLPLDHYLVNFXCLRPSPEEAVAQAESEVGRPEEEEAEAAAGLELCSGSGPFXFLHFDKNFVQLCLSAEPSEAPRLLAPAALAFRFVEVLLINNNNSSQFXCGVLCRWSEECGRAAGRACGFAQPGCSCPGEAGAGSXXXXSPGPPAAHXLSNALVPGGPAPPAEADLHSGSSNDLFXXEMRYGEEPEEEPKVKXQWPRSADEPGLYMAQXVHGVWEEWGSWSLCSRSCGRGSRSRMRXCVPPQHGGKACEGPELQXKLCSMAACPVEGQWLEWGPWGPCSXSCANGXQQRSRKCSVAGPAWAXCXGALXDXRECSNLECPAXDSKWGPWNAWSLCSKXCDXGWQRRFRMCQAXGXQGYPCEGXGEEVKPCSEKRCPAFHEMCRDEYVMLMXWKKAAAGEIIYNKCPPNASGSASRRCLLSAQGVAYWGLPSFARCISHEYRYLYLSLREHLAKGQRMLAGEGMSQVVRSLQELLARRXYYSGDLLFSVDILRNVXDXFKRAXYVPSADDVQRFFQVVSFMVDAENKEKWDDAQQVSPGSVHLLRVVEDFIHLVGDALKAFQSSLIVXDNLVISIQREPVSAVSSDIXFPMRGRRGMKDWVRHSEDRLFLPKEVLSLSSPGKPAXSGAAGSPGRGRGPGXVPPGPGHSHQRLLPADPDESSYFVIGAVLYRXLGLILPPPRPPLAVXSRVMXVXVRPPXQPPAEPLIXVELSYIINGXXDPHCASWDYSRADASSGDWDXENCQXLEXQAAHXRCQCQHLSXFAVLAQPPKDLXLELAGSPSVPLVIGCAVSCMALLXLLAIYAAFWRFIKSERSIILLNFCLSILASNILILVGQSRVLSKGVCXMXAAFLHFFFLSSFCWVLXEAWQSYLAVIGRMRXRLVRKRFLCLGWGLPALVVAVSVGFXRXKGYGXSSYCWLSLEGGLLYAFVGPAAVIVLVNMLIGIIVFNKLMARDGISDKSKKQRAGSERCPWASLLLPCSACGAVPSPLLSSASARNAMASLWSSCVVLPLLALXWMSAVLAMXDRRSVLFQALFAVFNSAQGFVIXAVHCFLRREVQDVVKCQMGVCRADESEDSPDSCKNGQLQILSDFEKDVDLACQXVLFKEVNXCNPSXIXGXLSRLSLDEDEEPKSCLVGPEGSLSFSPLPGNILVPMAASPGLGEPPPPQEANPVYMCGEGGLRQLDLXWLRPXEPGSEGDYMVLPRRXLSLQPGGGGGGGEDAPRARPEGXPRRAAKXVAHXEGYPSFLSVDHSGLGLGPAYGSLQNPYGMXFQPPPPXPSARQVPEPGERSRXMPRXVPGSXMKMGSLERKKLRYSDLDFEKVMHXRKRHSELYHELNQKFHXFDRYRSQSXAKDKPSPGERPSLSQHRRHQSWSXFKSMXLGSLPPKPRERLXLHRAAAWEPXEPPDGDFQXEV

SEQ ID NO: 1624 - protein, 1554 aa, Homo sapiens
  MOD_RES (2)..(2): Selenocysteine
  MOD_RES (19)..(19): Selenocysteine
  MOD_RES (48)..(48): Selenocysteine
  MOD_RES (56)..(56): Selenocysteine
  MOD_RES (63)..(63): Selenocysteine
  MOD_RES (96)..(96): Selenocysteine
  MOD_RES (137)..(137): Selenocysteine
  MOD_RES (185)..(185): Selenocysteine
  MOD_RES (222)..(225): Selenocysteine
  MOD_RES (234)..(234): Selenocysteine
  MOD_RES (262)..(263): Selenocysteine
  MOD_RES (279)..(279): Selenocysteine
  MOD_RES (295)..(295): Selenocysteine
  MOD_RES (312)..(312): Selenocysteine
  MOD_RES (321)..(321): Selenocysteine
  MOD_RES (331)..(331): Selenocysteine
  MOD_RES (340)..(340): Selenocysteine
  MOD_RES (348)..(348): Selenocysteine
  MOD_RES (378)..(378): Selenocysteine
  MOD_RES (396)..(396): Selenocysteine
  MOD_RES (421)..(421): Selenocysteine
  MOD_RES (427)..(427): Selenocysteine
  MOD_RES (443)..(443): Selenocysteine
  MOD_RES (445)..(445): Selenocysteine
  MOD_RES (449)..(449): Selenocysteine
  MOD_RES (451)..(451): Selenocysteine
  MOD_RES (462)..(462): Selenocysteine
  MOD_RES (478)..(478): Selenocysteine
  MOD_RES (481)..(481): Selenocysteine
  MOD_RES (493)..(493): Selenocysteine
  MOD_RES (495)..(495): Selenocysteine
  MOD_RES (503)..(503): Selenocysteine
  MOD_RES (531)..(531): Selenocysteine
  MOD_RES (618)..(618): Selenocysteine
  MOD_RES (635)..(635): Selenocysteine
  MOD_RES (637)..(637): Selenocysteine
  MOD_RES (642)..(642): Selenocysteine
  MOD_RES (707)..(707): Selenocysteine
  MOD_RES (727)..(727): Selenocysteine
  MOD_RES (764)..(764): Selenocysteine
  MOD_RES (779)..(779): Selenocysteine
  MOD_RES (811)..(811): Selenocysteine
  MOD_RES (826)..(826): Selenocysteine
  MOD_RES (831)..(831): Selenocysteine
  MOD_RES (833)..(833): Selenocysteine
  MOD_RES (838)..(838): Selenocysteine
  MOD_RES (847)..(847): Selenocysteine
  MOD_RES (857)..(858): Selenocysteine
  MOD_RES (879)..(879): Selenocysteine
  MOD_RES (884)..(884): Selenocysteine
  MOD_RES (887)..(887): Selenocysteine
  MOD_RES (892)..(892): Selenocysteine
  MOD_RES (901)..(901): Selenocysteine
  MOD_RES (913)..(913): Selenocysteine
  MOD_RES (937)..(937): Selenocysteine
  MOD_RES (985)..(985): Selenocysteine
  MOD_RES (987)..(987): Selenocysteine
  MOD_RES (1004)..(1004): Selenocysteine
  MOD_RES (1019)..(1019): Selenocysteine
  MOD_RES (1045)..(1045): Selenocysteine
  MOD_RES (1047)..(1047): Selenocysteine
  MOD_RES (1052)..(1052): Selenocysteine
  MOD_RES (1155)..(1155): Selenocysteine
  MOD_RES (1164)..(1164): Selenocysteine
  MOD_RES (1187)..(1187): Selenocysteine
  MOD_RES (1241)..(1241): Selenocysteine
  MOD_RES (1249)..(1249): Selenocysteine
  MOD_RES (1254)..(1254): Selenocysteine
  MOD_RES (1256)..(1256): Selenocysteine
  MOD_RES (1258)..(1258): Selenocysteine
  MOD_RES (1326)..(1326): Selenocysteine
  MOD_RES (1331)..(1331): Selenocysteine
  MOD_RES (1346)..(1346): Selenocysteine
  MOD_RES (1369)..(1369): Selenocysteine
  MOD_RES (1376)..(1376): Selenocysteine
  MOD_RES (1380)..(1380): Selenocysteine
  MOD_RES (1410)..(1410): Selenocysteine
  MOD_RES (1417)..(1417): Selenocysteine
  MOD_RES (1432)..(1432): Selenocysteine
  MOD_RES (1436)..(1436): Selenocysteine
  MOD_RES (1441)..(1441): Selenocysteine
  MOD_RES (1465)..(1465): Selenocysteine
  MOD_RES (1482)..(1482): Selenocysteine
  MOD_RES (1491)..(1491): Selenocysteine
  MOD_RES (1515)..(1515): Selenocysteine
  MOD_RES (1520)..(1520): Selenocysteine
  MOD_RES (1533)..(1533): Selenocysteine
  MOD_RES (1543)..(1543): Selenocysteine
  MOD_RES (1552)..(1552): Selenocysteine
MXPACPLLLSVILSLRLAXAFDPAPSACSALASGVLYGAFSLQDLFPXIASGCSWXLENPDPXKYSLYLRFNRQEQVCAHFAPRLLPLDHYLVNFXCLRPSPEEAVAQAESEVGRPEEEEAEAAAGLELCSGSGPFXFLHFDKNFVQLCLSAEPSEAPRLLAPAALAFRFVEVLLINNNNSSQFXCGVLCRWSEECGRAAGRACGFAQPGCSCPGEAGAGSXXXXSPGPPAAHXLSNALVPGGPAPPAEADLHSGSSNDLFXXEMRYGEEPEEEPKVKXQWPRSADEPGLYMAQXGDPAAEEWSPWSVCSLXCGQGLQVRXRSCVSSPYGXLCSGPLREXRPCNNSAXCPVHGVWEEWGSWSLCSRSCGRGSRSRMRXCVPPQHGGKACEGPELQXKLCSMAACPVEGQWLEWGPWGPCSXSCANGXQQRSRKCSVAGPAWAXCXGALXDXRECSNLECPAXDSKWGPWNAWSLCSKXCDXGWQRRFRMCQAXGXQGYPCEGXGEEVKPCSEKRCPAFHEMCRDEYVMLMXWKKAAAGEIIYNKCPPNASGSASRRCLLSAQGVAYWGLPSFARCISHEYRYLYLSLREHLAKGQRMLAGEGMSQVVRSLQELLARRXYYSGDLLFSVDILRNVXDXFKRAXYVPSADDVQRFFQVVSFMVDAENKEKWDDAQQVSPGSVHLLRVVEDFIHLVGDALKAFQSSLIVXDNLVISIQREPVSAVSSDIXFPMRGRRGMKDWVRHSEDRLFLPKEVLSLSSPGKPAXSGAAGSPGRGRGPGXVPPGPGHSHQRLLPADPDESSYFVIGAVLYRXLGLILPPPRPPLAVXSRVMXVXVRPPXQPPAEPLIXVELSYIINGXXDPHCASWDYSRADASSGDWDXENCQXLEXQAAHXRCQCQHLSXFAVLAQPPKDLXLELAGSPSVPLVIGCAVSCMALLXLLAIYAAFWRFIKSERSIILLNFCLSILASNILILVGQSRVLSKGVCXMXAAFLHFFFLSSFCWVLXEAWQSYLAVIGRMRXRLVRKRFLCLGWGLPALVVAVSVGFXRXKGYGXSSYCWLSLEGGLLYAFVGPAAVIVLVNMLIGIIVFNKLMARDGISDKSKKQRAGSERCPWASLLLPCSACGAVPSPLLSSASARNAMASLWSSCVVLPLLALXWMSAVLAMXDRRSVLFQALFAVFNSAQGFVIXAVHCFLRREVQDVVKCQMGVCRADESEDSPDSCKNGQLQILSDFEKDVDLACQXVLFKEVNXCNPSXIXGXLSRLSLDEDEEPKSCLVGPEGSLSFSPLPGNILVPMAASPGLGEPPPPQEANPVYMCGEGGLRQLDLXWLRPXEPGSEGDYMVLPRRXLSLQPGGGGGGGEDAPRARPEGXPRRAAKXVAHXEGYPSFLSVDHSGLGLGPAYGSLQNPYGMXFQPPPPXPSARQVPEPGERSRXMPRXVPGSXMKMGSLERKKLRYSDLDFEKVMHXRKRHSELYHELNQKFHXFDRYRSQSXAKDKPSPGERPSLSQHRRHQSWSXFKSMXLGSLPPKPRERLXLHRAAAWEPXEPPDGDFQXEV

SEQ ID NO: 1625 - protein, 68 aa, Homo sapiens
  MOD_RES (6)..(6): Selenocysteine
  MOD_RES (10)..(10): Selenocysteine
  MOD_RES (24)..(24): Selenocysteine
  MOD_RES (63)..(63): Selenocysteine
  MOD_RES (65)..(65): Selenocysteine
MESSGXPSVXLIVGSGLSCLALIXLAVVYAALWRYIRSERSIILINFCLSIISSNILILVGQXQXHNK

SEQ ID NO: 1626 - protein, 145 aa, Homo sapiens
  MOD_RES (17)..(17): Selenocysteine
  MOD_RES (20)..(20): Selenocysteine
  MOD_RES (25)..(25): Selenocysteine
  MOD_RES (28)..(28): Selenocysteine
  MOD_RES (33)..(33): Selenocysteine
  MOD_RES (42)..(42): Selenocysteine
  MOD_RES (60)..(60): Selenocysteine
  MOD_RES (64)..(64): Selenocysteine
  MOD_RES (78)..(78): Selenocysteine
  MOD_RES (117)..(117): Selenocysteine
  MOD_RES (119)..(119): Selenocysteine
  MOD_RES (126)..(129): Selenocysteine
  MOD_RES (145)..(145): Selenocysteine
MHLNYILFNNKNESLGXWSXQGCKXVLXDASHXKCLCDRLSXFAILAQQPREIIMESSGXPSVXLIVGSGLSCLALIXLAVVYAALWRYIRSERSIILINFCLSIISSNILILVGQXQXHNKSICXXXXAFLHFFFLASFCWVLX

SEQ ID NO: 1627 - protein, 1522 aa, Homo sapiens
  MOD_RES (14)..(14): Selenocysteine
  MOD_RES (32)..(32): Selenocysteine
  MOD_RES (53)..(53): Selenocysteine
  MOD_RES (56)..(56): Selenocysteine
  MOD_RES (58)..(58): Selenocysteine
  MOD_RES (65)..(65): Selenocysteine
  MOD_RES (136)..(136): Selenocysteine
  MOD_RES (173)..(173): Selenocysteine
  MOD_RES (186)..(186): Selenocysteine
  MOD_RES (194)..(194): Selenocysteine
  MOD_RES (197)..(197): Selenocysteine
  MOD_RES (226)..(226): Selenocysteine
  MOD_RES (231)..(231): Selenocysteine
  MOD_RES (236)..(237): Selenocysteine
  MOD_RES (243)..(243): Selenocysteine
  MOD_RES (261)..(261): Selenocysteine
  MOD_RES (289)..(289): Selenocysteine
  MOD_RES (302)..(302): Selenocysteine
  MOD_RES (306)..(306): Selenocysteine
  MOD_RES (315)..(315): Selenocysteine
  MOD_RES (317)..(317): Selenocysteine
  MOD_RES (324)..(324): Selenocysteine
  MOD_RES (339)..(339): Selenocysteine
  MOD_RES (360)..(360): Selenocysteine
  MOD_RES (367)..(367): Selenocysteine
  MOD_RES (369)..(369): Selenocysteine
  MOD_RES (373)..(373): Selenocysteine
  MOD_RES (387)..(387): Selenocysteine
  MOD_RES (415)..(415): Selenocysteine
  MOD_RES (420)..(420): Selenocysteine
  MOD_RES (428)..(428): Selenocysteine
  MOD_RES (453)..(453): Selenocysteine
  MOD_RES (481)..(481): Selenocysteine
  MOD_RES (488)..(488): Selenocysteine
  MOD_RES (495)..(495): Selenocysteine
  MOD_RES (527)..(527): Selenocysteine
  MOD_RES (542)..(542): Selenocysteine
  MOD_RES (544)..(545): Selenocysteine
  MOD_RES (599)..(599): Selenocysteine
  MOD_RES (601)..(601): Selenocysteine
  MOD_RES (606)..(606): Selenocysteine
  MOD_RES (627)..(627): Selenocysteine
  MOD_RES (629)..(629): Selenocysteine
  MOD_RES (699)..(699): Selenocysteine
  MOD_RES (716)..(716): Selenocysteine
  MOD_RES (747)..(747): Selenocysteine
  MOD_RES (776)..(776): Selenocysteine
  MOD_RES (781)..(781): Selenocysteine
  MOD_RES (791)..(791): Selenocysteine
  MOD_RES (798)..(799): Selenocysteine
  MOD_RES (814)..(814): Selenocysteine
  MOD_RES (827)..(827): Selenocysteine
  MOD_RES (833)..(833): Selenocysteine
  MOD_RES (836)..(836): Selenocysteine
  MOD_RES (841)..(841): Selenocysteine
  MOD_RES (844)..(844): Selenocysteine
  MOD_RES (849)..(849): Selenocysteine
  MOD_RES (858)..(858): Selenocysteine
  MOD_RES (876)..(876): Selenocysteine
  MOD_RES (880)..(880): Selenocysteine
  MOD_RES (894)..(894): Selenocysteine
  MOD_RES (933)..(933): Selenocysteine
  MOD_RES (935)..(935): Selenocysteine
  MOD_RES (942)..(945): Selenocysteine
  MOD_RES (961)..(961): Selenocysteine
  MOD_RES (971)..(971): Selenocysteine
  MOD_RES (976)..(976): Selenocysteine
  MOD_RES (997)..(997): Selenocysteine
  MOD_RES (1002)..(1002): Selenocysteine
  MOD_RES (1004)..(1004): Selenocysteine
  MOD_RES (1009)..(1009): Selenocysteine
  MOD_RES (1073)..(1073): Selenocysteine
  MOD_RES (1084)..(1085): Selenocysteine
  MOD_RES (1090)..(1091): Selenocysteine
  MOD_RES (1112)..(1112): Selenocysteine
  MOD_RES (1121)..(1121): Selenocysteine
  MOD_RES (1186)..(1186): Selenocysteine
  MOD_RES (1211)..(1211): Selenocysteine
  MOD_RES (1213)..(1213): Selenocysteine
  MOD_RES (1215)..(1215): Selenocysteine
  MOD_RES (1230)..(1230): Selenocysteine
  MOD_RES (1239)..(1239): Selenocysteine
  MOD_RES (1254)..(1254): Selenocysteine
  MOD_RES (1280)..(1280): Selenocysteine
  MOD_RES (1285)..(1285): Selenocysteine
  MOD_RES (1334)..(1334): Selenocysteine
  MOD_RES (1382)..(1382): Selenocysteine
  MOD_RES (1403)..(1403): Selenocysteine
  MOD_RES (1406)..(1406): Selenocysteine
  MOD_RES (1430)..(1430): Selenocysteine
  MOD_RES (1447)..(1447): Selenocysteine
  MOD_RES (1457)..(1457): Selenocysteine
  MOD_RES (1472)..(1472): Selenocysteine
  MOD_RES (1483)..(1484): Selenocysteine
  MOD_RES (1490)..(1490): Selenocysteine
  MOD_RES (1520)..(1520): Selenocysteine
MKAVRNLLIYIFSXYLLVMFGFNAAQDFWCSXLVKGVIYGSYSVSEMFPKNFXNCXWXLENPDPXKYSIYLKFSKKDLSCSNFSLLAYQFDHFSHEKIKDLLRKNHSIMQLCNSKNAFVFLQYDKNFIQIRRVFPXNFPGLQKKGEEDQKSFFEFLVLNKVSPSQFGCHVLCXWLESCLKSENGRXESCGIMYXKCXCPQHLGEWGIDDQSLILLNNVVLPLNEQXEGCLXQELQXXQVCNLXREAKRPPKEEFGMMGDHXIKSQRPRSVHEKRVPQEQADAAKFMAQXGESGVEEWSQWSXCSVXCGQGSQVRXRXCVSPYGXHCSGPLRESRVCNNXALCPVHGVWEEWSPWSLCSFXCGRGQRXRXRSCXPPQYGGRPCEGPEXHHKPCNIALCPVDGQWQEWSSWSQCSVXCSNGXQQRSRQCXAAAHGGSECRGPWAESRECYNPECXANGQWNQWGHWSGCSKSCDGGWERRIRXCQGAVIXGQQCEGXGEEVRRCNEQRCPAPYEICPEDYLMSMVWKRXPAGDLAFNQCPLNAXGXXSRRCSLSLHGVAFWEQPSFARCISNEYRHLQHSIKEHLAKGQRMLAGDGMSQVXKXLLDLXQRKNFYAGDLLMSVEILRNVXDXFKRASYIPASDGVQNFFQIVSNLLDEENKEKWEDAQQIYPGSIELMQVIEDFIHIVGMGMMDFQNSYLMXGNVVASIQKLPAASVLXDINFPMKGRKGMVDWARNSEDRVVIPKSIFXPVSSKELDESSVFVLGAVLYKNLDLILPXLRNYXVINSKIIVVXIRPEPKXXDSFLEIELAHLANGXLNPYCVLWDDSKXNESLGXWSXQGCKXVLXDASHXKCLCDRLSXFAILAQQPREIIMESSGXPSVXLIVGSGLSCLALIXLAVVYAALWRYIRSERSIILINFCLSIISSNILILVGQXQXHNKSICXXXXAFLHFFFLASFCWVLXEAWQSYMAVXGKIRXRLIRKRFLCLGWGLPALVVAXSVGFXRXKGYGXDHYCWLSLEGGLLYAFVGPAAAVVLVNMVIGILVFNKLVSRDGILDKKLKHRAGQMSEPHSGLXLKCAKCGVVSXXALSAXXASNAMASLWSSCVVLPLLALXWMSAVLAMXDKRSILFQILFAVFDSLQGFVIVMVHCILRREVQDAFRCRLRNCQDPINADSSSSFPNGHAQIMXDFEKDVDIACRSVLHKDIGPCRAAXIXGXLSRISLNDDEEEKGXNPEGLSYSXLPGNVISKVIIQQPXGLHMPMSMNELSNPCLKKENSELRRXVYLCXDDNLRGADMDIVHPQERMMESDYIVMPRSSVNNQPSMKEESKMNIGMEXLPHERLLHYKVNPEFNMNPPVMDQFNMNLEQHLAPQEHMQNLPFEPRXAVKNFMASELDDNAGLSRSEXGSXISMSSLERRKSRYSDLDFEKVMHXRKRHMELFQELNQKFQXLDRFRDIPNXSSMENPAPNKNPWDXFKNPSEYPHYXXINVLDXEAKDALELRPAEWEKCLNLPLDVQEGDFQXEV

SEQ ID NO: 1628 - protein, 728 aa, Homo sapiens
  MOD_RES (39)..(39): Selenocysteine
  MOD_RES (42)..(42): Selenocysteine
  MOD_RES (47)..(47): Selenocysteine
  MOD_RES (50)..(50): Selenocysteine
  MOD_RES (55)..(55): Selenocysteine
  MOD_RES (64)..(64): Selenocysteine
  MOD_RES (82)..(82): Selenocysteine
  MOD_RES (86)..(86): Selenocysteine
  MOD_RES (100)..(100): Selenocysteine
  MOD_RES (139)..(139): Selenocysteine
  MOD_RES (141)..(141): Selenocysteine
  MOD_RES (148)..(151): Selenocysteine
  MOD_RES (167)..(167): Selenocysteine
  MOD_RES (177)..(177): Selenocysteine
  MOD_RES (182)..(182): Selenocysteine
  MOD_RES (203)..(203): Selenocysteine
  MOD_RES (208)..(208): Selenocysteine
  MOD_RES (210)..(210): Selenocysteine
  MOD_RES (215)..(215): Selenocysteine
  MOD_RES (279)..(279): Selenocysteine
  MOD_RES (290)..(291): Selenocysteine
  MOD_RES (296)..(297): Selenocysteine
  MOD_RES (318)..(318): Selenocysteine
  MOD_RES (327)..(327): Selenocysteine
  MOD_RES (392)..(392): Selenocysteine
  MOD_RES (417)..(417): Selenocysteine
  MOD_RES (419)..(419): Selenocysteine
  MOD_RES (421)..(421): Selenocysteine
  MOD_RES (436)..(436): Selenocysteine
  MOD_RES (445)..(445): Selenocysteine
  MOD_RES (460)..(460): Selenocysteine
  MOD_RES (486)..(486): Selenocysteine
  MOD_RES (491)..(491): Selenocysteine
  MOD_RES (540)..(540): Selenocysteine
  MOD_RES (588)..(588): Selenocysteine
  MOD_RES (609)..(609): Selenocysteine
  MOD_RES (612)..(612): Selenocysteine
  MOD_RES (636)..(636): Selenocysteine
  MOD_RES (653)..(653): Selenocysteine
  MOD_RES (663)..(663): Selenocysteine
  MOD_RES (678)..(678): Selenocysteine
  MOD_RES (689)..(690): Selenocysteine
  MOD_RES (696)..(696): Selenocysteine
  MOD_RES (726)..(726): Selenocysteine
MLLPQGKEAVEGKKCQGRQRRAGLSEVWSRKLRNESLGXWSXQGCKXVLXDASHXKCLCDRLSXFAILAQQPREIIMESSGXPSVXLIVGSGLSCLALIXLAVVYAALWRYIRSERSIILINFCLSIISSNILILVGQXQXHNKSICXXXXAFLHFFFLASFCWVLXEAWQSYMAVXGKIRXRLIRKRFLCLGWGLPALVVAXSVGFXRXKGYGXDHYCWLSLEGGLLYAFVGPAAAVVLVNMVIGILVFNKLVSRDGILDKKLKHRAGQMSEPHSGLXLKCAKCGVVSXXALSAXXASNAMASLWSSCVVLPLLALXWMSAVLAMXDKRSILFQILFAVFDSLQGFVIVMVHCILRREVQDAFRCRLRNCQDPINADSSSSFPNGHAQIMXDFEKDVDIACRSVLHKDIGPCRAAXIXGXLSRISLNDDEEEKGXNPEGLSYSXLPGNVISKVIIQQPXGLHMPMSMNELSNPCLKKENSELRRXVYLCXDDNLRGADMDIVHPQERMMESDYIVMPRSSVNNQPSMKEESKMNIGMEXLPHERLLHYKVNPEFNMNPPVMDQFNMNLEQHLAPQEHMQNLPFEPRXAVKNFMASELDDNAGLSRSEXGSXISMSSLERRKSRYSDLDFEKVMHXRKRHMELFQELNQKFQXLDRFRDIPNXSSMENPAPNKNPWDXFKNPSEYPHYXXINVLDXEAKDALELRPAEWEKCLNLPLDVQEGDFQXEV

SEQ ID NO: 1629 - protein, 906 aa, Homo sapiens
  MOD_RES (60)..(61): Selenocysteine
  MOD_RES (66)..(66): Selenocysteine
  MOD_RES (70)..(70): Selenocysteine
  MOD_RES (78)..(78): Selenocysteine
  MOD_RES (93)..(93): Selenocysteine
  MOD_RES (114)..(114): Selenocysteine
  MOD_RES (138)..(138): Selenocysteine
  MOD_RES (145)..(145): Selenocysteine
  MOD_RES (181)..(181): Selenocysteine
  MOD_RES (187)..(187): Selenocysteine
  MOD_RES (200)..(200): Selenocysteine
  MOD_RES (205)..(205): Selenocysteine
  MOD_RES (219)..(219): Selenocysteine
  MOD_RES (222)..(222): Selenocysteine
  MOD_RES (268)..(268): Selenocysteine
  MOD_RES (277)..(277): Selenocysteine
  MOD_RES (289)..(289): Selenocysteine
  MOD_RES (296)..(296): Selenocysteine
  MOD_RES (298)..(298): Selenocysteine
  MOD_RES (305)..(305): Selenocysteine
  MOD_RES (313)..(313): Selenocysteine
  MOD_RES (316)..(316): Selenocysteine
  MOD_RES (321)..(321): Selenocysteine
  MOD_RES (348)..(348): Selenocysteine
  MOD_RES (353)..(353): Selenocysteine
  MOD_RES (355)..(355): Selenocysteine
  MOD_RES (385)..(385): Selenocysteine
  MOD_RES (388)..(388): Selenocysteine
  MOD_RES (401)..(401): Selenocysteine
  MOD_RES (405)..(405): Selenocysteine
  MOD_RES (424)..(424): Selenocysteine
  MOD_RES (454)..(454): Selenocysteine
  MOD_RES (475)..(475): Selenocysteine
  MOD_RES (491)..(491): Selenocysteine
  MOD_RES (504)..(504): Selenocysteine
  MOD_RES (516)..(516): Selenocysteine
  MOD_RES (524)..(524): Selenocysteine
  MOD_RES (532)..(532): Selenocysteine
  MOD_RES (562)..(562): Selenocysteine
  MOD_RES (567)..(567): Selenocysteine
  MOD_RES (574)..(574): Selenocysteine
  MOD_RES (577)..(577): Selenocysteine
  MOD_RES (616)..(616): Selenocysteine
  MOD_RES (619)..(619): Selenocysteine
  MOD_RES (628)..(628): Selenocysteine
  MOD_RES (661)..(662): Selenocysteine
  MOD_RES (732)..(732): Selenocysteine
  MOD_RES (767)..(767): Selenocysteine
  MOD_RES (790)..(790): Selenocysteine
  MOD_RES (803)..(803): Selenocysteine
  MOD_RES (825)..(825): Selenocysteine
  MOD_RES (853)..(853): Selenocysteine
  MOD_RES (859)..(859): Selenocysteine
  MOD_RES (865)..(865): Selenocysteine
  MOD_RES (879)..(879): Selenocysteine
  MOD_RES (886)..(886): Selenocysteine
MEKLLRLCCWYSWLLLFYYNFQVRGVYSRSQDHPGFQVLASASHYWPLENVDGIHELQDXXGASRXHKLXVLPSRNAXFVYSNDSAYSNLSAXVDIVEGKVNKGIYLKEEKGVXLLYYGRYNSSCISKPEQCGPEGVXFSFFWKXQGEQSRPIPSAYGGQVISNGFKVCSSGGRGSVELYXRDNSMXWEASFSPPGPYWXHVLFXWKSKEGLKVYVNGXLSXSDPSGKVSRDYGESNVNLVIGSEQDQAKCYENGAFDEFIIWERALXPDEIAMYFXAAIGKHALLSSXLPSLFMXSXASPVMPXDAYHPIIXNLXEERKXFQSPGVILSYLQNVSLSLPSKSLSEQXALNLXKXFLKAVGEILLLPGWIALSEDSAVVLSLIDXIDXVMGHVSSNLHGSXPQVXVEGSSAMAEFSVAKILPKXVNSSHYRFPAHGQSFIQIPHEAFHRHAWSXVVGLLYHSMHYYLNNIWPAHXKIAEAMHHQDCLLFAXSHLISLEVSPPPXLSQNLSGSPLIXVHLKHRLXRKQHSEAXNSSNRVFVYCAFLDFSSGEGVWSNHGCALXRGNLXYSVCRCXHLXNFAILMQVVPLELARGHQVALSSISYVGCSLSVLCLVAXLVXFAVLSSVSXIRNQRYHIHANLSFAVLVAQVLLLISFRLEPGXXPCQVMAVLLHYFFLSAFAWMLVEGLHLYSMVIKVFGSEDSKHRYYYGMGWGFPLLICIISLSFAMDSYGXSNNCWLSLASGAIWAFVAPALFVIVVNIGILIAVXRVISQISADNYKIHGDPSAFKLXAKAVAVLLPILGXSWVFGVLAVNGCAVVFQYMFAXLNSLQGLFIFLFHCLLNSEVRAAFKHKXKVWSLXSSSARXSNAKPFHSDLMNGXRPGMASXKLSPWDKSSHSAHRVDLSAV

SEQ ID NO: 1630 - protein, 221 aa, Homo sapiens
  MOD_RES (60)..(61): Selenocysteine
  MOD_RES (82)..(82): Selenocysteine
  MOD_RES (108)..(108): Selenocysteine
  MOD_RES (113)..(113): Selenocysteine
  MOD_RES (127)..(127): Selenocysteine
  MOD_RES (130)..(130): Selenocysteine
  MOD_RES (176)..(176): Selenocysteine
  MOD_RES (185)..(185): Selenocysteine
  MOD_RES (197)..(197): Selenocysteine
  MOD_RES (204)..(204): Selenocysteine
  MOD_RES (206)..(206): Selenocysteine
  MOD_RES (213)..(213): Selenocysteine
  MOD_RES (221)..(221): Selenocysteine
MEKLLRLCCWYSWLLLFYYNFQVRGVYSRSQDHPGFQVLASASHYWPLENVDGIHELQDXXGDIVEGKVNKGIYLKEEKGVXLLYYGRYNSSCISKPEQCGPEGPYWXHVLFXWKSKEGLKVYVNGXLSXSDPSGKVSRDYGESNVNLVIGSEQDQAKCYENGAFDEFIIWERALXPDEIAMYFXAAIGKHALLSSXLPSLFMXSXASPVMPXDAYHPIIX

SEQ ID NO: 1631 - protein, 874 aa, Homo sapiens
  MOD_RES (60)..(61): Selenocysteine
  MOD_RES (82)..(82): Selenocysteine
  MOD_RES (106)..(106): Selenocysteine
  MOD_RES (113)..(113): Selenocysteine
  MOD_RES (149)..(149): Selenocysteine
  MOD_RES (155)..(155): Selenocysteine
  MOD_RES (168)..(168): Selenocysteine
  MOD_RES (173)..(173): Selenocysteine
  MOD_RES (187)..(187): Selenocysteine
  MOD_RES (190)..(190): Selenocysteine
  MOD_RES (236)..(236): Selenocysteine
  MOD_RES (245)..(245): Selenocysteine
  MOD_RES (257)..(257): Selenocysteine
  MOD_RES (264)..(264): Selenocysteine
  MOD_RES (266)..(266): Selenocysteine
  MOD_RES (273)..(273): Selenocysteine
  MOD_RES (281)..(281): Selenocysteine
  MOD_RES (284)..(284): Selenocysteine
  MOD_RES (289)..(289): Selenocysteine
  MOD_RES (316)..(316): Selenocysteine
  MOD_RES (321)..(321): Selenocysteine
  MOD_RES (323)..(323): Selenocysteine
  MOD_RES (353)..(353): Selenocysteine
  MOD_RES (356)..(356): Selenocysteine
  MOD_RES (369)..(369): Selenocysteine
  MOD_RES (373)..(373): Selenocysteine
  MOD_RES (392)..(392): Selenocysteine
  MOD_RES (422)..(422): Selenocysteine
  MOD_RES (443)..(443): Selenocysteine
  MOD_RES (459)..(459): Selenocysteine
  MOD_RES (472)..(472): Selenocysteine
  MOD_RES (484)..(484): Selenocysteine
  MOD_RES (492)..(492): Selenocysteine
  MOD_RES (500)..(500): Selenocysteine
  MOD_RES (530)..(530): Selenocysteine
  MOD_RES (535)..(535): Selenocysteine
  MOD_RES (542)..(542): Selenocysteine
  MOD_RES (545)..(545): Selenocysteine
  MOD_RES (584)..(584): Selenocysteine
  MOD_RES (587)..(587): Selenocysteine
  MOD_RES (596)..(596): Selenocysteine
  MOD_RES (629)..(630): Selenocysteine
  MOD_RES (700)..(700): Selenocysteine
  MOD_RES (735)..(735): Selenocysteine
  MOD_RES (758)..(758): Selenocysteine
  MOD_RES (771)..(771): Selenocysteine
  MOD_RES (793)..(793): Selenocysteine
  MOD_RES (821)..(821): Selenocysteine
  MOD_RES (827)..(827): Selenocysteine
  MOD_RES (833)..(833): Selenocysteine
  MOD_RES (847)..(847): Selenocysteine
  MOD_RES (854)..(854): Selenocysteine
MEKLLRLCCWYSWLLLFYYNFQVRGVYSRSQDHPGFQVLASASHYWPLENVDGIHELQDXXGDIVEGKVNKGIYLKEEKGVXLLYYGRYNSSCISKPEQCGPEGVXFSFFWKXQGEQSRPIPSAYGGQVISNGFKVCSSGGRGSVELYXRDNSMXWEASFSPPGPYWXHVLFXWKSKEGLKVYVNGXLSXSDPSGKVSRDYGESNVNLVIGSEQDQAKCYENGAFDEFIIWERALXPDEIAMYFXAAIGKHALLSSXLPSLFMXSXASPVMPXDAYHPIIXNLXEERKXFQSPGVILSYLQNVSLSLPSKSLSEQXALNLXKXFLKAVGEILLLPGWIALSEDSAVVLSLIDXIDXVMGHVSSNLHGSXPQVXVEGSSAMAEFSVAKILPKXVNSSHYRFPAHGQSFIQIPHEAFHRHAWSXVVGLLYHSMHYYLNNIWPAHXKIAEAMHHQDCLLFAXSHLISLEVSPPPXLSQNLSGSPLIXVHLKHRLXRKQHSEAXNSSNRVFVYCAFLDFSSGEGVWSNHGCALXRGNLXYSVCRCXHLXNFAILMQVVPLELARGHQVALSSISYVGCSLSVLCLVAXLVXFAVLSSVSXIRNQRYHIHANLSFAVLVAQVLLLISFRLEPGXXPCQVMAVLLHYFFLSAFAWMLVEGLHLYSMVIKVFGSEDSKHRYYYGMGWGFPLLICIISLSFAMDSYGXSNNCWLSLASGAIWAFVAPALFVIVVNIGILIAVXRVISQISADNYKIHGDPSAFKLXAKAVAVLLPILGXSWVFGVLAVNGCAVVFQYMFAXLNSLQGLFIFLFHCLLNSEVRAAFKHKXKVWSLXSSSARXSNAKPFHSDLMNGXRPGMASXKLSPWDKSSHSAHRVDLSAV

SEQ ID NO: 1632 - protein, 393 aa, Homo sapiens
  MOD_RES (11)..(11): Selenocysteine
  MOD_RES (19)..(19): Selenocysteine
  MOD_RES (49)..(49): Selenocysteine
  MOD_RES (54)..(54): Selenocysteine
  MOD_RES (61)..(61): Selenocysteine
  MOD_RES (64)..(64): Selenocysteine
  MOD_RES (103)..(103): Selenocysteine
  MOD_RES (106)..(106): Selenocysteine
  MOD_RES (115)..(115): Selenocysteine
  MOD_RES (148)..(149): Selenocysteine
  MOD_RES (219)..(219): Selenocysteine
  MOD_RES (254)..(254): Selenocysteine
  MOD_RES (277)..(277): Selenocysteine
  MOD_RES (290)..(290): Selenocysteine
  MOD_RES (312)..(312): Selenocysteine
  MOD_RES (340)..(340): Selenocysteine
  MOD_RES (346)..(346): Selenocysteine
  MOD_RES (352)..(352): Selenocysteine
  MOD_RES (366)..(366): Selenocysteine
  MOD_RES (373)..(373): Selenocysteine
MHRVCFLSFQXRKQHSEAXNSSNRVFVYCAFLDFSSGEGVWSNHGCALXRGNLXYSVCRCXHLXNFAILMQVVPLELARGHQVALSSISYVGCSLSVLCLVAXLVXFAVLSSVSXIRNQRYHIHANLSFAVLVAQVLLLISFRLEPGXXPCQVMAVLLHYFFLSAFAWMLVEGLHLYSMVIKVFGSEDSKHRYYYGMGWGFPLLICIISLSFAMDSYGXSNNCWLSLASGAIWAFVAPALFVIVVNIGILIAVXRVISQISADNYKIHGDPSAFKLXAKAVAVLLPILGXSWVFGVLAVNGCAVVFQYMFAXLNSLQGLFIFLFHCLLNSEVRAAFKHKXKVWSLXSSSARXSNAKPFHSDLMNGXRPGMASXKLSPWDKSSHSAHRVDLSAV

SEQ ID NO: 1633 - protein, 345 aa, Homo sapiens
  MOD_RES (34)..(34): Selenocysteine
  MOD_RES (37)..(37): Selenocysteine
  MOD_RES (46)..(46): Selenocysteine
  MOD_RES (79)..(80): Selenocysteine
  MOD_RES (150)..(150): Selenocysteine
  MOD_RES (185)..(185): Selenocysteine
  MOD_RES (208)..(208): Selenocysteine
  MOD_RES (221)..(221): Selenocysteine
  MOD_RES (243)..(243): Selenocysteine
  MOD_RES (287)..(287): Selenocysteine
  MOD_RES (296)..(296): Selenocysteine
MQVVPLELARGHQVALSSISYVGCSLSVLCLVAXLVXFAVLSSVSXIRNQRYHIHANLSFAVLVAQVLLLISFRLEPGXXPCQVMAVLLHYFFLSAFAWMLVEGLHLYSMVIKVFGSEDSKHRYYYGMGWGFPLLICIISLSFAMDSYGXSNNCWLSLASGAIWAFVAPALFVIVVNIGILIAVXRVISQISADNYKIHGDPSAFKLXAKAVAVLLPILGXSWVFGVLAVNGCAVVFQYMFAXLNSLQGLFIFLFHCLLNSEARWAKEGRAESLSRMVAGQKGCMIXKPSDPLIAXPSDPLQGLRWIPVAGRQCSHGSPPAHPPACPPRICLFASLSHSPRDIHC

SEQ ID NO: 1634 - protein, 156 aa, Homo sapiens
  MOD_RES (17)..(17): Selenocysteine
  MOD_RES (40)..(40): Selenocysteine
  MOD_RES (53)..(53): Selenocysteine
  MOD_RES (75)..(75): Selenocysteine
  MOD_RES (103)..(103): Selenocysteine
  MOD_RES (109)..(109): Selenocysteine
  MOD_RES (115)..(115): Selenocysteine
  MOD_RES (129)..(129): Selenocysteine
  MOD_RES (136)..(136): Selenocysteine
MQVVPLEVNIGILIAVXRVISQISADNYKIHGDPSAFKLXAKAVAVLLPILGXSWVFGVLAVNGCAVVFQYMFAXLNSLQGLFIFLFHCLLNSEVRAAFKHKXKVWSLXSSSARXSNAKPFHSDLMNGXRPGMASXKLSPWDKSSHSAHRVDLSAV

SEQ ID NO: 1635 - protein, 41 aa, Homo sapiens
  MOD_RES (36)..(36): Selenocysteine
FLVAFSWMLVEGLLLWRKVVAVSMHPGPGMRLYHAXGWGPR

SEQ ID NO: 1636 - protein, 972 aa, Homo sapiens
  MOD_RES (1)..(1): Any amino acid
  MOD_RES (11)..(11): Selenocysteine
  MOD_RES (18)..(18): Selenocysteine
  MOD_RES (34)..(34): Selenocysteine
  MOD_RES (98)..(99): Selenocysteine
  MOD_RES (108)..(108): Selenocysteine
  MOD_RES (126)..(126): Selenocysteine
  MOD_RES (129)..(129): Selenocysteine
  MOD_RES (196)..(196): Selenocysteine
  MOD_RES (255)..(255): Selenocysteine
  MOD_RES (294)..(294): Selenocysteine
  MOD_RES (300)..(300): Selenocysteine
  MOD_RES (316)..(316): Selenocysteine
  MOD_RES (341)..(341): Selenocysteine
  MOD_RES (434)..(434): Selenocysteine
  MOD_RES (459)..(459): Selenocysteine
  MOD_RES (486)..(486): Selenocysteine
  MOD_RES (489)..(489): Selenocysteine
  MOD_RES (516)..(516): Selenocysteine
  MOD_RES (522)..(522): Selenocysteine
  MOD_RES (553)..(553): Selenocysteine
  MOD_RES (560)..(560): Selenocysteine
  MOD_RES (567)..(567): Selenocysteine
  MOD_RES (593)..(593): Selenocysteine
  MOD_RES (608)..(608): Selenocysteine
  MOD_RES (616)..(616): Selenocysteine
  MOD_RES (637)..(637): Selenocysteine
  MOD_RES (643)..(644): Selenocysteine
  MOD_RES (656)..(656): Selenocysteine
  MOD_RES (664)..(664): Selenocysteine
  MOD_RES (687)..(687): Selenocysteine
  MOD_RES (701)..(703): Selenocysteine
  MOD_RES (718)..(719): Selenocysteine
  MOD_RES (725)..(725): Selenocysteine
  MOD_RES (737)..(737): Selenocysteine
  MOD_RES (752)..(752): Selenocysteine
  MOD_RES (794)..(794): Selenocysteine
  MOD_RES (806)..(806): Selenocysteine
  MOD_RES (826)..(826): Selenocysteine
  MOD_RES (841)..(841): Selenocysteine
  MOD_RES (844)..(844): Selenocysteine
  MOD_RES (854)..(854): Selenocysteine
  MOD_RES (877)..(877): Selenocysteine
  MOD_RES (882)..(882): Selenocysteine
  MOD_RES (896)..(896): Selenocysteine
  MOD_RES (965)..(965): Selenocysteine
XSGVSLGPPPXPQVNQGXLGPQVAPVAAGEVVKXAGGVCKFSGQRLSWWQAQESCEQQFGHLALQPPDGVLASRLRDPVWVGQREAPLRRPPQRRARXXAVLVFDERXADRAARLRSPLPELAALXACXHVQWDCASPDPAALFSVAAPALPNALQLRAFAEPGGVVRAALVVRGQHAPFLAAFRADGRWHHVCAXWEQRGGRWALFSDGRRRAGARGLGAGHPVPSGGILVLGQDQDSLGGGFSVRHALSGNLXDFHLWARALSPAQLHRARACAPPSEGLLFRWDPGALDVXPSLLPXVWVRLLCPVPSEECPXWNPGPRSEGSELCLEPQPFLCCYRXEPYRRLQDAQSWPGQDVISRVNALANDIVLLPDPLSEVHGALSPAEASSFLGLLEHVLAMEMAPLGPAALLAVVRFLKRVVALGAGDPELLLXGPWEQLSQGVVSVASLVLEEQVADXWLSLREVIGGPMALVASVQRLAPLLSXSMXSERPRMRIQHRHAGLEVRSLRLREASXRGCLFXMPGGRPEGPGHIHIPASEVRRLLRKGLSGVXVIHSWFXSRVFQHXLEGPDLEPQAPASSEEANRVQRFLSXQVGSAIISSEVWDVXGEVNVAMXFHLQHRAQSPLFPPHPPSPYXGGAWAXXGCSVAALYLDSXACFCNHSXSFAILLQIYEVQRGPEEESLLRXLSFVGCGVSFCALXXXFLLFLVAGVPKSERXXVHKNLXFSLASAEGFLMXSEWAKANEVACVAVXVAMHFLFLVAFSWMLVEGLLLWRKVVAVSMHPGPGMRLYHAXGWGVPVGIVAVXLAMLPHDYVAPGHCWLNVHXNAIWAFVGPVLFVLXANXCILARVVMIXVSSARRRARMLSPQPCLQQQIWXQIWAXVKPVLVLLPVLGLXWLAGILVHLSPAWAYAAVGLNSIQGLYIFLVYAACNEEVRSALQRMAEKKVAEGPMALELPQHSPPLQXRRDRLWN

SEQ ID NO: 1637 - protein, 319 aa, Homo sapiens
  MOD_RES (5)..(5): Selenocysteine
  MOD_RES (12)..(12): Selenocysteine
  MOD_RES (14)..(14): Selenocysteine
  MOD_RES (16)..(16): Selenocysteine
  MOD_RES (82)..(82): Selenocysteine
  MOD_RES (97)..(97): Selenocysteine
  MOD_RES (104)..(104): Selenocysteine
  MOD_RES (135)..(135): Selenocysteine
  MOD_RES (153)..(153): Selenocysteine
  MOD_RES (157)..(157): Selenocysteine
  MOD_RES (192)..(192): Selenocysteine
  MOD_RES (200)..(200): Selenocysteine
  MOD_RES (202)..(202): Selenocysteine
  MOD_RES (204)..(204): Selenocysteine
  MOD_RES (211)..(211): Selenocysteine
  MOD_RES (226)..(226): Selenocysteine
  MOD_RES (257)..(257): Selenocysteine
  MOD_RES (285)..(286): Selenocysteine
  MOD_RES (293)..(294): Selenocysteine
  MOD_RES (306)..(306): Selenocysteine
  MOD_RES (308)..(308): Selenocysteine
  MOD_RES (311)..(311): Selenocysteine
  MOD_RES (315)..(315): Selenocysteine
CRDSXLCPAYAXCXNXVDSYYCACKQGFLSSNGQNHFKDPGVRCKDIDECSQSPQPCGPNSSCKNLSGRYKCSCLDGFSSPXGNDWVPGKPGNFSCXDINECLXSSVCPEHSDCVNSMGSYSCSCQVGFISRNSXCEDVDECADPRACPEHAXCNNXVGNYSCFCNPGFESSSGHLSFQGLKASCEDIDECXEMCPINSXCXNXPGSYFCXCHPGFAPSNGQLNFXDQGVECRGVLFKCKEDVIPDNKQIQQCQEGXAVKPAYVSFCAQINNIFSVLDKVCENKXXVVSLKNXXESFVPVLKQISXWXKFXKEEXSSLA

SEQ ID NO: 1638 - protein, 709 aa, Homo sapiens
  MOD_RES (25)..(25): Selenocysteine
  MOD_RES (30)..(30): Selenocysteine
  MOD_RES (39)..(39): Selenocysteine
  MOD_RES (46)..(46): Selenocysteine
  MOD_RES (48)..(48): Selenocysteine
  MOD_RES (50)..(50): Selenocysteine
  MOD_RES (116)..(116): Selenocysteine
  MOD_RES (131)..(131): Selenocysteine
  MOD_RES (138)..(138): Selenocysteine
  MOD_RES (163)..(163): Selenocysteine
  MOD_RES (191)..(192): Selenocysteine
  MOD_RES (199)..(200): Selenocysteine
  MOD_RES (212)..(212): Selenocysteine
  MOD_RES (214)..(214): Selenocysteine
  MOD_RES (217)..(217): Selenocysteine
  MOD_RES (221)..(221): Selenocysteine
  MOD_RES (226)..(226): Selenocysteine
  MOD_RES (236)..(236): Selenocysteine
  MOD_RES (248)..(248): Selenocysteine
  MOD_RES (253)..(253): Selenocysteine
  MOD_RES (273)..(273): Selenocysteine
  MOD_RES (289)..(289): Selenocysteine
  MOD_RES (296)..(296): Selenocysteine
  MOD_RES (298)..(299): Selenocysteine
  MOD_RES (326)..(327): Selenocysteine
  MOD_RES (344)..(344): Selenocysteine
  MOD_RES (358)..(358): Selenocysteine
  MOD_RES (378)..(378): Selenocysteine
  MOD_RES (386)..(386): Selenocysteine
  MOD_RES (398)..(398): Selenocysteine
  MOD_RES (400)..(400): Selenocysteine
  MOD_RES (420)..(420): Selenocysteine
  MOD_RES (446)..(446): Selenocysteine
  MOD_RES (458)..(458): Selenocysteine
  MOD_RES (473)..(473): Selenocysteine
  MOD_RES (482)..(482): Selenocysteine
  MOD_RES (569)..(569): Selenocysteine
  MOD_RES (571)..(571): Selenocysteine
  MOD_RES (583)..(583): Selenocysteine
  MOD_RES (593)..(593): Selenocysteine
  MOD_RES (595)..(595): Selenocysteine
  MOD_RES (612)..(612): Selenocysteine
  MOD_RES (616)..(616): Selenocysteine
  MOD_RES (620)..(620): Selenocysteine
  MOD_RES (653)..(653): Selenocysteine
  MOD_RES (683)..(683): Selenocysteine
  MOD_RES (686)..(686): Selenocysteine
  MOD_RES (694)..(694): Selenocysteine
  MOD_RES (708)..(708): Selenocysteine
MRGFNLLLFWGCCVMHSWEGHIRPXRKPNXKGNNCRDSXLCPAYAXCXNXVDSYYCACKQGFLSSNGQNHFKDPGVRCKDIDECSQSPQPCGPNSSCKNLSGRYKCSCLDGFSSPXGNDWVPGKPGNFSCXDINECLXSRVLFKCKEDVIPDNKQIQQCQEGXAVKPAYVSFCAQINNIFSVLDKVCENKXXVVSLKNXXESFVPVLKQISXWXKFXKEEXSSLAXVFLESVESMXLASFWKPSANIXPAVRXEYLDIESKVINKECSEENVXLDLVAKGDKMKIGCSXIEESESXEXXGVAFVSFVGMESVLNERFFKDHQAPLXXSEIKLKMNSRVVGGIMXGEKKDGFSDPIIYXLENIQPKQKFERPICVSWSXDVKGGRWXSFGCVILEASEXYXICSCNQMANLAVIMASGELXMDFSLYIISHVGIIISLVCLVLAIAXFLLCRSIRNHNXYLHLHLCVCLLLAKXLFLAGIHKXDNKMGCAIIAGFLHYLFLACFFWMLVEAVILFLMVRNLKVVNYFSSRNIKMLHICAFGYGLPMLVVVISASVQPQGYGMHNRCWLNXEXGFIWSFLGPVCXVIVINSLLLXWXLWILRQRLSSVNAEVSXLKDXRLLXFKAFAQLFILGCSWVLGIFQIGPVAGVMAYLFXIINSLQGAFIFLIHCLLNGQVREEYKRWIXGKXKPSSQSQXSRILLSSMPSASKXG

SEQ ID NO: 1639 - protein, 821 aa, Homo sapiens
  MOD_RES (25)..(25): Selenocysteine
  MOD_RES (30)..(30): Selenocysteine
  MOD_RES (39)..(39): Selenocysteine
  MOD_RES (46)..(46): Selenocysteine
  MOD_RES (48)..(48): Selenocysteine
  MOD_RES (50)..(50): Selenocysteine
  MOD_RES (116)..(116): Selenocysteine
  MOD_RES (131)..(131): Selenocysteine
  MOD_RES (138)..(138): Selenocysteine
  MOD_RES (169)..(169): Selenocysteine
  MOD_RES (187)..(187): Selenocysteine
  MOD_RES (191)..(191): Selenocysteine
  MOD_RES (226)..(226): Selenocysteine
  MOD_RES (234)..(234): Selenocysteine
  MOD_RES (236)..(236): Selenocysteine
  MOD_RES (238)..(238): Selenocysteine
  MOD_RES (245)..(245): Selenocysteine
  MOD_RES (260)..(260): Selenocysteine
  MOD_RES (278)..(278): Selenocysteine
  MOD_RES (286)..(286): Selenocysteine
  MOD_RES (340)..(340): Selenocysteine
  MOD_RES (368)..(369): Selenocysteine
  MOD_RES (376)..(377): Selenocysteine
  MOD_RES (389)..(389): Selenocysteine
  MOD_RES (391)..(391): Selenocysteine
  MOD_RES (394)..(394): Selenocysteine
  MOD_RES (398)..(398): Selenocysteine
  MOD_RES (403)..(403): Selenocysteine
  MOD_RES (413)..(413): Selenocysteine
  MOD_RES (425)..(425): Selenocysteine
  MOD_RES (430)..(430): Selenocysteine
  MOD_RES (450)..(450): Selenocysteine
  MOD_RES (466)..(466): Selenocysteine
  MOD_RES (473)..(473): Selenocysteine
  MOD_RES (475)..(476): Selenocysteine
  MOD_RES (503)..(504): Selenocysteine
  MOD_RES (521)..(521): Selenocysteine
  MOD_RES (535)..(535): Selenocysteine
  MOD_RES (555)..(555): Selenocysteine
  MOD_RES (563)..(563): Selenocysteine
  MOD_RES (575)..(575): Selenocysteine
  MOD_RES (577)..(577): Selenocysteine
  MOD_RES (597)..(597): Selenocysteine
  MOD_RES (681)..(681): Selenocysteine
  MOD_RES (683)..(683): Selenocysteine
  MOD_RES (695)..(695): Selenocysteine
  MOD_RES (705)..(705): Selenocysteine
  MOD_RES (707)..(707): Selenocysteine
  MOD_RES (724)..(724): Selenocysteine
  MOD_RES (728)..(728): Selenocysteine
  MOD_RES (732)..(732): Selenocysteine
  MOD_RES (765)..(765): Selenocysteine
  MOD_RES (795)..(795): Selenocysteine
  MOD_RES (798)..(798): Selenocysteine
  MOD_RES (806)..(806): Selenocysteine
  MOD_RES (820)..(820): Selenocysteine
MRGFNLLLFWGCCVMHSWEGHIRPXRKPNXKGNNCRDSXLCPAYAXCXNXVDSYYCACKQGFLSSNGQNHFKDPGVRCKDIDECSQSPQPCGPNSSCKNLSGRYKCSCLDGFSSPXGNDWVPGKPGNFSCXDINECLXSSVCPEHSDCVNSMGSYSCSCQVGFISRNSXCEDVDECADPRACPEHAXCNNXVGNYSCFCNPGFESSSGHLSFQGLKASCEDIDECXEMCPINSXCXNXPGSYFCXCHPGFAPSNGQLNFXDQGVECRDIDECRQDPSXCGPNSICXNALGSYSCGCIAGFHPNPEGSQKDGNFSCQRVLFKCKEDVIPDNKQIQQCQEGXAVKPAYVSFCAQINNIFSVLDKVCENKXXVVSLKNXXESFVPVLKQISXWXKFXKEEXSSLAXVFLESVESMXLASFWKPSANIXPAVRXEYLDIESKVINKECSEENVXLDLVAKGDKMKIGCSXIEESESXEXXGVAFVSFVGMESVLNERFFKDHQAPLXXSEIKLKMNSRVVGGIMXGEKKDGFSDPIIYXLENIQPKQKFERPICVSWSXDVKGGRWXSFGCVILEASEXYXICSCNQMANLAVIMASGELXMGCAIIAGFLHYLFLACFFWMLVEAVILFLMVRNLKVVNYFSSRNIKMLHICAFGYGLPMLVVVISASVQPQGYGMHNRCWLNXEXGFIWSFLGPVCXVIVINSLLLXWXLWILRQRLSSVNAEVSXLKDXRLLXFKAFAQLFILGCSWVLGIFQIGPVAGVMAYLFXIINSLQGAFIFLIHCLLNGQVREEYKRWIXGKXKPSSQSQXSRILLSSMPSASKXG

SEQ ID NO: 1640 - protein, 886 aa, Homo sapiens
  MOD_RES (25)..(25): Selenocysteine
  MOD_RES (30)..(30): Selenocysteine
  MOD_RES (39)..(39): Selenocysteine
  MOD_RES (46)..(46): Selenocysteine
  MOD_RES (48)..(48): Selenocysteine
  MOD_RES (50)..(50): Selenocysteine
  MOD_RES (116)..(116): Selenocysteine
  MOD_RES (131)..(131): Selenocysteine
  MOD_RES (138)..(138): Selenocysteine
  MOD_RES (169)..(169): Selenocysteine
  MOD_RES (187)..(187): Selenocysteine
  MOD_RES (191)..(191): Selenocysteine
  MOD_RES (226)..(226): Selenocysteine
  MOD_RES (234)..(234): Selenocysteine
  MOD_RES (236)..(236): Selenocysteine
  MOD_RES (238)..(238): Selenocysteine
  MOD_RES (245)..(245): Selenocysteine
  MOD_RES (260)..(260): Selenocysteine
  MOD_RES (278)..(278): Selenocysteine
  MOD_RES (286)..(286): Selenocysteine
  MOD_RES (340)..(340): Selenocysteine
  MOD_RES (368)..(369): Selenocysteine
  MOD_RES (376)..(377): Selenocysteine
  MOD_RES (389)..(389): Selenocysteine
  MOD_RES (391)..(391): Selenocysteine
  MOD_RES (394)..(394): Selenocysteine
  MOD_RES (398)..(398): Selenocysteine
  MOD_RES (403)..(403): Selenocysteine
  MOD_RES (413)..(413): Selenocysteine
  MOD_RES (425)..(425): Selenocysteine
  MOD_RES (430)..(430): Selenocysteine
  MOD_RES (450)..(450): Selenocysteine
  MOD_RES (466)..(466): Selenocysteine
  MOD_RES (473)..(473): Selenocysteine
  MOD_RES (475)..(476): Selenocysteine
  MOD_RES (503)..(504): Selenocysteine
  MOD_RES (521)..(521): Selenocysteine
  MOD_RES (535)..(535): Selenocysteine
  MOD_RES (555)..(555): Selenocysteine
  MOD_RES (563)..(563): Selenocysteine
  MOD_RES (575)..(575): Selenocysteine
  MOD_RES (577)..(577): Selenocysteine
  MOD_RES (597)..(597): Selenocysteine
  MOD_RES (623)..(623): Selenocysteine
  MOD_RES (635)..(635): Selenocysteine
  MOD_RES (650)..(650): Selenocysteine
  MOD_RES (659)..(659): Selenocysteine
  MOD_RES (746)..(746): Selenocysteine
  MOD_RES (748)..(748): Selenocysteine
  MOD_RES (760)..(760): Selenocysteine
  MOD_RES (770)..(770): Selenocysteine
  MOD_RES (772)..(772): Selenocysteine
  MOD_RES (789)..(789): Selenocysteine
  MOD_RES (793)..(793): Selenocysteine
  MOD_RES (797)..(797): Selenocysteine
  MOD_RES (830)..(830): Selenocysteine
  MOD_RES (860)..(860): Selenocysteine
  MOD_RES (863)..(863): Selenocysteine
  MOD_RES (871)..(871): Selenocysteine
  MOD_RES (885)..(885): Selenocysteine
MRGFNLLLFWGCCVMHSWEGHIRPXRKPNXKGNNCRDSXLCPAYAXCXNXVDSYYCACKQGFLSSNGQNHFKDPGVRCKDIDECSQSPQPCGPNSSCKNLSGRYKCSCLDGFSSPXGNDWVPGKPGNFSCXDINECLXSSVCPEHSDCVNSMGSYSCSCQVGFISRNSXCEDVDECADPRACPEHAXCNNXVGNYSCFCNPGFESSSGHLSFQGLKASCEDIDECXEMCPINSXCXNXPGSYFCXCHPGFAPSNGQLNFXDQGVECRDIDECRQDPSXCGPNSICXNALGSYSCGCIAGFHPNPEGSQKDGNFSCQRVLFKCKEDVIPDNKQIQQCQEGXAVKPAYVSFCAQINNIFSVLDKVCENKXXVVSLKNXXESFVPVLKQISXWXKFXKEEXSSLAXVFLESVESMXLASFWKPSANIXPAVRXEYLDIESKVINKECSEENVXLDLVAKGDKMKIGCSXIEESESXEXXGVAFVSFVGMESVLNERFFKDHQAPLXXSEIKLKMNSRVVGGIMXGEKKDGFSDPIIYXLENIQPKQKFERPICVSWSXDVKGGRWXSFGCVILEASEXYXICSCNQMANLAVIMASGELXMDFSLYIISHVGIIISLVCLVLAIAXFLLCRSIRNHNXYLHLHLCVCLLLAKXLFLAGIHKXDNKMGCAIIAGFLHYLFLACFFWMLVEAVILFLMVRNLKVVNYFSSRNIKMLHICAFGYGLPMLVVVISASVQPQGYGMHNRCWLNXEXGFIWSFLGPVCXVIVINSLLLXWXLWILRQRLSSVNAEVSXLKDXRLLXFKAFAQLFILGCSWVLGIFQIGPVAGVMAYLFXIINSLQGAFIFLIHCLLNGQVREEYKRWIXGKXKPSSQSQXSRILLSSMPSASKXG

SEQ ID NO: 1641 - protein, 745 aa, Homo sapiens
  MOD_RES (25)..(25): Selenocysteine
  MOD_RES (30)..(30): Selenocysteine
  MOD_RES (39)..(39): Selenocysteine
  MOD_RES (46)..(46): Selenocysteine
  MOD_RES (48)..(48): Selenocysteine
  MOD_RES (50)..(50): Selenocysteine
  MOD_RES (85)..(85): Selenocysteine
  MOD_RES (93)..(93): Selenocysteine
  MOD_RES (95)..(95): Selenocysteine
  MOD_RES (97)..(97): Selenocysteine
  MOD_RES (104)..(104): Selenocysteine
  MOD_RES (119)..(119): Selenocysteine
  MOD_RES (137)..(137): Selenocysteine
  MOD_RES (145)..(145): Selenocysteine
  MOD_RES (199)..(199): Selenocysteine
  MOD_RES (227)..(228): Selenocysteine
  MOD_RES (235)..(236): Selenocysteine
  MOD_RES (248)..(248): Selenocysteine
  MOD_RES (250)..(250): Selenocysteine
  MOD_RES (253)..(253): Selenocysteine
  MOD_RES (257)..(257): Selenocysteine
  MOD_RES (262)..(262): Selenocysteine
  MOD_RES (272)..(272): Selenocysteine
  MOD_RES (284)..(284): Selenocysteine
  MOD_RES (289)..(289): Selenocysteine
  MOD_RES (309)..(309): Selenocysteine
  MOD_RES (325)..(325): Selenocysteine
  MOD_RES (332)..(332): Selenocysteine
  MOD_RES (334)..(335): Selenocysteine
  MOD_RES (362)..(363): Selenocysteine
  MOD_RES (380)..(380): Selenocysteine
  MOD_RES (394)..(394): Selenocysteine
  MOD_RES (414)..(414): Selenocysteine
  MOD_RES (422)..(422): Selenocysteine
  MOD_RES (434)..(434): Selenocysteine
  MOD_RES (436)..(436): Selenocysteine
  MOD_RES (456)..(456): Selenocysteine
  MOD_RES (482)..(482): Selenocysteine
  MOD_RES (494)..(494): Selenocysteine
  MOD_RES (509)..(509): Selenocysteine
  MOD_RES (518)..(518): Selenocysteine
  MOD_RES (605)..(605): Selenocysteine
  MOD_RES (607)..(607): Selenocysteine
  MOD_RES (619)..(619): Selenocysteine
  MOD_RES (629)..(629): Selenocysteine
  MOD_RES (631)..(631): Selenocysteine
  MOD_RES (648)..(648): Selenocysteine
  MOD_RES (652)..(652): Selenocysteine
  MOD_RES (656)..(656): Selenocysteine
  MOD_RES (689)..(689): Selenocysteine
  MOD_RES (719)..(719): Selenocysteine
  MOD_RES (722)..(722): Selenocysteine
  MOD_RES (730)..(730): Selenocysteine
  MOD_RES (744)..(744): Selenocysteine
MRGFNLLLFWGCCVMHSWEGHIRPXRKPNXKGNNCRDSXLCPAYAXCXNXVDSYYCACKQGFLSSNGQNHFKDPGVRCKDIDECXEMCPINSXCXNXPGSYFCXCHPGFAPSNGQLNFXDQGVECRDIDECRQDPSXCGPNSICXNALGSYSCGCIAGFHPNPEGSQKDGNFSCQRVLFKCKEDVIPDNKQIQQCQEGXAVKPAYVSFCAQINNIFSVLDKVCENKXXVVSLKNXXESFVPVLKQISXWXKFXKEEXSSLAXVFLESVESMXLASFWKPSANIXPAVRXEYLDIESKVINKECSEENVXLDLVAKGDKMKIGCSXIEESESXEXXGVAFVSFVGMESVLNERFFKDHQAPLXXSEIKLKMNSRVVGGIMXGEKKDGFSDPIIYXLENIQPKQKFERPICVSWSXDVKGGRWXSFGCVILEASEXYXICSCNQMANLAVIMASGELXMDFSLYIISHVGIIISLVCLVLAIAXFLLCRSIRNHNXYLHLHLCVCLLLAKXLFLAGIHKXDNKMGCAIIAGFLHYLFLACFFWMLVEAVILFLMVRNLKVVNYFSSRNIKMLHICAFGYGLPMLVVVISASVQPQGYGMHNRCWLNXEXGFIWSFLGPVCXVIVINSLLLXWXLWILRQRLSSVNAEVSXLKDXRLLXFKAFAQLFILGCSWVLGIFQIGPVAGVMAYLFXIINSLQGAFIFLIHCLLNGQVREEYKRWIXGKXKPSSQSQXSRILLSSMPSASKXG

SEQ ID NO: 1642 - protein, 867 aa, Homo sapiens
  MOD_RES (25)..(25): Selenocysteine
  MOD_RES (30)..(30): Selenocysteine
  MOD_RES (39)..(39): Selenocysteine
  MOD_RES (46)..(46): Selenocysteine
  MOD_RES (48)..(48): Selenocysteine
  MOD_RES (50)..(50): Selenocysteine
  MOD_RES (86)..(86): Selenocysteine
  MOD_RES (117)..(117): Selenocysteine
  MOD_RES (135)..(135): Selenocysteine
  MOD_RES (139)..(139): Selenocysteine
  MOD_RES (174)..(174): Selenocysteine
  MOD_RES (182)..(182): Selenocysteine
  MOD_RES (184)..(184): Selenocysteine
  MOD_RES (186)..(186): Selenocysteine
  MOD_RES (193)..(193): Selenocysteine
  MOD_RES (208)..(208): Selenocysteine
  MOD_RES (226)..(226): Selenocysteine
  MOD_RES (234)..(234): Selenocysteine
  MOD_RES (288)..(288): Selenocysteine
  MOD_RES (316)..(317): Selenocysteine
  MOD_RES (324)..(325): Selenocysteine
  MOD_RES (337)..(337): Selenocysteine
  MOD_RES (339)..(339): Selenocysteine
  MOD_RES (342)..(342): Selenocysteine
  MOD_RES (346)..(346): Selenocysteine
  MOD_RES (351)..(351): Selenocysteine
  MOD_RES (361)..(361): Selenocysteine
  MOD_RES (373)..(373): Selenocysteine
  MOD_RES (378)..(378): Selenocysteine
  MOD_RES (398)..(398): Selenocysteine
  MOD_RES (414)..(414): Selenocysteine
  MOD_RES (421)..(421): Selenocysteine
  MOD_RES (423)..(424): Selenocysteine
  MOD_RES (451)..(452): Selenocysteine
  MOD_RES (469)..(469): Selenocysteine
  MOD_RES (483)..(483): Selenocysteine
  MOD_RES (503)..(503): Selenocysteine
  MOD_RES (511)..(511): Selenocysteine
  MOD_RES (523)..(523): Selenocysteine
  MOD_RES (525)..(525): Selenocysteine
  MOD_RES (545)..(545): Selenocysteine
  MOD_RES (571)..(571): Selenocysteine
  MOD_RES (583)..(583): Selenocysteine
  MOD_RES (598)..(598): Selenocysteine
  MOD_RES (607)..(607): Selenocysteine
  MOD_RES (694)..(694): Selenocysteine
  MOD_RES (696)..(696): Selenocysteine
  MOD_RES (708)..(708): Selenocysteine
  MOD_RES (739)..(739): Selenocysteine
  MOD_RES (751)..(751): Selenocysteine
  MOD_RES (753)..(753): Selenocysteine
  MOD_RES (770)..(770): Selenocysteine
  MOD_RES (774)..(774): Selenocysteine
  MOD_RES (778)..(778): Selenocysteine
  MOD_RES (811)..(811): Selenocysteine
  MOD_RES (841)..(841): Selenocysteine
  MOD_RES (844)..(844): Selenocysteine
  MOD_RES (852)..(852): Selenocysteine
  MOD_RES (866)..(866): Selenocysteine
MRGFNLLLFWGCCVMHSWEGHIRPXRKPNXKGNNCRDSXLCPAYAXCXNXVDSYYCACKQGFLSSNGQNHFKDPGVRCKDINECLXSSVCPEHSDCVNSMGSYSCSCQVGFISRNSXCEDVDECADPRACPEHAXCNNXVGNYSCFCNPGFESSSGHLSFQGLKASCEDIDECXEMCPINSXCXNXPGSYFCXCHPGFAPSNGQLNFXDQGVECRDIDECRQDPSXCGPNSICXNALGSYSCGCIAGFHPNPEGSQKDGNFSCQRVLFKCKEDVIPDNKQIQQCQEGXAVKPAYVSFCAQINNIFSVLDKVCENKXXVVSLKNXXESFVPVLKQISXWXKFXKEEXSSLAXVFLESVESMXLASFWKPSANIXPAVRXEYLDIESKVINKECSEENVXLDLVAKGDKMKIGCSXIEESESXEXXGVAFVSFVGMESVLNERFFKDHQAPLXXSEIKLKMNSRVVGGIMXGEKKDGFSDPIIYXLENIQPKQKFERPICVSWSXDVKGGRWXSFGCVILEASEXYXICSCNQMANLAVIMASGELXMDFSLYIISHVGIIISLVCLVLAIAXFLLCRSIRNHNXYLHLHLCVCLLLAKXLFLAGIHKXDNKMGCAIIAGFLHYLFLACFFWMLVEAVILFLMVRNLKVVNYFSSRNIKMLHICAFGYGLPMLVVVISASVQPQGYGMHNRCWLNXEXGFIWSFLGPVCXVIVVSKYYNSLAKCVLKEEQGDLRDLEFPGXCAAERINSLLLXWXLWILRQRLSSVNAEVSXLKDXRLLXFKAFAQLFILGCSWVLGIFQIGPVAGVMAYLFXIINSLQGAFIFLIHCLLNGQVREEYKRWIXGKXKPSSQSQXSRILLSSMPSASKXG

SEQ ID NO: 1643 - protein, 681 aa, Homo sapiens
  MOD_RES (17)..(17): Selenocysteine
  MOD_RES (23)..(23): Selenocysteine
  MOD_RES (43)..(43): Selenocysteine
  MOD_RES (59)..(60): Selenocysteine
  MOD_RES (64)..(64): Selenocysteine
  MOD_RES (73)..(73): Selenocysteine
  MOD_RES (88)..(88): Selenocysteine
  MOD_RES (108)..(108): Selenocysteine
  MOD_RES (116)..(116): Selenocysteine
  MOD_RES (121)..(121): Selenocysteine
  MOD_RES (124)..(124): Selenocysteine
  MOD_RES (126)..(126): Selenocysteine
  MOD_RES (135)..(135): Selenocysteine
  MOD_RES (158)..(158): Selenocysteine
  MOD_RES (178)..(178): Selenocysteine
  MOD_RES (219)..(219): Selenocysteine
  MOD_RES (234)..(234): Selenocysteine
  MOD_RES (290)..(290): Selenocysteine
  MOD_RES (316)..(316): Selenocysteine
  MOD_RES (324)..(324): Selenocysteine
  MOD_RES (326)..(326): Selenocysteine
  MOD_RES (355)..(356): Selenocysteine
  MOD_RES (360)..(360): Selenocysteine
  MOD_RES (363)..(363): Selenocysteine
  MOD_RES (366)..(366): Selenocysteine
  MOD_RES (368)..(368): Selenocysteine
  MOD_RES (373)..(373): Selenocysteine
  MOD_RES (395)..(395): Selenocysteine
  MOD_RES (398)..(398): Selenocysteine
  MOD_RES (415)..(415): Selenocysteine
  MOD_RES (425)..(425): Selenocysteine
  MOD_RES (427)..(427): Selenocysteine
  MOD_RES (451)..(451): Selenocysteine
  MOD_RES (463)..(463): Selenocysteine
  MOD_RES (471)..(471): Selenocysteine
  MOD_RES (473)..(473): Selenocysteine
  MOD_RES (485)..(485): Selenocysteine
  MOD_RES (490)..(490): Selenocysteine
  MOD_RES (516)..(516): Selenocysteine
  MOD_RES (530)..(530): Selenocysteine
  MOD_RES (564)..(564): Selenocysteine
  MOD_RES (581)..(581): Selenocysteine
  MOD_RES (585)..(585): Selenocysteine
  MOD_RES (593)..(593): Selenocysteine
  MOD_RES (602)..(602): Selenocysteine
  MOD_RES (622)..(622): Selenocysteine
  MOD_RES (659)..(659): Selenocysteine
  MOD_RES (665)..(665): Selenocysteine
  MOD_RES (674)..(674): Selenocysteine
  MOD_RES (679)..(679): Selenocysteine
MGGRVFLVFLAFCVWLXLPGAEXQDSRGCARWCPQDSSCVNAXACRCNPGFSSFSEIIXXPMEXCDDINECAXLSKVSCGKFSDCWNXEGSYDCVCSPGYEPVSGAKXFKNESENXCQDMXFSXWXPPPGVHSQXLSRFFDKVQDLGRDYKPGLANNXIQSILQALDELLEAPGDLEXLPRLQQHCVASHLLDGLEDVLRGLSKNLSNGLLNFSYPAGXELSLEVQKQVDRSVXLRQNQAVMQLDWNQAQKSGDPGPSVVGLVSIPGMGKLLAEAPLVLEPEKQMLLHEXHQGLLQDGSPILLSDVISAFLSNNDXQNLSSPVXFXFSHRSVIPRQKVLCVFWEHGQNGCGHWAXXGCSXIGXRDXSXICRCXHLSSFAVLMAHYDVQEEDPVLXVIXYMGLSVSLLCLLLAALXFLLCKAIQNXSXSLHLQLSLCLFLAHLLFLVAIDQXGHKVLCSIIAGXLHYLYLAXLXWMLLEALYLFLXARNLXVVNYSSINRFMKKLMFPVGYGVPAVXVAISAASRPHLYGXPSRCWLQPEKGFIWGFLGPVCAIFSVNLVLFLVXLWILKNRLSSLNSEVSXLRNXRMLAFKAXAQLFILGCXWCLGILQVGPAARVMAYLFXIINSLQGVFIFLVYCLLSQQVREQYGKWSKGIRKLKXESEMHXLSSSAKADXSKPSXVN

SEQ ID NO: 1644 - protein, 379 aa, Homo sapiens
  MOD_RES (17)..(17): Selenocysteine
  MOD_RES (23)..(23): Selenocysteine
  MOD_RES (43)..(43): Selenocysteine
  MOD_RES (59)..(60): Selenocysteine
  MOD_RES (64)..(64): Selenocysteine
  MOD_RES (73)..(73): Selenocysteine
  MOD_RES (88)..(88): Selenocysteine
  MOD_RES (108)..(108): Selenocysteine
  MOD_RES (116)..(116): Selenocysteine
  MOD_RES (135)..(135): Selenocysteine
  MOD_RES (139)..(139): Selenocysteine
  MOD_RES (144)..(144): Selenocysteine
  MOD_RES (162)..(162): Selenocysteine
  MOD_RES (178)..(178): Selenocysteine
  MOD_RES (183)..(183): Selenocysteine
  MOD_RES (208)..(208): Selenocysteine
  MOD_RES (214)..(214): Selenocysteine
  MOD_RES (217)..(217): Selenocysteine
  MOD_RES (219)..(219): Selenocysteine
  MOD_RES (228)..(228): Selenocysteine
  MOD_RES (251)..(251): Selenocysteine
  MOD_RES (271)..(271): Selenocysteine
  MOD_RES (312)..(312): Selenocysteine
  MOD_RES (327)..(327): Selenocysteine
MGGRVFLVFLAFCVWLXLPGAEXQDSRGCARWCPQDSSCVNAXACRCNPGFSSFSEIIXXPMEXCDDINECAXLSKVSCGKFSDCWNXEGSYDCVCSPGYEPVSGAKXFKNESENXCQDVDECQQNPRLCKSYGXCVNXLGSYXCQCLPGFKLKPEDPKLCXDVDECSSGQHQCDSSXVCFNXVGSYSCRCRPGWKPRHGIPNNQKDXVCEDMXFSXWXPPPGVHSQXLSRFFDKVQDLGRDYKPGLANNXIQSILQALDELLEAPGDLEXLPRLQQHCVASHLLDGLEDVLRGLSKNLSNGLLNFSYPAGXELSLEVQKQVDRSVXLRQNQAVMQLDWNQAQKSGDPGGGSRADCHHLHGAERLSAVPPPGGPHFSPV

SEQ ID NO: 1645 - protein, 774 aa, Homo sapiens
  MOD_RES (17)..(17): Selenocysteine
  MOD_RES (23)..(23): Selenocysteine
  MOD_RES (43)..(43): Selenocysteine
  MOD_RES (59)..(60): Selenocysteine
  MOD_RES (64)..(64): Selenocysteine
  MOD_RES (73)..(73): Selenocysteine
  MOD_RES (88)..(88): Selenocysteine
  MOD_RES (108)..(108): Selenocysteine
  MOD_RES (116)..(116): Selenocysteine
  MOD_RES (135)..(135): Selenocysteine
  MOD_RES (139)..(139): Selenocysteine
  MOD_RES (144)..(144): Selenocysteine
  MOD_RES (162)..(162): Selenocysteine
  MOD_RES (178)..(178): Selenocysteine
  MOD_RES (183)..(183): Selenocysteine
  MOD_RES (208)..(208): Selenocysteine
  MOD_RES (214)..(214): Selenocysteine
  MOD_RES (217)..(217): Selenocysteine
  MOD_RES (219)..(219): Selenocysteine
  MOD_RES (228)..(228): Selenocysteine
  MOD_RES (251)..(251): Selenocysteine
  MOD_RES (271)..(271): Selenocysteine
  MOD_RES (312)..(312): Selenocysteine
  MOD_RES (327)..(327): Selenocysteine
  MOD_RES (383)..(383): Selenocysteine
  MOD_RES (409)..(409): Selenocysteine
  MOD_RES (417)..(417): Selenocysteine
  MOD_RES (419)..(419): Selenocysteine
  MOD_RES (448)..(449): Selenocysteine
  MOD_RES (453)..(453): Selenocysteine
  MOD_RES (456)..(456): Selenocysteine
  MOD_RES (459)..(459): Selenocysteine
  MOD_RES (461)..(461): Selenocysteine
  MOD_RES (466)..(466): Selenocysteine
  MOD_RES (488)..(488): Selenocysteine
  MOD_RES (491)..(491): Selenocysteine
  MOD_RES (508)..(508): Selenocysteine
  MOD_RES (518)..(518): Selenocysteine
  MOD_RES (520)..(520): Selenocysteine
  MOD_RES (544)..(544): Selenocysteine
  MOD_RES (556)..(556): Selenocysteine
  MOD_RES (564)..(564): Selenocysteine
  MOD_RES (566)..(566): Selenocysteine
  MOD_RES (578)..(578): Selenocysteine
  MOD_RES (583)..(583): Selenocysteine
  MOD_RES (609)..(609): Selenocysteine
  MOD_RES (623)..(623): Selenocysteine
  MOD_RES (657)..(657): Selenocysteine
  MOD_RES (674)..(674): Selenocysteine
  MOD_RES (678)..(678): Selenocysteine
  MOD_RES (686)..(686): Selenocysteine
  MOD_RES (695)..(695): Selenocysteine
  MOD_RES (715)..(715): Selenocysteine
  MOD_RES (752)..(752): Selenocysteine
  MOD_RES (758)..(758): Selenocysteine
  MOD_RES (767)..(767): Selenocysteine
  MOD_RES (772)..(772): Selenocysteine
MGGRVFLVFLAFCVWLXLPGAEXQDSRGCARWCPQDSSCVNAXACRCNPGFSSFSEIIXXPMEXCDDINECAXLSKVSCGKFSDCWNXEGSYDCVCSPGYEPVSGAKXFKNESENXCQDVDECQQNPRLCKSYGXCVNXLGSYXCQCLPGFKLKPEDPKLCXDVDECSSGQHQCDSSXVCFNXVGSYSCRCRPGWKPRHGIPNNQKDXVCEDMXFSXWXPPPGVHSQXLSRFFDKVQDLGRDYKPGLANNXIQSILQALDELLEAPGDLEXLPRLQQHCVASHLLDGLEDVLRGLSKNLSNGLLNFSYPAGXELSLEVQKQVDRSVXLRQNQAVMQLDWNQAQKSGDPGPSVVGLVSIPGMGKLLAEAPLVLEPEKQMLLHEXHQGLLQDGSPILLSDVISAFLSNNDXQNLSSPVXFXFSHRSVIPRQKVLCVFWEHGQNGCGHWAXXGCSXIGXRDXSXICRCXHLSSFAVLMAHYDVQEEDPVLXVIXYMGLSVSLLCLLLAALXFLLCKAIQNXSXSLHLQLSLCLFLAHLLFLVAIDQXGHKVLCSIIAGXLHYLYLAXLXWMLLEALYLFLXARNLXVVNYSSINRFMKKLMFPVGYGVPAVXVAISAASRPHLYGXPSRCWLQPEKGFIWGFLGPVCAIFSVNLVLFLVXLWILKNRLSSLNSEVSXLRNXRMLAFKAXAQLFILGCXWCLGILQVGPAARVMAYLFXIINSLQGVFIFLVYCLLSQQVREQYGKWSKGIRKLKXESEMHXLSSSAKADXSKPSXVN

SEQ ID NO: 1646 - protein, 765 aa, Homo sapiens
  MOD_RES (17)..(17): Selenocysteine
  MOD_RES (23)..(23): Selenocysteine
  MOD_RES (43)..(43): Selenocysteine
  MOD_RES (59)..(60): Selenocysteine
  MOD_RES (64)..(64): Selenocysteine
  MOD_RES (73)..(73): Selenocysteine
  MOD_RES (88)..(88): Selenocysteine
  MOD_RES (108)..(108): Selenocysteine
  MOD_RES (116)..(116): Selenocysteine
  MOD_RES (135)..(135): Selenocysteine
  MOD_RES (139)..(139): Selenocysteine
  MOD_RES (144)..(144): Selenocysteine
  MOD_RES (162)..(162): Selenocysteine
  MOD_RES (168)..(168): Selenocysteine
  MOD_RES (178)..(178): Selenocysteine
  MOD_RES (208)..(208): Selenocysteine
  MOD_RES (227)..(227): Selenocysteine
  MOD_RES (232)..(232): Selenocysteine
  MOD_RES (257)..(257): Selenocysteine
  MOD_RES (263)..(263): Selenocysteine
  MOD_RES (266)..(266): Selenocysteine
  MOD_RES (268)..(268): Selenocysteine
  MOD_RES (277)..(277): Selenocysteine
  MOD_RES (300)..(300): Selenocysteine
  MOD_RES (320)..(320): Selenocysteine
  MOD_RES (361)..(361): Selenocysteine
  MOD_RES (376)..(376): Selenocysteine
  MOD_RES (432)..(432): Selenocysteine
  MOD_RES (458)..(458): Selenocysteine
  MOD_RES (466)..(466): Selenocysteine
  MOD_RES (468)..(468): Selenocysteine
  MOD_RES (479)..(479): Selenocysteine
  MOD_RES (482)..(482): Selenocysteine
  MOD_RES (499)..(499): Selenocysteine
  MOD_RES (509)..(509): Selenocysteine
  MOD_RES (511)..(511): Selenocysteine
  MOD_RES (535)..(535): Selenocysteine
  MOD_RES (547)..(547): Selenocysteine
  MOD_RES (555)..(555): Selenocysteine
  MOD_RES (557)..(557): Selenocysteine
  MOD_RES (569)..(569): Selenocysteine
  MOD_RES (574)..(574): Selenocysteine
  MOD_RES (600)..(600): Selenocysteine
  MOD_RES (614)..(614): Selenocysteine
  MOD_RES (648)..(648): Selenocysteine
  MOD_RES (665)..(665): Selenocysteine
  MOD_RES (669)..(669): Selenocysteine
  MOD_RES (677)..(677): Selenocysteine
  MOD_RES (686)..(686): Selenocysteine
  MOD_RES (706)..(706): Selenocysteine
  MOD_RES (743)..(743): Selenocysteine
  MOD_RES (749)..(749): Selenocysteine
  MOD_RES (758)..(758): Selenocysteine
  MOD_RES (763)..(763): Selenocysteine
MGGRVFLVFLAFCVWLXLPGAEXQDSRGCARWCPQDSSCVNAXACRCNPGFSSFSEIIXXPMEXCDDINECAXLSKVSCGKFSDCWNXEGSYDCVCSPGYEPVSGAKXFKNESENXCQDVDECQQNPRLCKSYGXCVNXLGSYXCQCLPGFKLKPEDPKLCXDVNECXSGQNPCHSSXHCLNNVGSYQCRCRPGWQPIPGSPNGPNNXVCEDVDECSSGQHQCDSSXVCFNXVGSYSCRCRPGWKPRHGIPNNQKDXVCEDMXFSXWXPPPGVHSQXLSRFFDKVQDLGRDYKPGLANNXIQSILQALDELLEAPGDLEXLPRLQQHCVASHLLDGLEDVLRGLSKNLSNGLLNFSYPAGXELSLEVQKQVDRSVXLRQNQAVMQLDWNQAQKSGDPGPSVVGLVSIPGMGKLLAEAPLVLEPEKQMLLHEXHQGLLQDGSPILLSDVISAFLSNNDXQNLSSPVXFXFSHREEDPVLXVIXYMGLSVSLLCLLLAALXFLLCKAIQNXSXSLHLQLSLCLFLAHLLFLVAIDQXGHKVLCSIIAGXLHYLYLAXLXWMLLEALYLFLXARNLXVVNYSSINRFMKKLMFPVGYGVPAVXVAISAASRPHLYGXPSRCWLQPEKGFIWGFLGPVCAIFSVNLVLFLVXLWILKNRLSSLNSEVSXLRNXRMLAFKAXAQLFILGCXWCLGILQVGPAARVMAYLFXIINSLQGVFIFLVYCLLSQQVREQYGKWSKGIRKLKXESEMHXLSSSAKADXSKPSXVN

SEQ ID NO: 1647 - protein, 812 aa, Homo sapiens
  MOD_RES (17)..(17): Selenocysteine
  MOD_RES (23)..(23): Selenocysteine
  MOD_RES (43)..(43): Selenocysteine
  MOD_RES (59)..(60): Selenocysteine
  MOD_RES (64)..(64): Selenocysteine
  MOD_RES (73)..(73): Selenocysteine
  MOD_RES (88)..(88): Selenocysteine
  MOD_RES (108)..(108): Selenocysteine
  MOD_RES (116)..(116): Selenocysteine
  MOD_RES (135)..(135): Selenocysteine
  MOD_RES (139)..(139): Selenocysteine
  MOD_RES (144)..(144): Selenocysteine
  MOD_RES (162)..(162): Selenocysteine
  MOD_RES (168)..(168): Selenocysteine
  MOD_RES (178)..(178): Selenocysteine
  MOD_RES (208)..(208): Selenocysteine
  MOD_RES (227)..(227): Selenocysteine
  MOD_RES (232)..(232): Selenocysteine
  MOD_RES (257)..(257): Selenocysteine
  MOD_RES (263)..(263): Selenocysteine
  MOD_RES (266)..(266): Selenocysteine
  MOD_RES (268)..(268): Selenocysteine
  MOD_RES (277)..(277): Selenocysteine
  MOD_RES (300)..(300): Selenocysteine
  MOD_RES (320)..(320): Selenocysteine
  MOD_RES (361)..(361): Selenocysteine
  MOD_RES (376)..(376): Selenocysteine
  MOD_RES (421)..(421): Selenocysteine
  MOD_RES (447)..(447): Selenocysteine
  MOD_RES (455)..(455): Selenocysteine
  MOD_RES (457)..(457): Selenocysteine
  MOD_RES (486)..(487): Selenocysteine
  MOD_RES (491)..(491): Selenocysteine
  MOD_RES (494)..(494): Selenocysteine
  MOD_RES (497)..(497): Selenocysteine
  MOD_RES (499)..(499): Selenocysteine
  MOD_RES (504)..(504): Selenocysteine
  MOD_RES (526)..(526): Selenocysteine
  MOD_RES (529)..(529): Selenocysteine
  MOD_RES (546)..(546): Selenocysteine
  MOD_RES (556)..(556): Selenocysteine
  MOD_RES (558)..(558): Selenocysteine
  MOD_RES (582)..(582): Selenocysteine
  MOD_RES (594)..(594): Selenocysteine
  MOD_RES (602)..(602): Selenocysteine
  MOD_RES (604)..(604): Selenocysteine
  MOD_RES (616)..(616): Selenocysteine
  MOD_RES (621)..(621): Selenocysteine
  MOD_RES (647)..(647): Selenocysteine
  MOD_RES (661)..(661): Selenocysteine
  MOD_RES (695)..(695): Selenocysteine
  MOD_RES (712)..(712): Selenocysteine
  MOD_RES (716)..(716): Selenocysteine
  MOD_RES (724)..(724): Selenocysteine
  MOD_RES (733)..(733): Selenocysteine
  MOD_RES (753)..(753): Selenocysteine
  MOD_RES (790)..(790): Selenocysteine
  MOD_RES (796)..(796): Selenocysteine
  MOD_RES (805)..(805): Selenocysteine
  MOD_RES (810)..(810): Selenocysteine
MGGRVFLVFLAFCVWLXLPGAEXQDSRGCARWCPQDSSCVNAXACRCNPGFSSFSEIIXXPMEXCDDINECAXLSKVSCGKFSDCWNXEGSYDCVCSPGYEPVSGAKXFKNESENXCQDVDECQQNPRLCKSYGXCVNXLGSYXCQCLPGFKLKPEDPKLCXDVNECXSGQNPCHSSXHCLNNVGSYQCRCRPGWQPIPGSPNGPNNXVCEDVDECSSGQHQCDSSXVCFNXVGSYSCRCRPGWKPRHGIPNNQKDXVCEDMXFSXWXPPPGVHSQXLSRFFDKVQDLGRDYKPGLANNXIQSILQALDELLEAPGDLEXLPRLQQHCVASHLLDGLEDVLRGLSKNLSNGLLNFSYPAGXELSLEVQKQVDRSVXLRQNQAVMQLDWNQAQKSGDPGMGKLLAEAPLVLEPEKQMLLHEXHQGLLQDGSPILLSDVISAFLSNNDXQNLSSPVXFXFSHRSVIPRQKVLCVFWEHGQNGCGHWAXXGCSXIGXRDXSXICRCXHLSSFAVLMAHYDVQEEDPVLXVIXYMGLSVSLLCLLLAALXFLLCKAIQNXSXSLHLQLSLCLFLAHLLFLVAIDQXGHKVLCSIIAGXLHYLYLAXLXWMLLEALYLFLXARNLXVVNYSSINRFMKKLMFPVGYGVPAVXVAISAASRPHLYGXPSRCWLQPEKGFIWGFLGPVCAIFSVNLVLFLVXLWILKNRLSSLNSEVSXLRNXRMLAFKAXAQLFILGCXWCLGILQVGPAARVMAYLFXIINSLQGVFIFLVYCLLSQQVREQYGKWSKGIRKLKXESEMHXLSSSAKADXSKPSXVN

SEQ ID NO: 1648 - protein, 823 aa, Homo sapiens
  MOD_RES (17)..(17): Selenocysteine
  MOD_RES (23)..(23): Selenocysteine
  MOD_RES (43)..(43): Selenocysteine
  MOD_RES (59)..(60): Selenocysteine
  MOD_RES (64)..(64): Selenocysteine
  MOD_RES (73)..(73): Selenocysteine
  MOD_RES (88)..(88): Selenocysteine
  MOD_RES (108)..(108): Selenocysteine
  MOD_RES (116)..(116): Selenocysteine
  MOD_RES (135)..(135): Selenocysteine
  MOD_RES (139)..(139): Selenocysteine
  MOD_RES (144)..(144): Selenocysteine
  MOD_RES (162)..(162): Selenocysteine
  MOD_RES (168)..(168): Selenocysteine
  MOD_RES (178)..(178): Selenocysteine
  MOD_RES (208)..(208): Selenocysteine
  MOD_RES (227)..(227): Selenocysteine
  MOD_RES (232)..(232): Selenocysteine
  MOD_RES (257)..(257): Selenocysteine
  MOD_RES (263)..(263): Selenocysteine
  MOD_RES (266)..(266): Selenocysteine
  MOD_RES (268)..(268): Selenocysteine
  MOD_RES (277)..(277): Selenocysteine
  MOD_RES (300)..(300): Selenocysteine
  MOD_RES (320)..(320): Selenocysteine
  MOD_RES (361)..(361): Selenocysteine
  MOD_RES (376)..(376): Selenocysteine
  MOD_RES (432)..(432): Selenocysteine
  MOD_RES (458)..(458): Selenocysteine
  MOD_RES (466)..(466): Selenocysteine
  MOD_RES (468)..(468): Selenocysteine
  MOD_RES (497)..(498): Selenocysteine
  MOD_RES (502)..(502): Selenocysteine
  MOD_RES (505)..(505): Selenocysteine
  MOD_RES (508)..(508): Selenocysteine
  MOD_RES (510)..(510): Selenocysteine
  MOD_RES (515)..(515): Selenocysteine
  MOD_RES (537)..(537): Selenocysteine
  MOD_RES (540)..(540): Selenocysteine
  MOD_RES (557)..(557): Selenocysteine
  MOD_RES (567)..(567): Selenocysteine
  MOD_RES (569)..(569): Selenocysteine
  MOD_RES (593)..(593): Selenocysteine
  MOD_RES (605)..(605): Selenocysteine
  MOD_RES (613)..(613): Selenocysteine
  MOD_RES (615)..(615): Selenocysteine
  MOD_RES (627)..(627): Selenocysteine
  MOD_RES (632)..(632): Selenocysteine
  MOD_RES (658)..(658): Selenocysteine
  MOD_RES (672)..(672): Selenocysteine
  MOD_RES (706)..(706): Selenocysteine
  MOD_RES (723)..(723): Selenocysteine
  MOD_RES (727)..(727): Selenocysteine
  MOD_RES (735)..(735): Selenocysteine
  MOD_RES (744)..(744): Selenocysteine
  MOD_RES (764)..(764): Selenocysteine
  MOD_RES (801)..(801): Selenocysteine
  MOD_RES (807)..(807): Selenocysteine
  MOD_RES (816)..(816): Selenocysteine
  MOD_RES (821)..(821): Selenocysteine
MGGRVFLVFLAFCVWLXLPGAEXQDSRGCARWCPQDSSCVNAXACRCNPGFSSFSEIIXXPMEXCDDINECAXLSKVSCGKFSDCWNXEGSYDCVCSPGYEPVSGAKXFKNESENXCQDVDECQQNPRLCKSYGXCVNXLGSYXCQCLPGFKLKPEDPKLCXDVNECXSGQNPCHSSXHCLNNVGSYQCRCRPGWQPIPGSPNGPNNXVCEDVDECSSGQHQCDSSXVCFNXVGSYSCRCRPGWKPRHGIPNNQKDXVCEDMXFSXWXPPPGVHSQXLSRFFDKVQDLGRDYKPGLANNXIQSILQALDELLEAPGDLEXLPRLQQHCVASHLLDGLEDVLRGLSKNLSNGLLNFSYPAGXELSLEVQKQVDRSVXLRQNQAVMQLDWNQAQKSGDPGPSVVGLVSIPGMGKLLAEAPLVLEPEKQMLLHEXHQGLLQDGSPILLSDVISAFLSNNDXQNLSSPVXFXFSHRSVIPRQKVLCVFWEHGQNGCGHWAXXGCSXIGXRDXSXICRCXHLSSFAVLMAHYDVQEEDPVLXVIXYMGLSVSLLCLLLAALXFLLCKAIQNXSXSLHLQLSLCLFLAHLLFLVAIDQXGHKVLCSIIAGXLHYLYLAXLXWMLLEALYLFLXARNLXVVNYSSINRFMKKLMFPVGYGVPAVXVAISAASRPHLYGXPSRCWLQPEKGFIWGFLGPVCAIFSVNLVLFLVXLWILKNRLSSLNSEVSXLRNXRMLAFKAXAQLFILGCXWCLGILQVGPAARVMAYLFXIINSLQGVFIFLVYCLLSQQVREQYGKWSKGIRKLKXESEMHXLSSSAKADXSKPSXVN

SEQ ID NO: 1649 - protein, 831 aa, Homo sapiens
  MOD_RES (17)..(17): Selenocysteine
  MOD_RES (23)..(23): Selenocysteine
  MOD_RES (43)..(43): Selenocysteine
  MOD_RES (59)..(60): Selenocysteine
  MOD_RES (64)..(64): Selenocysteine
  MOD_RES (73)..(73): Selenocysteine
  MOD_RES (88)..(88): Selenocysteine
  MOD_RES (108)..(108): Selenocysteine
  MOD_RES (116)..(116): Selenocysteine
  MOD_RES (135)..(135): Selenocysteine
  MOD_RES (139)..(139): Selenocysteine
  MOD_RES (144)..(144): Selenocysteine
  MOD_RES (162)..(162): Selenocysteine
  MOD_RES (168)..(168): Selenocysteine
  MOD_RES (178)..(178): Selenocysteine
  MOD_RES (208)..(208): Selenocysteine
  MOD_RES (227)..(227): Selenocysteine
  MOD_RES (232)..(232): Selenocysteine
  MOD_RES (257)..(257): Selenocysteine
  MOD_RES (263)..(263): Selenocysteine
  MOD_RES (266)..(266): Selenocysteine
  MOD_RES (268)..(268): Selenocysteine
  MOD_RES (277)..(277): Selenocysteine
  MOD_RES (300)..(300): Selenocysteine
  MOD_RES (320)..(320): Selenocysteine
  MOD_RES (361)..(361): Selenocysteine
  MOD_RES (376)..(376): Selenocysteine
  MOD_RES (421)..(421): Selenocysteine
  MOD_RES (447)..(447): Selenocysteine
  MOD_RES (455)..(455): Selenocysteine
  MOD_RES (457)..(457): Selenocysteine
  MOD_RES (486)..(487): Selenocysteine
  MOD_RES (491)..(491): Selenocysteine
  MOD_RES (494)..(494): Selenocysteine
  MOD_RES (497)..(497): Selenocysteine
  MOD_RES (499)..(499): Selenocysteine
  MOD_RES (504)..(504): Selenocysteine
  MOD_RES (526)..(526): Selenocysteine
  MOD_RES (529)..(529): Selenocysteine
  MOD_RES (546)..(546): Selenocysteine
  MOD_RES (556)..(556): Selenocysteine
  MOD_RES (558)..(558): Selenocysteine
  MOD_RES (582)..(582): Selenocysteine
  MOD_RES (594)..(594): Selenocysteine
  MOD_RES (602)..(602): Selenocysteine
  MOD_RES (604)..(604): Selenocysteine
  MOD_RES (616)..(616): Selenocysteine
  MOD_RES (621)..(621): Selenocysteine
  MOD_RES (647)..(647): Selenocysteine
  MOD_RES (661)..(661): Selenocysteine
  MOD_RES (695)..(695): Selenocysteine
  MOD_RES (712)..(712): Selenocysteine
  MOD_RES (716)..(716): Selenocysteine
  MOD_RES (724)..(724): Selenocysteine
  MOD_RES (733)..(733): Selenocysteine
  MOD_RES (753)..(753): Selenocysteine
  MOD_RES (790)..(790): Selenocysteine
  MOD_RES (796)..(796): Selenocysteine
  MOD_RES (805)..(805): Selenocysteine
  MOD_RES (810)..(810): Selenocysteine
  MOD_RES (813)..(813): Selenocysteine
  MOD_RES (822)..(822): Selenocysteine
  MOD_RES (831)..(831): Selenocysteine
MGGRVFLVFLAFCVWLXLPGAEXQDSRGCARWCPQDSSCVNAXACRCNPGFSSFSEIIXXPMEXCDDINECAXLSKVSCGKFSDCWNXEGSYDCVCSPGYEPVSGAKXFKNESENXCQDVDECQQNPRLCKSYGXCVNXLGSYXCQCLPGFKLKPEDPKLCXDVNECXSGQNPCHSSXHCLNNVGSYQCRCRPGWQPIPGSPNGPNNXVCEDVDECSSGQHQCDSSXVCFNXVGSYSCRCRPGWKPRHGIPNNQKDXVCEDMXFSXWXPPPGVHSQXLSRFFDKVQDLGRDYKPGLANNXIQSILQALDELLEAPGDLEXLPRLQQHCVASHLLDGLEDVLRGLSKNLSNGLLNFSYPAGXELSLEVQKQVDRSVXLRQNQAVMQLDWNQAQKSGDPGMGKLLAEAPLVLEPEKQMLLHEXHQGLLQDGSPILLSDVISAFLSNNDXQNLSSPVXFXFSHRSVIPRQKVLCVFWEHGQNGCGHWAXXGCSXIGXRDXSXICRCXHLSSFAVLMAHYDVQEEDPVLXVIXYMGLSVSLLCLLLAALXFLLCKAIQNXSXSLHLQLSLCLFLAHLLFLVAIDQXGHKVLCSIIAGXLHYLYLAXLXWMLLEALYLFLXARNLXVVNYSSINRFMKKLMFPVGYGVPAVXVAISAASRPHLYGXPSRCWLQPEKGFIWGFLGPVCAIFSVNLVLFLVXLWILKNRLSSLNSEVSXLRNXRMLAFKAXAQLFILGCXWCLGILQVGPAARVMAYLFXIINSLQGVFIFLVYCLLSQQVREQYGKWSKGIRKLKXESEMHXLSSSAKADXSKPSXPGXVVQACNASXLGGQSRKIX

SEQ ID NO: 1650 - protein, 730 aa, Homo sapiens
  MOD_RES (17)..(17): Selenocysteine
  MOD_RES (23)..(23): Selenocysteine
  MOD_RES (43)..(43): Selenocysteine
  MOD_RES (59)..(60): Selenocysteine
  MOD_RES (64)..(64): Selenocysteine
  MOD_RES (73)..(73): Selenocysteine
  MOD_RES (88)..(88): Selenocysteine
  MOD_RES (108)..(108): Selenocysteine
  MOD_RES (116)..(116): Selenocysteine
  MOD_RES (134)..(134): Selenocysteine
  MOD_RES (139)..(139): Selenocysteine
  MOD_RES (164)..(164): Selenocysteine
  MOD_RES (170)..(170): Selenocysteine
  MOD_RES (173)..(173): Selenocysteine
  MOD_RES (175)..(175): Selenocysteine
  MOD_RES (184)..(184): Selenocysteine
  MOD_RES (207)..(207): Selenocysteine
  MOD_RES (227)..(227): Selenocysteine
  MOD_RES (268)..(268): Selenocysteine
  MOD_RES (283)..(283): Selenocysteine
  MOD_RES (339)..(339): Selenocysteine
  MOD_RES (365)..(365): Selenocysteine
  MOD_RES (373)..(373): Selenocysteine
  MOD_RES (375)..(375): Selenocysteine
  MOD_RES (404)..(405): Selenocysteine
  MOD_RES (409)..(409): Selenocysteine
  MOD_RES (412)..(412): Selenocysteine
  MOD_RES (415)..(415): Selenocysteine
  MOD_RES (417)..(417): Selenocysteine
  MOD_RES (422)..(422): Selenocysteine
  MOD_RES (444)..(444): Selenocysteine
  MOD_RES (447)..(447): Selenocysteine
  MOD_RES (464)..(464): Selenocysteine
  MOD_RES (474)..(474): Selenocysteine
  MOD_RES (476)..(476): Selenocysteine
  MOD_RES (500)..(500): Selenocysteine
  MOD_RES (512)..(512): Selenocysteine
  MOD_RES (520)..(520): Selenocysteine
  MOD_RES (522)..(522): Selenocysteine
  MOD_RES (534)..(534): Selenocysteine
  MOD_RES (539)..(539): Selenocysteine
  MOD_RES (565)..(565): Selenocysteine
  MOD_RES (579)..(579): Selenocysteine
  MOD_RES (613)..(613): Selenocysteine
  MOD_RES (630)..(630): Selenocysteine
  MOD_RES (634)..(634): Selenocysteine
  MOD_RES (642)..(642): Selenocysteine
  MOD_RES (651)..(651): Selenocysteine
  MOD_RES (671)..(671): Selenocysteine
  MOD_RES (708)..(708): Selenocysteine
  MOD_RES (714)..(714): Selenocysteine
  MOD_RES (723)..(723): Selenocysteine
  MOD_RES (728)..(728): Selenocysteine
MGGRVFLVFLAFCVWLXLPGAEXQDSRGCARWCPQDSSCVNAXACRCNPGFSSFSEIIXXPMEXCDDINECAXLSKVSCGKFSDCWNXEGSYDCVCSPGYEPVSGAKXFKNESENXCQDVDECSSGQHQCDSSXVCFNXVGSYSCRCRPGWKPRHGIPNNQKDXVCEDMXFSXWXPPPGVHSQXLSRFFDKVQDLGRDYKPGLANNXIQSILQALDELLEAPGDLEXLPRLQQHCVASHLLDGLEDVLRGLSKNLSNGLLNFSYPAGXELSLEVQKQVDRSVXLRQNQAVMQLDWNQAQKSGDPGPSVVGLVSIPGMGKLLAEAPLVLEPEKQMLLHEXHQGLLQDGSPILLSDVISAFLSNNDXQNLSSPVXFXFSHRSVIPRQKVLCVFWEHGQNGCGHWAXXGCSXIGXRDXSXICRCXHLSSFAVLMAHYDVQEEDPVLXVIXYMGLSVSLLCLLLAALXFLLCKAIQNXSXSLHLQLSLCLFLAHLLFLVAIDQXGHKVLCSIIAGXLHYLYLAXLXWMLLEALYLFLXARNLXVVNYSSINRFMKKLMFPVGYGVPAVXVAISAASRPHLYGXPSRCWLQPEKGFIWGFLGPVCAIFSVNLVLFLVXLWILKNRLSSLNSEVSXLRNXRMLAFKAXAQLFILGCXWCLGILQVGPAARVMAYLFXIINSLQGVFIFLVYCLLSQQVREQYGKWSKGIRKLKXESEMHXLSSSAKADXSKPSXVN

SEQ ID NO: 1651 - protein, 330 aa, Homo sapiens
  MOD_RES (1)..(1): Any amino acid
  MOD_RES (9)..(9): Selenocysteine
  MOD_RES (28)..(28): Selenocysteine
  MOD_RES (32)..(32): Selenocysteine
  MOD_RES (37)..(37): Selenocysteine
  MOD_RES (55)..(55): Selenocysteine
  MOD_RES (71)..(71): Selenocysteine
  MOD_RES (76)..(76): Selenocysteine
  MOD_RES (101)..(101): Selenocysteine
  MOD_RES (107)..(107): Selenocysteine
  MOD_RES (110)..(110): Selenocysteine
  MOD_RES (112)..(112): Selenocysteine
  MOD_RES (121)..(121): Selenocysteine
  MOD_RES (144)..(144): Selenocysteine
  MOD_RES (164)..(164): Selenocysteine
  MOD_RES (205)..(205): Selenocysteine
  MOD_RES (220)..(220): Selenocysteine
  MOD_RES (247)..(247): Selenocysteine
XFKNESENXCQDVDECQQNPRLCKSYGXCVNXLGSYXCQCLPGFKLKPEDPKLCXDVDECSSGQHQCDSSXVCFNXVGSYSCRCRPGWKPRHGIPNNQKDXVCEDMXFSXWXPPPGVHSQXLSRFFDKVQDLGRDYKPGLANNXIQSILQALDELLEAPGDLEXLPRLQQHCVASHLLDGLEDVLRGLSKNLSNGLLNFSYPAGXELSLEVQKQVDRSVXLRQNQAVMQLDWNQAQKSGDPVSDPEXEGALCLLGAWPEWMWSLGHHRLQHNRHQRHQHHLPLHPPEQLCRPHGPLRCAGGGSRADCHHLHGAERLSAVPPPGGPHFSPV

SEQ ID NO: 1652 - protein, 437 aa, Homo sapiens
  MOD_RES (16)..(16): Selenocysteine
  MOD_RES (37)..(37): Selenocysteine
  MOD_RES (72)..(72): Selenocysteine
  MOD_RES (74)..(74): Selenocysteine
  MOD_RES (81)..(81): Selenocysteine
  MOD_RES (84)..(84): Selenocysteine
  MOD_RES (95)..(95): Selenocysteine
  MOD_RES (116)..(116): Selenocysteine
  MOD_RES (133)..(133): Selenocysteine
  MOD_RES (142)..(142): Selenocysteine
  MOD_RES (145)..(145): Selenocysteine
  MOD_RES (162)..(162): Selenocysteine
  MOD_RES (172)..(172): Selenocysteine
  MOD_RES (174)..(174): Selenocysteine
  MOD_RES (198)..(198): Selenocysteine
  MOD_RES (220)..(220): Selenocysteine
  MOD_RES (232)..(232): Selenocysteine
  MOD_RES (237)..(237): Selenocysteine
  MOD_RES (263)..(263): Selenocysteine
  MOD_RES (277)..(277): Selenocysteine
  MOD_RES (328)..(328): Selenocysteine
  MOD_RES (332)..(332): Selenocysteine
  MOD_RES (340)..(340): Selenocysteine
  MOD_RES (349)..(349): Selenocysteine
  MOD_RES (369)..(369): Selenocysteine
  MOD_RES (410)..(410): Selenocysteine
  MOD_RES (412)..(412): Selenocysteine
MNSMDIRCSDIIQGDXQGPSAIAFISYSSLGNIINAXFFEEMDKKDQVYLNSQVVSAAIGPKRNVSLSKSVXLXFQHVKMXPSXKKVFCVYWKSXGQGSQWSRDGCFLIHVNKSHXMCNCSHLSSFAVLMALXSQEEDPVLXVIXYVGLSVSLLCLLLAALXFLLCKAIRNXSXSLHLQLSLCLFLAHLLFLVGIDRXEPKVLCSIIAGALHYLYLAAFXWMLLEGVHLFLXARNLXVVNYSSINRLMKWIMFPVGYGVPAVXVAISAASWPHLYGXADRCWLHLDQGFMWSFLGPVCAIFSANLVLFILVFWILKRKLSSLNSEVSXIQNXRMLAFKAXAQLFILGCXWCLGLLQVGPAAQVMAYLFXIINSLQGFFIFLVYCLLSQQVQKQYQKWFREIVKSKSESEXYXLSSKMGPDSKPSEGDVFPGQVKRKY

SEQ ID NO: 1653 - protein, 57 aa, Homo sapiens
  MOD_RES (21)..(21): Selenocysteine
  MOD_RES (24)..(24): Selenocysteine
  MOD_RES (35)..(35): Selenocysteine
  MOD_RES (45)..(45): Selenocysteine
MQGPLLLPGLCFLLSLFGAVXQKXKSECSEPEQRXCGPRAGPGAXHGLQWAGEKCLF

SEQ ID NO: 1654 - protein, 526 aa, Homo sapiens
  MOD_RES (21)..(21): Selenocysteine
  MOD_RES (24)..(24): Selenocysteine
  MOD_RES (26)..(26): Selenocysteine
  MOD_RES (41)..(41): Selenocysteine
  MOD_RES (44)..(44): Selenocysteine
  MOD_RES (50)..(50): Selenocysteine
  MOD_RES (59)..(59): Selenocysteine
  MOD_RES (64)..(64): Selenocysteine
  MOD_RES (70)..(70): Selenocysteine
  MOD_RES (74)..(74): Selenocysteine
  MOD_RES (83)..(83): Selenocysteine
  MOD_RES (105)..(105): Selenocysteine
  MOD_RES (126)..(126): Selenocysteine
  MOD_RES (161)..(161): Selenocysteine
  MOD_RES (163)..(163): Selenocysteine
  MOD_RES (170)..(170): Selenocysteine
  MOD_RES (173)..(173): Selenocysteine
  MOD_RES (184)..(184): Selenocysteine
  MOD_RES (205)..(205): Selenocysteine
  MOD_RES (222)..(222): Selenocysteine
  MOD_RES (231)..(231): Selenocysteine
  MOD_RES (234)..(234): Selenocysteine
  MOD_RES (251)..(251): Selenocysteine
  MOD_RES (261)..(261): Selenocysteine
  MOD_RES (263)..(263): Selenocysteine
  MOD_RES (287)..(287): Selenocysteine
  MOD_RES (309)..(309): Selenocysteine
  MOD_RES (321)..(321): Selenocysteine
  MOD_RES (326)..(326): Selenocysteine
  MOD_RES (352)..(352): Selenocysteine
  MOD_RES (366)..(366): Selenocysteine
  MOD_RES (417)..(417): Selenocysteine
  MOD_RES (421)..(421): Selenocysteine
  MOD_RES (429)..(429): Selenocysteine
  MOD_RES (438)..(438): Selenocysteine
  MOD_RES (458)..(458): Selenocysteine
  MOD_RES (499)..(499): Selenocysteine
  MOD_RES (501)..(501): Selenocysteine
MQGPLLLPGLCFLLSLFGAVXQKXKXSCAKCPPNASCVNNXHCXCNHGYXSGSGQKLFXFPLEXCNAIEXQAIXDNCSEERKXFNLNVQMNSMDIRCSDIIQGDXQGPSAIAFISYSSLGNIINAXFFEEMDKKDQVYLNSQVVSAAIGPKRNVSLSKSVXLXFQHVKMXPSXKKVFCVYWKSXGQGSQWSRDGCFLIHVNKSHXMCNCSHLSSFAVLMALXSQEEDPVLXVIXYVGLSVSLLCLLLAALXFLLCKAIRNXSXSLHLQLSLCLFLAHLLFLVGIDRXEPKVLCSIIAGALHYLYLAAFXWMLLEGVHLFLXARNLXVVNYSSINRLMKWIMFPVGYGVPAVXVAISAASWPHLYGXADRCWLHLDQGFMWSFLGPVCAIFSANLVLFILVFWILKRKLSSLNSEVSXIQNXRMLAFKAXAQLFILGCXWCLGLLQVGPAAQVMAYLFXIINSLQGFFIFLVYCLLSQQVQKQYQKWFREIVKSKSESEXYXLSSKMGPDSKPSEGDVFPGQVKRKY

SEQ ID NO: 1655 - protein, 652 aa, Homo sapiens
  MOD_RES (21)..(21): Selenocysteine
  MOD_RES (24)..(24): Selenocysteine
  MOD_RES (26)..(26): Selenocysteine
  MOD_RES (41)..(41): Selenocysteine
  MOD_RES (44)..(44): Selenocysteine
  MOD_RES (50)..(50): Selenocysteine
  MOD_RES (59)..(59): Selenocysteine
  MOD_RES (64)..(64): Selenocysteine
  MOD_RES (72)..(72): Selenocysteine
  MOD_RES (116)..(116): Selenocysteine
  MOD_RES (120)..(121): Selenocysteine
  MOD_RES (125)..(126): Selenocysteine
  MOD_RES (144)..(144): Selenocysteine
  MOD_RES (147)..(147): Selenocysteine
  MOD_RES (151)..(151): Selenocysteine
  MOD_RES (160)..(160): Selenocysteine
  MOD_RES (162)..(163): Selenocysteine
  MOD_RES (175)..(175): Selenocysteine
  MOD_RES (196)..(196): Selenocysteine
  MOD_RES (200)..(200): Selenocysteine
  MOD_RES (209)..(209): Selenocysteine
  MOD_RES (231)..(231): Selenocysteine
  MOD_RES (252)..(252): Selenocysteine
  MOD_RES (287)..(287): Selenocysteine
  MOD_RES (289)..(289): Selenocysteine
  MOD_RES (296)..(296): Selenocysteine
  MOD_RES (299)..(299): Selenocysteine
  MOD_RES (310)..(310): Selenocysteine
  MOD_RES (331)..(331): Selenocysteine
  MOD_RES (348)..(348): Selenocysteine
  MOD_RES (357)..(357): Selenocysteine
  MOD_RES (360)..(360): Selenocysteine
  MOD_RES (377)..(377): Selenocysteine
  MOD_RES (387)..(387): Selenocysteine
  MOD_RES (389)..(389): Selenocysteine
  MOD_RES (413)..(413): Selenocysteine
  MOD_RES (435)..(435): Selenocysteine
  MOD_RES (447)..(447): Selenocysteine
  MOD_RES (452)..(452): Selenocysteine
  MOD_RES (478)..(478): Selenocysteine
  MOD_RES (492)..(492): Selenocysteine
  MOD_RES (543)..(543): Selenocysteine
  MOD_RES (547)..(547): Selenocysteine
  MOD_RES (555)..(555): Selenocysteine
  MOD_RES (564)..(564): Selenocysteine
  MOD_RES (584)..(584): Selenocysteine
  MOD_RES (625)..(625): Selenocysteine
  MOD_RES (627)..(627): Selenocysteine
MQGPLLLPGLCFLLSLFGAVXQKXKXSCAKCPPNASCVNNXHCXCNHGYXSGSGQKLFXFPLEXCNDINECXPPYSVYCGFNAVCYNVEGSFYCQCVPGYRLHSGNEQFSNSNENXCQDXXSSKXXEGRKELQKIVDKFESLLXNQXLWRXEGRQEISSXAXXILRDVESKVLEXALKDPEQKVLKIQNDSVAIEXQAIXDNCSEERKXFNLNVQMNSMDIRCSDIIQGDXQGPSAIAFISYSSLGNIINAXFFEEMDKKDQVYLNSQVVSAAIGPKRNVSLSKSVXLXFQHVKMXPSXKKVFCVYWKSXGQGSQWSRDGCFLIHVNKSHXMCNCSHLSSFAVLMALXSQEEDPVLXVIXYVGLSVSLLCLLLAALXFLLCKAIRNXSXSLHLQLSLCLFLAHLLFLVGIDRXEPKVLCSIIAGALHYLYLAAFXWMLLEGVHLFLXARNLXVVNYSSINRLMKWIMFPVGYGVPAVXVAISAASWPHLYGXADRCWLHLDQGFMWSFLGPVCAIFSANLVLFILVFWILKRKLSSLNSEVSXIQNXRMLAFKAXAQLFILGCXWCLGLLQVGPAAQVMAYLFXIINSLQGFFIFLVYCLLSQQVQKQYQKWFREIVKSKSESEXYXLSSKMGPDSKPSEGDVFPGQVKRKY

SEQ ID NO: 1656 - protein, 600 aa, Homo sapiens
  MOD_RES (21)..(21): Selenocysteine
  MOD_RES (24)..(24): Selenocysteine
  MOD_RES (26)..(26): Selenocysteine
  MOD_RES (41)..(41): Selenocysteine
  MOD_RES (44)..(44): Selenocysteine
  MOD_RES (50)..(50): Selenocysteine
  MOD_RES (59)..(59): Selenocysteine
  MOD_RES (64)..(64): Selenocysteine
  MOD_RES (68)..(69): Selenocysteine
  MOD_RES (73)..(74): Selenocysteine
  MOD_RES (92)..(92): Selenocysteine
  MOD_RES (95)..(95): Selenocysteine
  MOD_RES (99)..(99): Selenocysteine
  MOD_RES (108)..(108): Selenocysteine
  MOD_RES (110)..(111): Selenocysteine
  MOD_RES (123)..(123): Selenocysteine
  MOD_RES (144)..(144): Selenocysteine
  MOD_RES (148)..(148): Selenocysteine
  MOD_RES (157)..(157): Selenocysteine
  MOD_RES (179)..(179): Selenocysteine
  MOD_RES (200)..(200): Selenocysteine
  MOD_RES (235)..(235): Selenocysteine
  MOD_RES (237)..(237): Selenocysteine
  MOD_RES (244)..(244): Selenocysteine
  MOD_RES (247)..(247): Selenocysteine
  MOD_RES (258)..(258): Selenocysteine
  MOD_RES (279)..(279): Selenocysteine
  MOD_RES (296)..(296): Selenocysteine
  MOD_RES (305)..(305): Selenocysteine
  MOD_RES (308)..(308): Selenocysteine
  MOD_RES (325)..(325): Selenocysteine
  MOD_RES (335)..(335): Selenocysteine
  MOD_RES (337)..(337): Selenocysteine
  MOD_RES (361)..(361): Selenocysteine
  MOD_RES (383)..(383): Selenocysteine
  MOD_RES (395)..(395): Selenocysteine
  MOD_RES (400)..(400): Selenocysteine
  MOD_RES (426)..(426): Selenocysteine
  MOD_RES (440)..(440): Selenocysteine
  MOD_RES (491)..(491): Selenocysteine
  MOD_RES (495)..(495): Selenocysteine
  MOD_RES (503)..(503): Selenocysteine
  MOD_RES (512)..(512): Selenocysteine
  MOD_RES (532)..(532): Selenocysteine
  MOD_RES (573)..(573): Selenocysteine
  MOD_RES (575)..(575): Selenocysteine
MQGPLLLPGLCFLLSLFGAVXQKXKXSCAKCPPNASCVNNXHCXCNHGYXSGSGQKLFXFPLEXCNDXXSSKXXEGRKELQKIVDKFESLLXNQXLWRXEGRQEISSXAXXILRDVESKVLEXALKDPEQKVLKIQNDSVAIEXQAIXDNCSEERKXFNLNVQMNSMDIRCSDIIQGDXQGPSAIAFISYSSLGNIINAXFFEEMDKKDQVYLNSQVVSAAIGPKRNVSLSKSVXLXFQHVKMXPSXKKVFCVYWKSXGQGSQWSRDGCFLIHVNKSHXMCNCSHLSSFAVLMALXSQEEDPVLXVIXYVGLSVSLLCLLLAALXFLLCKAIRNXSXSLHLQLSLCLFLAHLLFLVGIDRXEPKVLCSIIAGALHYLYLAAFXWMLLEGVHLFLXARNLXVVNYSSINRLMKWIMFPVGYGVPAVXVAISAASWPHLYGXADRCWLHLDQGFMWSFLGPVCAIFSANLVLFILVFWILKRKLSSLNSEVSXIQNXRMLAFKAXAQLFILGCXWCLGLLQVGPAAQVMAYLFXIINSLQGFFIFLVYCLLSQQVQKQYQKWFREIVKSKSESEXYXLSSKMGPDSKPSEGDVFPGQVKRKY

SEQ ID NO: 1657 - protein, 786 aa, Homo sapiens
  MOD_RES (14)..(14): Selenocysteine
  MOD_RES (20)..(20): Selenocysteine
  MOD_RES (40)..(40): Selenocysteine
  MOD_RES (56)..(57): Selenocysteine
  MOD_RES (59)..(59): Selenocysteine
  MOD_RES (61)..(61): Selenocysteine
  MOD_RES (70)..(70): Selenocysteine
  MOD_RES (85)..(85): Selenocysteine
  MOD_RES (105)..(105): Selenocysteine
  MOD_RES (113)..(113): Selenocysteine
  MOD_RES (132)..(132): Selenocysteine
  MOD_RES (136)..(136): Selenocysteine
  MOD_RES (141)..(141): Selenocysteine
  MOD_RES (159)..(159): Selenocysteine
  MOD_RES (175)..(175): Selenocysteine
  MOD_RES (180)..(180): Selenocysteine
  MOD_RES (205)..(205): Selenocysteine
  MOD_RES (211)..(211): Selenocysteine
  MOD_RES (214)..(214): Selenocysteine
  MOD_RES (216)..(216): Selenocysteine
  MOD_RES (225)..(225): Selenocysteine
  MOD_RES (242)..(242): Selenocysteine
  MOD_RES (248)..(248): Selenocysteine
  MOD_RES (279)..(279): Selenocysteine
  MOD_RES (302)..(302): Selenocysteine
  MOD_RES (309)..(309): Selenocysteine
  MOD_RES (312)..(312): Selenocysteine
  MOD_RES (324)..(324): Selenocysteine
  MOD_RES (359)..(360): Selenocysteine
  MOD_RES (406)..(406): Selenocysteine
  MOD_RES (461)..(461): Selenocysteine
  MOD_RES (474)..(475): Selenocysteine
  MOD_RES (499)..(499): Selenocysteine
  MOD_RES (502)..(502): Selenocysteine
  MOD_RES (519)..(519): Selenocysteine
  MOD_RES (531)..(532): Selenocysteine
  MOD_RES (546)..(546): Selenocysteine
  MOD_RES (603)..(603): Selenocysteine
  MOD_RES (652)..(652): Selenocysteine
  MOD_RES (664)..(665): Selenocysteine
  MOD_RES (670)..(670): Selenocysteine
  MOD_RES (690)..(690): Selenocysteine
  MOD_RES (692)..(692): Selenocysteine
  MOD_RES (703)..(703): Selenocysteine
  MOD_RES (719)..(719): Selenocysteine
  MOD_RES (723)..(723): Selenocysteine
  MOD_RES (765)..(765): Selenocysteine
  MOD_RES (767)..(768): Selenocysteine
  MOD_RES (771)..(771): Selenocysteine
  MOD_RES (776)..(776): Selenocysteine
MGGRVFLAFCVWLXLPGAEXQDSRGCARWCPQNSSCVNAXACRCNPGFSSFSEIIXXPXEXCDDINECAXPSKVSCGKFSDCWNXEGSYDCVCSPGYEPVSGAKXFKNESENXCQDVDECQQNPRLCKSYGXCVNXLGSYXCQCLPGFKFIPEDPKVCXDVDECSSGQHQCDSSXVCFNXVGSYSCRCRPGWKPRHGIPNNQKDXVCEDMXFSXWXPPPGVHSQXLSRFFDKVQDLGRDSKXSSAEVXIQNVIKLVDELMEAPGDVEALAPPVRHLIAXQLLSNLEDIMRILAKSLPKGPFXYISPSNXELXLMIQERGDKNVXMGQSSARMKLNWAVAAGAEDPGPAVAGILSIQNMXXLLANASLNLHSKKQAELEEIYESSIRGVQLRRLSAVNSIFLSHNNXKELNSPILFAFSHLESSDGEAGRDPPAKDVMPGPRQELLCAFWKSDSDRGGHWAXEGCQVLGSKNGSXXCQCSHLSSFAILMAHYDVEDWKLXLIXRVGLALSLFCLLLCILXFLLVRPIQGSRXXIHLHLCICLFVGSXIFLAGIENEGGQVGLRCRLVAGLLHYCFLAAFCWMSLEGLELYFLVVRVFQGQGLSXRWLCLIGYGVPLLIVGVSAAIYSKGYGRPRYCWLDFEQGFLWSFLGPVXFIILCNAVIFVXXVWKLXQKFSEINPDMKKLKKARALXIXAIAQLFLLGCXWVFGLFIFDDRSLVLXYVFXILNCLQGAFLYLLHCLLNKKVREEYRKWACLVAGGSKYSEFXSXXSGXGHNQXRALRASESGI

SEQ ID NO: 1658 - protein, 835 aa, Homo sapiens
  MOD_RES (14)..(14): Selenocysteine
  MOD_RES (20)..(20): Selenocysteine
  MOD_RES (40)..(40): Selenocysteine
  MOD_RES (56)..(57): Selenocysteine
  MOD_RES (59)..(59): Selenocysteine
  MOD_RES (61)..(61): Selenocysteine
  MOD_RES (70)..(70): Selenocysteine
  MOD_RES (85)..(85): Selenocysteine
  MOD_RES (105)..(105): Selenocysteine
  MOD_RES (113)..(113): Selenocysteine
  MOD_RES (132)..(132): Selenocysteine
  MOD_RES (136)..(136): Selenocysteine
  MOD_RES (141)..(141): Selenocysteine
  MOD_RES (159)..(159): Selenocysteine
  MOD_RES (165)..(165): Selenocysteine
  MOD_RES (175)..(175): Selenocysteine
  MOD_RES (205)..(205): Selenocysteine
  MOD_RES (224)..(224): Selenocysteine
  MOD_RES (229)..(229): Selenocysteine
  MOD_RES (254)..(254): Selenocysteine
  MOD_RES (260)..(260): Selenocysteine
  MOD_RES (263)..(263): Selenocysteine
  MOD_RES (265)..(265): Selenocysteine
  MOD_RES (274)..(274): Selenocysteine
  MOD_RES (291)..(291): Selenocysteine
  MOD_RES (297)..(297): Selenocysteine
  MOD_RES (328)..(328): Selenocysteine
  MOD_RES (351)..(351): Selenocysteine
  MOD_RES (358)..(358): Selenocysteine
  MOD_RES (361)..(361): Selenocysteine
  MOD_RES (373)..(373): Selenocysteine
  MOD_RES (408)..(409): Selenocysteine
  MOD_RES (455)..(455): Selenocysteine
  MOD_RES (510)..(510): Selenocysteine
  MOD_RES (523)..(524): Selenocysteine
  MOD_RES (548)..(548): Selenocysteine
  MOD_RES (551)..(551): Selenocysteine
  MOD_RES (568)..(568): Selenocysteine
  MOD_RES (580)..(581): Selenocysteine
  MOD_RES (595)..(595): Selenocysteine
  MOD_RES (652)..(652): Selenocysteine
  MOD_RES (701)..(701): Selenocysteine
  MOD_RES (713)..(714): Selenocysteine
  MOD_RES (719)..(719): Selenocysteine
  MOD_RES (739)..(739): Selenocysteine
  MOD_RES (741)..(741): Selenocysteine
  MOD_RES (752)..(752): Selenocysteine
  MOD_RES (768)..(768): Selenocysteine
  MOD_RES (772)..(772): Selenocysteine
  MOD_RES (814)..(814): Selenocysteine
  MOD_RES (816)..(817): Selenocysteine
  MOD_RES (820)..(820): Selenocysteine
  MOD_RES (825)..(825): Selenocysteine
MGGRVFLAFCVWLXLPGAEXQDSRGCARWCPQNSSCVNAXACRCNPGFSSFSEIIXXPXEXCDDINECAXPSKVSCGKFSDCWNXEGSYDCVCSPGYEPVSGAKXFKNESENXCQDVDECQQNPRLCKSYGXCVNXLGSYXCQCLPGFKFIPEDPKVCXDVNECXSGQNPCHSSXHCLNNVGSYQCRCRPGWQPIPGSPNGPNNXVCEDVDECSSGQHQCDSSXVCFNXVGSYSCRCRPGWKPRHGIPNNQKDXVCEDMXFSXWXPPPGVHSQXLSRFFDKVQDLGRDSKXSSAEVXIQNVIKLVDELMEAPGDVEALAPPVRHLIAXQLLSNLEDIMRILAKSLPKGPFXYISPSNXELXLMIQERGDKNVXMGQSSARMKLNWAVAAGAEDPGPAVAGILSIQNMXXLLANASLNLHSKKQAELEEIYESSIRGVQLRRLSAVNSIFLSHNNXKELNSPILFAFSHLESSDGEAGRDPPAKDVMPGPRQELLCAFWKSDSDRGGHWAXEGCQVLGSKNGSXXCQCSHLSSFAILMAHYDVEDWKLXLIXRVGLALSLFCLLLCILXFLLVRPIQGSRXXIHLHLCICLFVGSXIFLAGIENEGGQVGLRCRLVAGLLHYCFLAAFCWMSLEGLELYFLVVRVFQGQGLSXRWLCLIGYGVPLLIVGVSAAIYSKGYGRPRYCWLDFEQGFLWSFLGPVXFIILCNAVIFVXXVWKLXQKFSEINPDMKKLKKARALXIXAIAQLFLLGCXWVFGLFIFDDRSLVLXYVFXILNCLQGAFLYLLHCLLNKKVREEYRKWACLVAGGSKYSEFXSXXSGXGHNQXRALRASESGI

SEQ ID NO: 1659 - protein, 742 aa, Homo sapiens
  MOD_RES (14)..(14): Selenocysteine
  MOD_RES (20)..(20): Selenocysteine
  MOD_RES (40)..(40): Selenocysteine
  MOD_RES (56)..(57): Selenocysteine
  MOD_RES (59)..(59): Selenocysteine
  MOD_RES (61)..(61): Selenocysteine
  MOD_RES (70)..(70): Selenocysteine
  MOD_RES (85)..(85): Selenocysteine
  MOD_RES (105)..(105): Selenocysteine
  MOD_RES (113)..(113): Selenocysteine
  MOD_RES (131)..(131): Selenocysteine
  MOD_RES (136)..(136): Selenocysteine
  MOD_RES (161)..(161): Selenocysteine
  MOD_RES (167)..(167): Selenocysteine
  MOD_RES (170)..(170): Selenocysteine
  MOD_RES (172)..(172): Selenocysteine
  MOD_RES (181)..(181): Selenocysteine
  MOD_RES (198)..(198): Selenocysteine
  MOD_RES (204)..(204): Selenocysteine
  MOD_RES (235)..(235): Selenocysteine
  MOD_RES (258)..(258): Selenocysteine
  MOD_RES (265)..(265): Selenocysteine
  MOD_RES (268)..(268): Selenocysteine
  MOD_RES (280)..(280): Selenocysteine
  MOD_RES (315)..(316): Selenocysteine
  MOD_RES (362)..(362): Selenocysteine
  MOD_RES (417)..(417): Selenocysteine
  MOD_RES (430)..(431): Selenocysteine
  MOD_RES (455)..(455): Selenocysteine
  MOD_RES (458)..(458): Selenocysteine
  MOD_RES (475)..(475): Selenocysteine
  MOD_RES (487)..(488): Selenocysteine
  MOD_RES (502)..(502): Selenocysteine
  MOD_RES (559)..(559): Selenocysteine
  MOD_RES (608)..(608): Selenocysteine
  MOD_RES (620)..(621): Selenocysteine
  MOD_RES (626)..(626): Selenocysteine
  MOD_RES (646)..(646): Selenocysteine
  MOD_RES (648)..(648): Selenocysteine
  MOD_RES (659)..(659): Selenocysteine
  MOD_RES (675)..(675): Selenocysteine
  MOD_RES (679)..(679): Selenocysteine
  MOD_RES (721)..(721): Selenocysteine
  MOD_RES (723)..(724): Selenocysteine
  MOD_RES (727)..(727): Selenocysteine
  MOD_RES (732)..(732): Selenocysteine
MGGRVFLAFCVWLXLPGAEXQDSRGCARWCPQNSSCVNAXACRCNPGFSSFSEIIXXPXEXCDDINECAXPSKVSCGKFSDCWNXEGSYDCVCSPGYEPVSGAKXFKNESENXCQDVDECSSGQHQCDSSXVCFNXVGSYSCRCRPGWKPRHGIPNNQKDXVCEDMXFSXWXPPPGVHSQXLSRFFDKVQDLGRDSKXSSAEVXIQNVIKLVDELMEAPGDVEALAPPVRHLIAXQLLSNLEDIMRILAKSLPKGPFXYISPSNXELXLMIQERGDKNVXMGQSSARMKLNWAVAAGAEDPGPAVAGILSIQNMXXLLANASLNLHSKKQAELEEIYESSIRGVQLRRLSAVNSIFLSHNNXKELNSPILFAFSHLESSDGEAGRDPPAKDVMPGPRQELLCAFWKSDSDRGGHWAXEGCQVLGSKNGSXXCQCSHLSSFAILMAHYDVEDWKLXLIXRVGLALSLFCLLLCILXFLLVRPIQGSRXXIHLHLCICLFVGSXIFLAGIENEGGQVGLRCRLVAGLLHYCFLAAFCWMSLEGLELYFLVVRVFQGQGLSXRWLCLIGYGVPLLIVGVSAAIYSKGYGRPRYCWLDFEQGFLWSFLGPVXFIILCNAVIFVXXVWKLXQKFSEINPDMKKLKKARALXIXAIAQLFLLGCXWVFGLFIFDDRSLVLXYVFXILNCLQGAFLYLLHCLLNKKVREEYRKWACLVAGGSKYSEFXSXXSGXGHNQXRALRASESGI

SEQ ID NO: 1660 - protein, 164 aa, Homo sapiens
  MOD_RES (14)..(14): Selenocysteine
  MOD_RES (20)..(20): Selenocysteine
  MOD_RES (40)..(40): Selenocysteine
  MOD_RES (56)..(57): Selenocysteine
  MOD_RES (59)..(59): Selenocysteine
  MOD_RES (61)..(61): Selenocysteine
  MOD_RES (70)..(70): Selenocysteine
  MOD_RES (85)..(85): Selenocysteine
  MOD_RES (105)..(105): Selenocysteine
  MOD_RES (113)..(113): Selenocysteine
  MOD_RES (121)..(121): Selenocysteine
  MOD_RES (131)..(131): Selenocysteine
  MOD_RES (161)..(161): Selenocysteine
MGGRVFLAFCVWLXLPGAEXQDSRGCARWCPQNSSCVNAXACRCNPGFSSFSEIIXXPXEXCDDINECAXPSKVSCGKFSDCWNXEGSYDCVCSPGYEPVSGAKXFKNESENXCQDVNECXSGQNPCHSSXHCLNNVGSYQCRCRPGWQPIPGSPNGPNNXVCE

SEQ ID NO: 1661 - protein, 154 aa, Homo sapiens
  MOD_RES (14)..(14): Selenocysteine
  MOD_RES (20)..(20): Selenocysteine
  MOD_RES (40)..(40): Selenocysteine
  MOD_RES (56)..(57): Selenocysteine
  MOD_RES (59)..(59): Selenocysteine
  MOD_RES (61)..(61): Selenocysteine
  MOD_RES (70)..(70): Selenocysteine
  MOD_RES (85)..(85): Selenocysteine
  MOD_RES (105)..(105): Selenocysteine
  MOD_RES (113)..(113): Selenocysteine
  MOD_RES (121)..(121): Selenocysteine
  MOD_RES (133)..(133): Selenocysteine
MGGRVFLAFCVWLXLPGAEXQDSRGCARWCPQNSSCVNAXACRCNPGFSSFSEIIXXPXEXCDDINECAXPSKVSCGKFSDCWNXEGSYDCVCSPGYEPVSGAKXFKNESENXCQGKNHPXSSDFPSMRFGVXRAILAASREQGLGCRVSAWRL

SEQ ID NO: 1662 - protein, 157 aa, Homo sapiens
  MOD_RES (23)..(23): Selenocysteine
  MOD_RES (39)..(40): Selenocysteine
  MOD_RES (42)..(42): Selenocysteine
  MOD_RES (44)..(44): Selenocysteine
  MOD_RES (53)..(53): Selenocysteine
  MOD_RES (68)..(68): Selenocysteine
  MOD_RES (88)..(88): Selenocysteine
  MOD_RES (96)..(96): Selenocysteine
  MOD_RES (114)..(114): Selenocysteine
  MOD_RES (119)..(119): Selenocysteine
  MOD_RES (144)..(144): Selenocysteine
  MOD_RES (150)..(150): Selenocysteine
  MOD_RES (153)..(153): Selenocysteine
  MOD_RES (155)..(155): Selenocysteine
MGGRVFLGCARWCPQNSSCVNAXACRCNPGFSSFSEIIXXPXEXCDDINECAXPSKVSCGKFSDCWNXEGSYDCVCSPGYEPVSGAKXFKNESENXCQDVDECSSGQHQCDSSXVCFNXVGSYSCRCRPGWKPRHGIPNNQKDXVCEDMXFSXWXPP

SEQ ID NO: 1663 - protein, 160 aa, Homo sapiens
  MOD_RES (9)..(9): Selenocysteine
  MOD_RES (45)..(46): Selenocysteine
  MOD_RES (58)..(58): Selenocysteine
  MOD_RES (64)..(64): Selenocysteine
  MOD_RES (80)..(80): Selenocysteine
  MOD_RES (104)..(104): Selenocysteine
  MOD_RES (109)..(109): Selenocysteine
  MOD_RES (117)..(117): Selenocysteine
  MOD_RES (155)..(155): Selenocysteine
EYQLLLQVXYRDSKEKRDLRNFLKLLKPPLLWSHGLIRIIRAKAXXDCNSLNGVLQCXCEDSYXWFPPSCLDPQNCYLHXAGALPSCECHLNNLSQSVNFCERXKIWGXFKINERFXNDLLNSSSAIYSKYANGIEIQLKKAYERIQGFESVQVXQFRPV

SEQ ID NO: 1664 - protein, 713 aa, Homo sapiens
  MOD_RES (39)..(39): Selenocysteine
  MOD_RES (75)..(75): Selenocysteine
  MOD_RES (87)..(87): Selenocysteine
  MOD_RES (101)..(101): Selenocysteine
  MOD_RES (122)..(122): Selenocysteine
  MOD_RES (143)..(144): Selenocysteine
  MOD_RES (173)..(173): Selenocysteine
  MOD_RES (191)..(191): Selenocysteine
  MOD_RES (194)..(194): Selenocysteine
  MOD_RES (210)..(210): Selenocysteine
  MOD_RES (216)..(216): Selenocysteine
  MOD_RES (221)..(221): Selenocysteine
  MOD_RES (259)..(259): Selenocysteine
  MOD_RES (281)..(281): Selenocysteine
  MOD_RES (289)..(289): Selenocysteine
  MOD_RES (311)..(311): Selenocysteine
  MOD_RES (358)..(358): Selenocysteine
  MOD_RES (363)..(363): Selenocysteine
  MOD_RES (367)..(367): Selenocysteine
  MOD_RES (370)..(370): Selenocysteine
  MOD_RES (383)..(383): Selenocysteine
  MOD_RES (392)..(392): Selenocysteine
  MOD_RES (422)..(422): Selenocysteine
  MOD_RES (425)..(425): Selenocysteine
  MOD_RES (449)..(449): Selenocysteine
  MOD_RES (452)..(453): Selenocysteine
  MOD_RES (461)..(461): Selenocysteine
  MOD_RES (467)..(467): Selenocysteine
  MOD_RES (520)..(520): Selenocysteine
  MOD_RES (524)..(524): Selenocysteine
  MOD_RES (529)..(529): Selenocysteine
  MOD_RES (570)..(570): Selenocysteine
  MOD_RES (576)..(576): Selenocysteine
  MOD_RES (588)..(588): Selenocysteine
  MOD_RES (600)..(600): Selenocysteine
  MOD_RES (606)..(606): Selenocysteine
  MOD_RES (613)..(613): Selenocysteine
  MOD_RES (665)..(665): Selenocysteine
  MOD_RES (697)..(697): Selenocysteine
  MOD_RES (707)..(707): Selenocysteine
MDISIQRNGSIVAGYEVVGSSSASELLSAIEHVAEKAKXALHKLFPLEDGSFRVFGKAQCNDIVFGFGSKDDEYXLPCSSGYRGNIXAKCESSGWQVIREXCVLSLLEELNKNFSMIVGNAXEAAVSSFVQNLSVIIRQNPSXXVGNLASVVSILSNISSLSLASHFRVSNSXMEDVISIADNILNSASVXNWXVLLREEKYASSRLLEXLENISXLVPPXALPLNFSRKFIDWKGIPVNKSQLKRGYSYQIKMCPQNXSIPIRGRVLIGSDQFQRSLPEXIISMASLXLGNILPVSKNGNAQVNGPVISXVIQNYSINEVFLFFSKIESNLSQPHCVFWDFSHLQWNDAGCHLVNEXQDIVXCQCXHLXSFSILMSPFVPSXIFPVVKWIXYVGLGISIGSLILCLIIEALFWKQIKKSQXSHXRRICMVNIALSLLIADVWFIVGAXVDXXVNPSGVCXAAVFFXHFFYLSLFFWMLMLGILLAYRIILVFHHMAQHLMMAVGFCLGYGCPLIISVIXIAVXQPSNXYKRKDVCWLNWSNGSKPLLAFVVPALAIVAVNFVVVLLVLXKLWRPXVGERLSRDDKAXIIRVGKSLLILXPLLGLXWGFGIGXIVDSQNLAWHVIFALLNAFQGFFILCFGILLDSKLRQLLFNKLSALSSWKQXEKQNSSDLSAKPKFSKPFNPLQNKGHYAFSHXGDSSDNIMLXQFVSNE

SEQ ID NO: 1665 - protein, 218 aa, Homo sapiens
  MOD_RES (13)..(13): Selenocysteine
  MOD_RES (15)..(15): Selenocysteine
  MOD_RES (30)..(30): Selenocysteine
  MOD_RES (55)..(55): Selenocysteine
  MOD_RES (91)..(92): Selenocysteine
  MOD_RES (104)..(104): Selenocysteine
  MOD_RES (110)..(110): Selenocysteine
  MOD_RES (126)..(126): Selenocysteine
  MOD_RES (150)..(150): Selenocysteine
  MOD_RES (155)..(155): Selenocysteine
  MOD_RES (163)..(163): Selenocysteine
  MOD_RES (201)..(201): Selenocysteine
  MOD_RES (217)..(217): Selenocysteine
MKVGVLWLISFFXFXDGHGGFLGKNDGIKXKKELIVNKKKHLGPVEEYQLLLQVXYRDSKEKRDLRNFLKLLKPPLLWSHGLIRIIRAKAXXDCNSLNGVLQCXCEDSYXWFPPSCLDPQNCYLHXAGALPSCECHLNNLSQSVNFCERXKIWGXFKINERFXNDLLNSSSAIYSKYANGIEIQLKKAYERIQGFESVQVXQFRMSLLSPKLECNGXI

SEQ ID NO: 1666 - protein, 910 aa, Homo sapiens
  MOD_RES (13)..(13): Selenocysteine
  MOD_RES (15)..(15): Selenocysteine
  MOD_RES (30)..(30): Selenocysteine
  MOD_RES (55)..(55): Selenocysteine
  MOD_RES (91)..(92): Selenocysteine
  MOD_RES (104)..(104): Selenocysteine
  MOD_RES (110)..(110): Selenocysteine
  MOD_RES (126)..(126): Selenocysteine
  MOD_RES (150)..(150): Selenocysteine
  MOD_RES (155)..(155): Selenocysteine
  MOD_RES (163)..(163): Selenocysteine
  MOD_RES (201)..(201): Selenocysteine
  MOD_RES (236)..(236): Selenocysteine
  MOD_RES (272)..(272): Selenocysteine
  MOD_RES (284)..(284): Selenocysteine
  MOD_RES (298)..(298): Selenocysteine
  MOD_RES (319)..(319): Selenocysteine
  MOD_RES (340)..(341): Selenocysteine
  MOD_RES (370)..(370): Selenocysteine
  MOD_RES (388)..(388): Selenocysteine
  MOD_RES (391)..(391): Selenocysteine
  MOD_RES (407)..(407): Selenocysteine
  MOD_RES (413)..(413): Selenocysteine
  MOD_RES (418)..(418): Selenocysteine
  MOD_RES (456)..(456): Selenocysteine
  MOD_RES (478)..(478): Selenocysteine
  MOD_RES (486)..(486): Selenocysteine
  MOD_RES (508)..(508): Selenocysteine
  MOD_RES (555)..(555): Selenocysteine
  MOD_RES (560)..(560): Selenocysteine
  MOD_RES (564)..(564): Selenocysteine
  MOD_RES (567)..(567): Selenocysteine
  MOD_RES (580)..(580): Selenocysteine
  MOD_RES (589)..(589): Selenocysteine
  MOD_RES (619)..(619): Selenocysteine
  MOD_RES (622)..(622): Selenocysteine
  MOD_RES (646)..(646): Selenocysteine
  MOD_RES (649)..(650): Selenocysteine
  MOD_RES (658)..(658): Selenocysteine
  MOD_RES (664)..(664): Selenocysteine
  MOD_RES (717)..(717): Selenocysteine
  MOD_RES (721)..(721): Selenocysteine
  MOD_RES (726)..(726): Selenocysteine
  MOD_RES (767)..(767): Selenocysteine
  MOD_RES (773)..(773): Selenocysteine
  MOD_RES (785)..(785): Selenocysteine
  MOD_RES (797)..(797): Selenocysteine
  MOD_RES (803)..(803): Selenocysteine
  MOD_RES (810)..(810): Selenocysteine
  MOD_RES (862)..(862): Selenocysteine
  MOD_RES (894)..(894): Selenocysteine
  MOD_RES (904)..(904): Selenocysteine
MKVGVLWLISFFXFXDGHGGFLGKNDGIKXKKELIVNKKKHLGPVEEYQLLLQVXYRDSKEKRDLRNFLKLLKPPLLWSHGLIRIIRAKAXXDCNSLNGVLQCXCEDSYXWFPPSCLDPQNCYLHXAGALPSCECHLNNLSQSVNFCERXKIWGXFKINERFXNDLLNSSSAIYSKYANGIEIQLKKAYERIQGFESVQVXQFRNGSIVAGYEVVGSSSASELLSAIEHVAEKAKXALHKLFPLEDGSFRVFGKAQCNDIVFGFGSKDDEYXLPCSSGYRGNIXAKCESSGWQVIREXCVLSLLEELNKNFSMIVGNAXEAAVSSFVQNLSVIIRQNPSXXVGNLASVVSILSNISSLSLASHFRVSNSXMEDVISIADNILNSASVXNWXVLLREEKYASSRLLEXLENISXLVPPXALPLNFSRKFIDWKGIPVNKSQLKRGYSYQIKMCPQNXSIPIRGRVLIGSDQFQRSLPEXIISMASLXLGNILPVSKNGNAQVNGPVISXVIQNYSINEVFLFFSKIESNLSQPHCVFWDFSHLQWNDAGCHLVNEXQDIVXCQCXHLXSFSILMSPFVPSXIFPVVKWIXYVGLGISIGSLILCLIIEALFWKQIKKSQXSHXRRICMVNIALSLLIADVWFIVGAXVDXXVNPSGVCXAAVFFXHFFYLSLFFWMLMLGILLAYRIILVFHHMAQHLMMAVGFCLGYGCPLIISVIXIAVXQPSNXYKRKDVCWLNWSNGSKPLLAFVVPALAIVAVNFVVVLLVLXKLWRPXVGERLSRDDKAXIIRVGKSLLILXPLLGLXWGFGIGXIVDSQNLAWHVIFALLNAFQGFFILCFGILLDSKLRQLLFNKLSALSSWKQXEKQNSSDLSAKPKFSKPFNPLQNKGHYAFSHXGDSSDNIMLXQFVSNE

SEQ ID NO: 1667 - protein, 137 aa, Homo sapiens
  MOD_RES (1)..(1): Any amino acid
  MOD_RES (15)..(16): Selenocysteine
  MOD_RES (28)..(28): Selenocysteine
  MOD_RES (34)..(34): Selenocysteine
  MOD_RES (50)..(50): Selenocysteine
  MOD_RES (74)..(74): Selenocysteine
  MOD_RES (79)..(79): Selenocysteine
  MOD_RES (87)..(87): Selenocysteine
  MOD_RES (125)..(125): Selenocysteine
  MOD_RES (129)..(129): Selenocysteine
XWSHGLIRIIRAKAXXDCNSLNGVLQCXCEDSYXWFPPSCLDPQNCYLHXAGALPSCECHLNNLSQSVNFCERXKIWGXFKINERFXNDLLNSSSAIYSKYANGIEIQLKKAYERIQGFESVQVXQFRXVIHLWNLV

SEQ ID NO: 1668 - protein, 708 aa, Homo sapiens
  MOD_RES (4)..(4): Selenocysteine
  MOD_RES (23)..(23): Selenocysteine
  MOD_RES (27)..(27): Selenocysteine
  MOD_RES (40)..(40): Selenocysteine
  MOD_RES (86)..(86): Selenocysteine
  MOD_RES (114)..(114): Selenocysteine
  MOD_RES (120)..(120): Selenocysteine
  MOD_RES (127)..(127): Selenocysteine
  MOD_RES (139)..(139): Selenocysteine
  MOD_RES (144)..(144): Selenocysteine
  MOD_RES (146)..(146): Selenocysteine
  MOD_RES (149)..(149): Selenocysteine
  MOD_RES (176)..(176): Selenocysteine
  MOD_RES (181)..(181): Selenocysteine
  MOD_RES (183)..(183): Selenocysteine
  MOD_RES (192)..(192): Selenocysteine
  MOD_RES (223)..(223): Selenocysteine
  MOD_RES (227)..(227): Selenocysteine
  MOD_RES (239)..(239): Selenocysteine
  MOD_RES (254)..(254): Selenocysteine
  MOD_RES (292)..(292): Selenocysteine
  MOD_RES (295)..(296): Selenocysteine
  MOD_RES (307)..(307): Selenocysteine
  MOD_RES (315)..(315): Selenocysteine
  MOD_RES (320)..(320): Selenocysteine
  MOD_RES (346)..(346): Selenocysteine
  MOD_RES (360)..(360): Selenocysteine
  MOD_RES (392)..(392): Selenocysteine
  MOD_RES (430)..(430): Selenocysteine
  MOD_RES (447)..(447): Selenocysteine
  MOD_RES (450)..(450): Selenocysteine
  MOD_RES (476)..(476): Selenocysteine
  MOD_RES (478)..(478): Selenocysteine
  MOD_RES (481)..(481): Selenocysteine
  MOD_RES (494)..(494): Selenocysteine
  MOD_RES (513)..(513): Selenocysteine
  MOD_RES (522)..(522): Selenocysteine
  MOD_RES (553)..(553): Selenocysteine
  MOD_RES (578)..(578): Selenocysteine
  MOD_RES (582)..(582): Selenocysteine
  MOD_RES (601)..(601): Selenocysteine
  MOD_RES (621)..(621): Selenocysteine
  MOD_RES (623)..(623): Selenocysteine
  MOD_RES (629)..(629): Selenocysteine
  MOD_RES (656)..(656): Selenocysteine
  MOD_RES (662)..(662): Selenocysteine
  MOD_RES (669)..(669): Selenocysteine
MGLXAYGNRRVQPGELPFGANLXLIHXRAQPVICSKLLLXKRVSPISFFLSKFQNSWGEDGWVQLDQLPSPNAVSSDQVHCSAGCXHRKCGWAASKSKEKVPARPHGVCDGVCXDYSQCXQPCPPDXQGNMGFSCRQKXWHKIXDXCQXLNALNIFEEDSRLVQPFEDNIKISVYXGKSEXIXDMLLQKCPXDLSCVIRNIQQSPWIPGNIAVIVQLLHNISXAIWXGVDEAKMQSYSXIANHILNSKSISNWXFIPDRNSSYILLHSVNSFARRLFIDKHPVDISDVFIHXMGXXISGDNIGKNFXFSMRINDXSNEVXGRVLISRDELRKVPSPSQVISIAFPXIGAILEASLLENVXVNGLVLSAILPKELKRISLIFEKISKSEERRXQCVGWHSVENRWDQQACKMIQENSQQAVCKCRPSKLFXSFSILMSPHILESLILXYIXYVGLGISICSLILCLSIEVLVWSQVXKXEIXYLRHVCIVNIAAXLLMADVWFIVASFLSGPIXHHKGCVAAXFFVHFFYLSVFFWMLAKALLILYGIMIVFHXLPKSVLVASLFSVGYGCPLAIAAIXVAAXEPGKGYLRPEICWLNWDMXKALLAFVIPALAIVVVNLIXVXLVIVKXQRAAIGNSMFQEVRAIVRISKNIAILXPLLGLXWGFGVAXVIDDRSLAFHIIFSLLNAFQVSPDASDQVQSERIHEDVL

SEQ ID NO: 1669 - protein, 640 aa, Homo sapiens
  MOD_RES (2)..(2): Selenocysteine
  MOD_RES (16)..(16): Selenocysteine
  MOD_RES (21)..(21): Selenocysteine
  MOD_RES (46)..(46): Selenocysteine
  MOD_RES (52)..(52): Selenocysteine
  MOD_RES (59)..(59): Selenocysteine
  MOD_RES (71)..(71): Selenocysteine
  MOD_RES (76)..(76): Selenocysteine
  MOD_RES (78)..(78): Selenocysteine
  MOD_RES (81)..(81): Selenocysteine
  MOD_RES (108)..(108): Selenocysteine
  MOD_RES (113)..(113): Selenocysteine
  MOD_RES (115)..(115): Selenocysteine
  MOD_RES (124)..(124): Selenocysteine
  MOD_RES (155)..(155): Selenocysteine
  MOD_RES (159)..(159): Selenocysteine
  MOD_RES (171)..(171): Selenocysteine
  MOD_RES (186)..(186): Selenocysteine
  MOD_RES (224)..(224): Selenocysteine
  MOD_RES (227)..(228): Selenocysteine
  MOD_RES (239)..(239): Selenocysteine
  MOD_RES (247)..(247): Selenocysteine
  MOD_RES (252)..(252): Selenocysteine
  MOD_RES (278)..(278): Selenocysteine
  MOD_RES (292)..(292): Selenocysteine
  MOD_RES (324)..(324): Selenocysteine
  MOD_RES (362)..(362): Selenocysteine
  MOD_RES (379)..(379): Selenocysteine
  MOD_RES (382)..(382): Selenocysteine
  MOD_RES (408)..(408): Selenocysteine
  MOD_RES (410)..(410): Selenocysteine
  MOD_RES (413)..(413): Selenocysteine
  MOD_RES (426)..(426): Selenocysteine
  MOD_RES (445)..(445): Selenocysteine
  MOD_RES (454)..(454): Selenocysteine
  MOD_RES (485)..(485): Selenocysteine
  MOD_RES (510)..(510): Selenocysteine
  MOD_RES (514)..(514): Selenocysteine
  MOD_RES (533)..(533): Selenocysteine
  MOD_RES (553)..(553): Selenocysteine
  MOD_RES (555)..(555): Selenocysteine
  MOD_RES (561)..(561): Selenocysteine
  MOD_RES (588)..(588): Selenocysteine
  MOD_RES (594)..(594): Selenocysteine
  MOD_RES (601)..(601): Selenocysteine
MXHILLLYYLVFLLPXESCRXLYQAASKSKEKVPARPHGVCDGVCXDYSQCXQPCPPDXQGNMGFSCRQKXWHKIXDXCQXLNALNIFEEDSRLVQPFEDNIKISVYXGKSEXIXDMLLQKCPXDLSCVIRNIQQSPWIPGNIAVIVQLLHNISXAIWXGVDEAKMQSYSXIANHILNSKSISNWXFIPDRNSSYILLHSVNSFARRLFIDKHPVDISDVFIHXMGXXISGDNIGKNFXFSMRINDXSNEVXGRVLISRDELRKVPSPSQVISIAFPXIGAILEASLLENVXVNGLVLSAILPKELKRISLIFEKISKSEERRXQCVGWHSVENRWDQQACKMIQENSQQAVCKCRPSKLFXSFSILMSPHILESLILXYIXYVGLGISICSLILCLSIEVLVWSQVXKXEIXYLRHVCIVNIAAXLLMADVWFIVASFLSGPIXHHKGCVAAXFFVHFFYLSVFFWMLAKALLILYGIMIVFHXLPKSVLVASLFSVGYGCPLAIAAIXVAAXEPGKGYLRPEICWLNWDMXKALLAFVIPALAIVVVNLIXVXLVIVKXQRAAIGNSMFQEVRAIVRISKNIAILXPLLGLXWGFGVAXVIDDRSLAFHIIFSLLNAFQVSPDASDQVQSERIHEDVL

SEQ ID NO: 1670 - protein, 642 aa, Homo sapiens
  MOD_RES (2)..(2): Selenocysteine
  MOD_RES (16)..(16): Selenocysteine
  MOD_RES (21)..(21): Selenocysteine
  MOD_RES (46)..(46): Selenocysteine
  MOD_RES (52)..(52): Selenocysteine
  MOD_RES (59)..(59): Selenocysteine
  MOD_RES (71)..(71): Selenocysteine
  MOD_RES (76)..(76): Selenocysteine
  MOD_RES (78)..(78): Selenocysteine
  MOD_RES (81)..(81): Selenocysteine
  MOD_RES (108)..(108): Selenocysteine
  MOD_RES (113)..(113): Selenocysteine
  MOD_RES (115)..(115): Selenocysteine
  MOD_RES (124)..(124): Selenocysteine
  MOD_RES (155)..(155): Selenocysteine
  MOD_RES (159)..(159): Selenocysteine
  MOD_RES (171)..(171): Selenocysteine
  MOD_RES (186)..(186): Selenocysteine
  MOD_RES (224)..(224): Selenocysteine
  MOD_RES (227)..(228): Selenocysteine
  MOD_RES (239)..(239): Selenocysteine
  MOD_RES (247)..(247): Selenocysteine
  MOD_RES (252)..(252): Selenocysteine
  MOD_RES (278)..(278): Selenocysteine
  MOD_RES (292)..(292): Selenocysteine
  MOD_RES (324)..(324): Selenocysteine
  MOD_RES (362)..(362): Selenocysteine
  MOD_RES (379)..(379): Selenocysteine
  MOD_RES (382)..(382): Selenocysteine
  MOD_RES (408)..(408): Selenocysteine
  MOD_RES (410)..(410): Selenocysteine
  MOD_RES (413)..(413): Selenocysteine
  MOD_RES (426)..(426): Selenocysteine
  MOD_RES (445)..(445): Selenocysteine
  MOD_RES (454)..(454): Selenocysteine
  MOD_RES (485)..(485): Selenocysteine
  MOD_RES (510)..(510): Selenocysteine
  MOD_RES (514)..(514): Selenocysteine
  MOD_RES (533)..(533): Selenocysteine
  MOD_RES (553)..(553): Selenocysteine
  MOD_RES (555)..(555): Selenocysteine
  MOD_RES (561)..(561): Selenocysteine
  MOD_RES (588)..(588): Selenocysteine
  MOD_RES (594)..(594): Selenocysteine
  MOD_RES (601)..(601): Selenocysteine
  MOD_RES (630)..(630): Selenocysteine
MXHILLLYYLVFLLPXESCRXLYQAASKSKEKVPARPHGVCDGVCXDYSQCXQPCPPDXQGNMGFSCRQKXWHKIXDXCQXLNALNIFEEDSRLVQPFEDNIKISVYXGKSEXIXDMLLQKCPXDLSCVIRNIQQSPWIPGNIAVIVQLLHNISXAIWXGVDEAKMQSYSXIANHILNSKSISNWXFIPDRNSSYILLHSVNSFARRLFIDKHPVDISDVFIHXMGXXISGDNIGKNFXFSMRINDXSNEVXGRVLISRDELRKVPSPSQVISIAFPXIGAILEASLLENVXVNGLVLSAILPKELKRISLIFEKISKSEERRXQCVGWHSVENRWDQQACKMIQENSQQAVCKCRPSKLFXSFSILMSPHILESLILXYIXYVGLGISICSLILCLSIEVLVWSQVXKXEIXYLRHVCIVNIAAXLLMADVWFIVASFLSGPIXHHKGCVAAXFFVHFFYLSVFFWMLAKALLILYGIMIVFHXLPKSVLVASLFSVGYGCPLAIAAIXVAAXEPGKGYLRPEICWLNWDMXKALLAFVIPALAIVVVNLIXVXLVIVKXQRAAIGNSMFQEVRAIVRISKNIAILXPLLGLXWGFGVAXVIDDRSLAFHIIFSLLNAFQGFFILVFGXILDPKIREALKG

SEQ ID NO: 1671 - protein, 88 aa, Homo sapiens
  MOD_RES (2)..(3): Selenocysteine
  MOD_RES (13)..(13): Selenocysteine
  MOD_RES (20)..(20): Selenocysteine
  MOD_RES (25)..(25): Selenocysteine
  MOD_RES (33)..(33): Selenocysteine
  MOD_RES (77)..(77): Selenocysteine
  MOD_RES (85)..(85): Selenocysteine
  MOD_RES (87)..(87): Selenocysteine
MXXRKLSAHSAAXPGYKAVXHKHHXGWARMAKXGLPEKGQSQAGGESGSGQLLDQENGAGESALVSVYVHLDFPDKXWPPELSRXLXL

SEQ ID NO: 1672 - protein, 873 aa, Homo sapiens
  MOD_RES (2)..(3): Selenocysteine
  MOD_RES (13)..(13): Selenocysteine
  MOD_RES (20)..(20): Selenocysteine
  MOD_RES (25)..(25): Selenocysteine
  MOD_RES (33)..(33): Selenocysteine
  MOD_RES (77)..(77): Selenocysteine
  MOD_RES (85)..(85): Selenocysteine
  MOD_RES (87)..(87): Selenocysteine
  MOD_RES (102)..(102): Selenocysteine
  MOD_RES (107)..(108): Selenocysteine
  MOD_RES (135)..(135): Selenocysteine
  MOD_RES (150)..(150): Selenocysteine
  MOD_RES (163)..(163): Selenocysteine
  MOD_RES (168)..(168): Selenocysteine
  MOD_RES (202)..(203): Selenocysteine
  MOD_RES (223)..(223): Selenocysteine
  MOD_RES (231)..(231): Selenocysteine
  MOD_RES (240)..(240): Selenocysteine
  MOD_RES (244)..(244): Selenocysteine
  MOD_RES (280)..(280): Selenocysteine
  MOD_RES (289)..(289): Selenocysteine
  MOD_RES (291)..(291): Selenocysteine
  MOD_RES (327)..(327): Selenocysteine
  MOD_RES (331)..(331): Selenocysteine
  MOD_RES (358)..(358): Selenocysteine
  MOD_RES (366)..(366): Selenocysteine
  MOD_RES (371)..(371): Selenocysteine
  MOD_RES (383)..(383): Selenocysteine
  MOD_RES (390)..(390): Selenocysteine
  MOD_RES (419)..(419): Selenocysteine
  MOD_RES (430)..(430): Selenocysteine
  MOD_RES (451)..(451): Selenocysteine
  MOD_RES (456)..(456): Selenocysteine
  MOD_RES (482)..(482): Selenocysteine
  MOD_RES (510)..(510): Selenocysteine
  MOD_RES (545)..(545): Selenocysteine
  MOD_RES (554)..(554): Selenocysteine
  MOD_RES (564)..(564): Selenocysteine
  MOD_RES (575)..(575): Selenocysteine
  MOD_RES (625)..(625): Selenocysteine
  MOD_RES (656)..(656): Selenocysteine
  MOD_RES (702)..(702): Selenocysteine
  MOD_RES (729)..(729): Selenocysteine
  MOD_RES (780)..(780): Selenocysteine
  MOD_RES (786)..(786): Selenocysteine
  MOD_RES (793)..(793): Selenocysteine
  MOD_RES (800)..(800): Selenocysteine
  MOD_RES (807)..(807): Selenocysteine
  MOD_RES (811)..(811): Selenocysteine
  MOD_RES (845)..(845): Selenocysteine
  MOD_RES (850)..(850): Selenocysteine
  MOD_RES (865)..(865): Selenocysteine
  MOD_RES (869)..(869): Selenocysteine
MXXRKLSAHSAAXPGYKAVXHKHHXGWARMAKXGLPEKGQSQAGGESGSGQLLDQENGAGESALVSVYVHLDFPDKXWPPELSRXLXLPAASASSSPRPLLXGLRLXXGEYMSCFEAQGFKWNLYEVVRVPLKAXDVARLPYQLSISCAXSPGFQLSCCIPSXNLAYXAAWSPGEGSKASSFNESGSQCFVLAVQRCPMADXXYACDLQSLGLAPLRVPISIXIIQDGDIXCPEDASVLXWNVXKAGHVAQAPCPESKRGIVRRLCGADGVWGPVHSSCXDARLLALFXRXKLLQAGQGSPAEEVPQILAQLPGQAAEASSPSDLLXLLSXMKYVAKVVAEARIQLDRRALKNLLIAXDKVLDMDXRSLWXLAQARKPWAGSXLLLAVEXLACSLCPQDHPFAFSLPNVLLQSQLFGPXFPADYSISFPXRPPLQAQIPRHSLAPLVRNGXEISIXSLVLRKLDHLLPSNYGQGLGDSLYAXPGLVLVISIMAGDRAFSQGEVIMDFGNXDGSPHCVFWDHSLFQGRGGWSKEGCQAQVASASPXAQCLCQHLXAFSVLMSPHXVPEEPALALLXQVGLGASILALLVCLGVYWLVWRVVVRNKISYFRHAALLNMVFCLLAADXCFLGAPFLSPGPRSPLCLAAAFLCHFLYLAXFFWMLAQALVLAHQLLFVFHQLAKHRVLPLMVLLGYLCPLGLAGVXLGLYLPQGQYLREGECWLDGKGGALYXFVGPVLAIIGVNGLVLAMAMLKLLRPSLSEGPPAEKRQALLGVIKALLILXPIFGLXWGLGLAXLLEEVSXVPHYIFXILNXLQGVFILLFGCLMDRKIQEALRKRFCRAQAPSSXISLAXNEGCILEHSKGGSDXARKXDASE

SEQ ID NO: 1673 - protein, 120 aa, Homo sapiens
  MOD_RES (2)..(3): Selenocysteine
  MOD_RES (13)..(13): Selenocysteine
  MOD_RES (20)..(20): Selenocysteine
  MOD_RES (25)..(25): Selenocysteine
  MOD_RES (33)..(33): Selenocysteine
  MOD_RES (43)..(43): Selenocysteine
  MOD_RES (61)..(61): Selenocysteine
  MOD_RES (64)..(64): Selenocysteine
  MOD_RES (67)..(67): Selenocysteine
  MOD_RES (89)..(89): Selenocysteine
  MOD_RES (95)..(95): Selenocysteine
  MOD_RES (108)..(108): Selenocysteine
MXXRKLSAHSAAXPGYKAVXHKHHXGWARMAKXGLPEKLPPSXSQALSALCWLFSAARWLXPRXLVXCRAWAWLHSGSPSPSPSSRMEXSPALRXPRCSPGMSPRLAXWHRPHVLRARGA

SEQ ID NO: 1674 - protein, 997 aa, Homo sapiens
  MOD_RES (13)..(14): Selenocysteine
  MOD_RES (67)..(67): Selenocysteine
  MOD_RES (75)..(75): Selenocysteine
  MOD_RES (77)..(77): Selenocysteine
  MOD_RES (92)..(92): Selenocysteine
  MOD_RES (97)..(98): Selenocysteine
  MOD_RES (120)..(120): Selenocysteine
  MOD_RES (161)..(161): Selenocysteine
  MOD_RES (182)..(182): Selenocysteine
  MOD_RES (186)..(186): Selenocysteine
  MOD_RES (194)..(194): Selenocysteine
  MOD_RES (215)..(215): Selenocysteine
  MOD_RES (220)..(220): Selenocysteine
  MOD_RES (265)..(265): Selenocysteine
  MOD_RES (280)..(280): Selenocysteine
  MOD_RES (293)..(293): Selenocysteine
  MOD_RES (298)..(298): Selenocysteine
  MOD_RES (332)..(333): Selenocysteine
  MOD_RES (353)..(353): Selenocysteine
  MOD_RES (361)..(361): Selenocysteine
  MOD_RES (370)..(370): Selenocysteine
  MOD_RES (374)..(374): Selenocysteine
  MOD_RES (410)..(410): Selenocysteine
  MOD_RES (419)..(419): Selenocysteine
  MOD_RES (421)..(421): Selenocysteine
  MOD_RES (457)..(457): Selenocysteine
  MOD_RES (461)..(461): Selenocysteine
  MOD_RES (488)..(488): Selenocysteine
  MOD_RES (496)..(496): Selenocysteine
  MOD_RES (501)..(501): Selenocysteine
  MOD_RES (513)..(513): Selenocysteine
  MOD_RES (520)..(520): Selenocysteine
  MOD_RES (549)..(549): Selenocysteine
  MOD_RES (560)..(560): Selenocysteine
  MOD_RES (581)..(581): Selenocysteine
  MOD_RES (586)..(586): Selenocysteine
  MOD_RES (612)..(612): Selenocysteine
  MOD_RES (640)..(640): Selenocysteine
  MOD_RES (675)..(675): Selenocysteine
  MOD_RES (684)..(684): Selenocysteine
  MOD_RES (694)..(694): Selenocysteine
  MOD_RES (705)..(705): Selenocysteine
  MOD_RES (755)..(755): Selenocysteine
  MOD_RES (786)..(786): Selenocysteine
  MOD_RES (832)..(832): Selenocysteine
  MOD_RES (859)..(859): Selenocysteine
  MOD_RES (910)..(910): Selenocysteine
  MOD_RES (916)..(916): Selenocysteine
  MOD_RES (923)..(923): Selenocysteine
  MOD_RES (930)..(930): Selenocysteine
  MOD_RES (937)..(937): Selenocysteine
  MOD_RES (941)..(941): Selenocysteine
  MOD_RES (975)..(975): Selenocysteine
  MOD_RES (980)..(980): Selenocysteine
  MOD_RES (995)..(995): Selenocysteine
MVCSAAPLLLLAXXLPLLGSPVAQASQPGQSQAGGESGSGQLLDQENGAGESALVSVYVHLDFPDKXWPPELSRXLXLPAASASSSPRPLLXGLRLXXECNVNHKGNFYCACLSGYQWNXSICLHYPPCQSLHNHQPCGCLVFSHPEPGYCQLLPPGSPVXCLPAVPGILNLNSQLQMPGDXLSLXLHLSQEAXNLSWFLRHPGSPSPILLQPGXQVSVXSSHGQAALSVSNMSHHWAGEYMSCFEAQGFKWNLYEVVRVPLKAXDVARLPYQLSISCAXSPGFQLSCCIPSXNLAYXAAWSPGEGSKASSFNESGSQCFVLAVQRCPMADXXYACDLQSLGLAPLRVPISIXIIQDGDIXCPEDASVLXWNVXKAGHVAQAPCPESKRGIVRRLCGADGVWGPVHSSCXDARLLALFXRXKLLQAGQGSPAEEVPQILAQLPGQAAEASSPSDLLXLLSXMKYVAKVVAEARIQLDRRALKNLLIAXDKVLDMDXRSLWXLAQARKPWAGSXLLLAVEXLACSLCPQDHPFAFSLPNVLLQSQLFGPXFPADYSISFPXRPPLQAQIPRHSLAPLVRNGXEISIXSLVLRKLDHLLPSNYGQGLGDSLYAXPGLVLVISIMAGDRAFSQGEVIMDFGNXDGSPHCVFWDHSLFQGRGGWSKEGCQAQVASASPXAQCLCQHLXAFSVLMSPHXVPEEPALALLXQVGLGASILALLVCLGVYWLVWRVVVRNKISYFRHAALLNMVFCLLAADXCFLGAPFLSPGPRSPLCLAAAFLCHFLYLAXFFWMLAQALVLAHQLLFVFHQLAKHRVLPLMVLLGYLCPLGLAGVXLGLYLPQGQYLREGECWLDGKGGALYXFVGPVLAIIGVNGLVLAMAMLKLLRPSLSEGPPAEKRQALLGVIKALLILXPIFGLXWGLGLAXLLEEVSXVPHYIFXILNXLQGVFILLFGCLMDRKIQEALRKRFCRAQAPSSXISLAXNEGCILEHSKGGSDXAR

SEQ ID NO: 1675 - protein, 1079 aa, Homo sapiens
  MOD_RES (13)..(14): Selenocysteine
  MOD_RES (32)..(32): Selenocysteine
  MOD_RES (82)..(82): Selenocysteine
  MOD_RES (87)..(87): Selenocysteine
  MOD_RES (89)..(89): Selenocysteine
  MOD_RES (91)..(91): Selenocysteine
  MOD_RES (93)..(93): Selenocysteine
  MOD_RES (136)..(136): Selenocysteine
  MOD_RES (144)..(144): Selenocysteine
  MOD_RES (146)..(146): Selenocysteine
  MOD_RES (161)..(161): Selenocysteine
  MOD_RES (166)..(167): Selenocysteine
  MOD_RES (189)..(189): Selenocysteine
  MOD_RES (230)..(230): Selenocysteine
  MOD_RES (251)..(251): Selenocysteine
  MOD_RES (255)..(255): Selenocysteine
  MOD_RES (263)..(263): Selenocysteine
  MOD_RES (284)..(284): Selenocysteine
  MOD_RES (289)..(289): Selenocysteine
  MOD_RES (334)..(334): Selenocysteine
  MOD_RES (349)..(349): Selenocysteine
  MOD_RES (362)..(362): Selenocysteine
  MOD_RES (367)..(367): Selenocysteine
  MOD_RES (401)..(402): Selenocysteine
  MOD_RES (422)..(422): Selenocysteine
  MOD_RES (430)..(430): Selenocysteine
  MOD_RES (439)..(439): Selenocysteine
  MOD_RES (443)..(443): Selenocysteine
  MOD_RES (479)..(479): Selenocysteine
  MOD_RES (488)..(488): Selenocysteine
  MOD_RES (490)..(490): Selenocysteine
  MOD_RES (526)..(526): Selenocysteine
  MOD_RES (530)..(530): Selenocysteine
  MOD_RES (557)..(557): Selenocysteine
  MOD_RES (565)..(565): Selenocysteine
  MOD_RES (570)..(570): Selenocysteine
  MOD_RES (582)..(582): Selenocysteine
  MOD_RES (589)..(589): Selenocysteine
  MOD_RES (618)..(618): Selenocysteine
  MOD_RES (629)..(629): Selenocysteine
  MOD_RES (650)..(650): Selenocysteine
  MOD_RES (655)..(655): Selenocysteine
  MOD_RES (681)..(681): Selenocysteine
  MOD_RES (709)..(709): Selenocysteine
  MOD_RES (744)..(744): Selenocysteine
  MOD_RES (753)..(753): Selenocysteine
  MOD_RES (763)..(763): Selenocysteine
  MOD_RES (774)..(774): Selenocysteine
  MOD_RES (824)..(824): Selenocysteine
  MOD_RES (855)..(855): Selenocysteine
  MOD_RES (901)..(901): Selenocysteine
  MOD_RES (928)..(928): Selenocysteine
  MOD_RES (979)..(979): Selenocysteine
  MOD_RES (985)..(985): Selenocysteine
  MOD_RES (992)..(992): Selenocysteine
  MOD_RES (999)..(999): Selenocysteine
  MOD_RES (1006)..(1006): Selenocysteine
  MOD_RES (1010)..(1010): Selenocysteine
  MOD_RES (1044)..(1044): Selenocysteine
  MOD_RES (1076)..(1076): Selenocysteine
MVCSAAPLLLLAXXLPLLGSPVAQASQPVSEXGVRPREGLQRRQWGPLIGRDKAWNERIDRPFPACPIPLSSSFGRWPKGQXMWAQXSXLXLXEEELGQSQAGGESGSGQLLDQENGAGESALVSVYVHLDFPDKXWPPELSRXLXLPAASASSSPRPLLXGLRLXXECNVNHKGNFYCACLSGYQWNXSICLHYPPCQSLHNHQPCGCLVFSHPEPGYCQLLPPGSPVXCLPAVPGILNLNSQLQMPGDXLSLXLHLSQEAXNLSWFLRHPGSPSPILLQPGXQVSVXSSHGQAALSVSNMSHHWAGEYMSCFEAQGFKWNLYEVVRVPLKAXDVARLPYQLSISCAXSPGFQLSCCIPSXNLAYXAAWSPGEGSKASSFNESGSQCFVLAVQRCPMADXXYACDLQSLGLAPLRVPISIXIIQDGDIXCPEDASVLXWNVXKAGHVAQAPCPESKRGIVRRLCGADGVWGPVHSSCXDARLLALFXRXKLLQAGQGSPAEEVPQILAQLPGQAAEASSPSDLLXLLSXMKYVAKVVAEARIQLDRRALKNLLIAXDKVLDMDXRSLWXLAQARKPWAGSXLLLAVEXLACSLCPQDHPFAFSLPNVLLQSQLFGPXFPADYSISFPXRPPLQAQIPRHSLAPLVRNGXEISIXSLVLRKLDHLLPSNYGQGLGDSLYAXPGLVLVISIMAGDRAFSQGEVIMDFGNXDGSPHCVFWDHSLFQGRGGWSKEGCQAQVASASPXAQCLCQHLXAFSVLMSPHXVPEEPALALLXQVGLGASILALLVCLGVYWLVWRVVVRNKISYFRHAALLNMVFCLLAADXCFLGAPFLSPGPRSPLCLAAAFLCHFLYLAXFFWMLAQALVLAHQLLFVFHQLAKHRVLPLMVLLGYLCPLGLAGVXLGLYLPQGQYLREGECWLDGKGGALYXFVGPVLAIIGVNGLVLAMAMLKLLRPSLSEGPPAEKRQALLGVIKALLILXPIFGLXWGLGLAXLLEEVSXVPHYIFXILNXLQGVFILLFGCLMDRKIQEALRKRFCRAQAPSSXISLVSCCLQILSCASKSMSEGIPWPSSEDMGXARS

SEQ ID NO: 1676 - protein, 695 aa, Homo sapiens
  MOD_RES (8)..(8): Selenocysteine
  MOD_RES (19)..(19): Selenocysteine
  MOD_RES (45)..(45): Selenocysteine
  MOD_RES (77)..(77): Selenocysteine
  MOD_RES (89)..(89): Selenocysteine
  MOD_RES (91)..(91): Selenocysteine
  MOD_RES (103)..(103): Selenocysteine
  MOD_RES (127)..(127): Selenocysteine
  MOD_RES (147)..(147): Selenocysteine
  MOD_RES (155)..(156): Selenocysteine
  MOD_RES (172)..(172): Selenocysteine
  MOD_RES (179)..(179): Selenocysteine
  MOD_RES (196)..(196): Selenocysteine
  MOD_RES (242)..(242): Selenocysteine
  MOD_RES (251)..(251): Selenocysteine
  MOD_RES (265)..(266): Selenocysteine
  MOD_RES (297)..(297): Selenocysteine
  MOD_RES (335)..(335): Selenocysteine
  MOD_RES (342)..(342): Selenocysteine
  MOD_RES (381)..(381): Selenocysteine
  MOD_RES (397)..(397): Selenocysteine
  MOD_RES (405)..(405): Selenocysteine
  MOD_RES (425)..(425): Selenocysteine
  MOD_RES (433)..(433): Selenocysteine
  MOD_RES (452)..(452): Selenocysteine
  MOD_RES (477)..(477): Selenocysteine
  MOD_RES (532)..(533): Selenocysteine
  MOD_RES (537)..(537): Selenocysteine
  MOD_RES (556)..(556): Selenocysteine
  MOD_RES (584)..(584): Selenocysteine
  MOD_RES (611)..(611): Selenocysteine
  MOD_RES (617)..(617): Selenocysteine
  MOD_RES (624)..(624): Selenocysteine
  MOD_RES (629)..(629): Selenocysteine
  MOD_RES (632)..(632): Selenocysteine
  MOD_RES (653)..(653): Selenocysteine
  MOD_RES (685)..(685): Selenocysteine
MKMKSQAXMICCLVFFLSXECSHYRSKIHLKAGDKLQSPEGKPKXGRIQEKCEGPCISSSNCSQPCAKDFHGEIGFXCNQKKWQKSAEXCXSLSVEKLFKDSXGASRLSVAAPSIPLHILDFRAPEXIESVAQGIRKNCPFDYACIXDMVKSSEXXSGNIAFIVELLKNISXDLSDNVXREKMKSYSEVANHILDXAAISNWAFIPNKNASSDLLQSVNLFARQLHIHNNSENIVNELFIQXKGFHINHNXSEKSLNFSMSMNNXXEDILGMVQIPRQELRKLWPNASQAISIAFPXLGAILREAHLQNVSLPRQVNGLVLSVVLPERLQEIILXFEKINKXRNARAQCVGWHSKKRRWDEKACQMMLDIRNEVKCRCNYXSVVMSFSILMSSKSMXDKVLDYIXCIGLSVSILSLVLCLIIEAXVWSRVVVXEISYMRHVCIVNIAVSLLXANVWFIIGSHFNIKAQDYNMCVAVXFFSHFFYLSLFFWMLFKALLIIYGILVIFRRMMKSRMMVIGFAIGYGCPLIIAVXXVAIXEPEKGYMRPEACWLNWDNXKALLAFAIPAFVIVAVNLIVVLVVAVNXQRPSIGSSKSQDVVIIMRISKNVAILXPLLGLXWGFGIAXLIEGXSLXFHIIFALLNAFQGFFILLFGXIMDHKIRDALRMRMSSLKGKSRAAENASLGPXNGSKLMNRQG

SEQ ID NO: 1677 - protein, 752 aa, Homo sapiens
  MOD_RES (3)..(3): Selenocysteine
  MOD_RES (34)..(34): Selenocysteine
  MOD_RES (42)..(43): Selenocysteine
  MOD_RES (102)..(102): Selenocysteine
  MOD_RES (134)..(134): Selenocysteine
  MOD_RES (146)..(146): Selenocysteine
  MOD_RES (148)..(148): Selenocysteine
  MOD_RES (160)..(160): Selenocysteine
  MOD_RES (184)..(184): Selenocysteine
  MOD_RES (204)..(204): Selenocysteine
  MOD_RES (212)..(213): Selenocysteine
  MOD_RES (229)..(229): Selenocysteine
  MOD_RES (236)..(236): Selenocysteine
  MOD_RES (253)..(253): Selenocysteine
  MOD_RES (299)..(299): Selenocysteine
  MOD_RES (308)..(308): Selenocysteine
  MOD_RES (322)..(323): Selenocysteine
  MOD_RES (354)..(354): Selenocysteine
  MOD_RES (392)..(392): Selenocysteine
  MOD_RES (399)..(399): Selenocysteine
  MOD_RES (438)..(438): Selenocysteine
  MOD_RES (454)..(454): Selenocysteine
  MOD_RES (462)..(462): Selenocysteine
  MOD_RES (482)..(482): Selenocysteine
  MOD_RES (490)..(490): Selenocysteine
  MOD_RES (509)..(509): Selenocysteine
  MOD_RES (534)..(534): Selenocysteine
  MOD_RES (589)..(590): Selenocysteine
  MOD_RES (594)..(594): Selenocysteine
  MOD_RES (613)..(613): Selenocysteine
  MOD_RES (641)..(641): Selenocysteine
  MOD_RES (668)..(668): Selenocysteine
  MOD_RES (674)..(674): Selenocysteine
  MOD_RES (681)..(681): Selenocysteine
  MOD_RES (686)..(686): Selenocysteine
  MOD_RES (689)..(689): Selenocysteine
  MOD_RES (710)..(710): Selenocysteine
  MOD_RES (742)..(742): Selenocysteine
MYXGPCKVLHLSSGLLPNSGRFGIVLSDEYQVVXSLWCQLYXXHAPQQASGMLLLNYLVIPSKAQVNKPGYIPNLGECSHYRSKIHLKAGDKLQSPEGKPKXGRIQEKCEGPCISSSNCSQPCAKDFHGEIGFXCNQKKWQKSAEXCXSLSVEKLFKDSXGASRLSVAAPSIPLHILDFRAPEXIESVAQGIRKNCPFDYACIXDMVKSSEXXSGNIAFIVELLKNISXDLSDNVXREKMKSYSEVANHILDXAAISNWAFIPNKNASSDLLQSVNLFARQLHIHNNSENIVNELFIQXKGFHINHNXSEKSLNFSMSMNNXXEDILGMVQIPRQELRKLWPNASQAISIAFPXLGAILREAHLQNVSLPRQVNGLVLSVVLPERLQEIILXFEKINKXRNARAQCVGWHSKKRRWDEKACQMMLDIRNEVKCRCNYXSVVMSFSILMSSKSMXDKVLDYIXCIGLSVSILSLVLCLIIEAXVWSRVVVXEISYMRHVCIVNIAVSLLXANVWFIIGSHFNIKAQDYNMCVAVXFFSHFFYLSLFFWMLFKALLIIYGILVIFRRMMKSRMMVIGFAIGYGCPLIIAVXXVAIXEPEKGYMRPEACWLNWDNXKALLAFAIPAFVIVAVNLIVVLVVAVNXQRPSIGSSKSQDVVIIMRISKNVAILXPLLGLXWGFGIAXLIEGXSLXFHIIFALLNAFQGFFILLFGXIMDHKIRDALRMRMSSLKGKSRAAENASLGPXNGSKLMNRQG

SEQ ID NO: 1678 - protein, 1346 aa, Homo sapiens
  MOD_RES (7)..(8): Selenocysteine
  MOD_RES (30)..(30): Selenocysteine
  MOD_RES (55)..(55): Selenocysteine
  MOD_RES (59)..(59): Selenocysteine
  MOD_RES (64)..(64): Selenocysteine
  MOD_RES (96)..(96): Selenocysteine
  MOD_RES (100)..(100): Selenocysteine
  MOD_RES (108)..(109): Selenocysteine
  MOD_RES (124)..(124): Selenocysteine
  MOD_RES (171)..(171): Selenocysteine
  MOD_RES (189)..(189): Selenocysteine
  MOD_RES (199)..(199): Selenocysteine
  MOD_RES (203)..(203): Selenocysteine
  MOD_RES (219)..(219): Selenocysteine
  MOD_RES (221)..(221): Selenocysteine
  MOD_RES (231)..(231): Selenocysteine
  MOD_RES (236)..(237): Selenocysteine
  MOD_RES (258)..(258): Selenocysteine
  MOD_RES (270)..(270): Selenocysteine
  MOD_RES (279)..(279): Selenocysteine
  MOD_RES (288)..(288): Selenocysteine
  MOD_RES (323)..(323): Selenocysteine
  MOD_RES (330)..(330): Selenocysteine
  MOD_RES (336)..(336): Selenocysteine
  MOD_RES (341)..(341): Selenocysteine
  MOD_RES (415)..(415): Selenocysteine
  MOD_RES (418)..(418): Selenocysteine
  MOD_RES (428)..(428): Selenocysteine
  MOD_RES (434)..(434): Selenocysteine
  MOD_RES (443)..(444): Selenocysteine
  MOD_RES (448)..(448): Selenocysteine
  MOD_RES (466)..(466): Selenocysteine
  MOD_RES (474)..(474): Selenocysteine
  MOD_RES (476)..(476): Selenocysteine
  MOD_RES (506)..(506): Selenocysteine
  MOD_RES (518)..(519): Selenocysteine
  MOD_RES (531)..(531): Selenocysteine
  MOD_RES (534)..(534): Selenocysteine
  MOD_RES (536)..(536): Selenocysteine
  MOD_RES (542)..(542): Selenocysteine
  MOD_RES (557)..(557): Selenocysteine
  MOD_RES (579)..(579): Selenocysteine
  MOD_RES (601)..(601): Selenocysteine
  MOD_RES (604)..(604): Selenocysteine
  MOD_RES (637)..(637): Selenocysteine
  MOD_RES (645)..(645): Selenocysteine
  MOD_RES (668)..(668): Selenocysteine
  MOD_RES (703)..(703): Selenocysteine
  MOD_RES (705)..(705): Selenocysteine
  MOD_RES (747)..(747): Selenocysteine
  MOD_RES (782)..(782): Selenocysteine
  MOD_RES (785)..(785): Selenocysteine
  MOD_RES (793)..(793): Selenocysteine
  MOD_RES (798)..(798): Selenocysteine
  MOD_RES (810)..(810): Selenocysteine
  MOD_RES (819)..(819): Selenocysteine
  MOD_RES (849)..(849): Selenocysteine
  MOD_RES (865)..(865): Selenocysteine
  MOD_RES (899)..(899): Selenocysteine
  MOD_RES (904)..(904): Selenocysteine
  MOD_RES (925)..(927): Selenocysteine
  MOD_RES (932)..(933): Selenocysteine
  MOD_RES (941)..(941): Selenocysteine
  MOD_RES (952)..(952): Selenocysteine
  MOD_RES (965)..(965): Selenocysteine
  MOD_RES (984)..(984): Selenocysteine
  MOD_RES (991)..(991): Selenocysteine
  MOD_RES (1042)..(1042): Selenocysteine
  MOD_RES (1046)..(1046): Selenocysteine
  MOD_RES (1052)..(1052): Selenocysteine
  MOD_RES (1066)..(1066): Selenocysteine
  MOD_RES (1084)..(1084): Selenocysteine
  MOD_RES (1090)..(1090): Selenocysteine
  MOD_RES (1106)..(1106): Selenocysteine
  MOD_RES (1122)..(1122): Selenocysteine
  MOD_RES (1126)..(1126): Selenocysteine
  MOD_RES (1146)..(1146): Selenocysteine
  MOD_RES (1150)..(1150): Selenocysteine
  MOD_RES (1157)..(1157): Selenocysteine
  MOD_RES (1169)..(1169): Selenocysteine
  MOD_RES (1188)..(1188): Selenocysteine
  MOD_RES (1190)..(1190): Selenocysteine
  MOD_RES (1195)..(1195): Selenocysteine
  MOD_RES (1225)..(1225): Selenocysteine
  MOD_RES (1231)..(1231): Selenocysteine
  MOD_RES (1237)..(1238): Selenocysteine
  MOD_RES (1243)..(1243): Selenocysteine
  MOD_RES (1294)..(1294): Selenocysteine
  MOD_RES (1300)..(1300): Selenocysteine
  MOD_RES (1320)..(1320): Selenocysteine
  MOD_RES (1322)..(1322): Selenocysteine
  MOD_RES (1327)..(1327): Selenocysteine
  MOD_RES (1331)..(1331): Selenocysteine
MKSPRRXXLCLMFIVIYSSKAALNWNYESXIHPLSLHEHEPAGEEALRQKRAVAXKSPXAEEYXVNIEISFENASFLDPIKAYLNSLSFPIHGNNXDQIXDILSINVXXVCRPAGNEIWCSCEXGYGWPRERCLHNLICQERDVFLPGHHCSCLKELPPNGPFCLLQEDVXLNMRVRLNVGFQEDLMNXSSALYRSYKXDLEXAFRKGYGILPGFKGVXVXGFKSGSVVVXYEVKXXPPSLELIHKANEQVVQSLNQXYKMDYNSFQAVXINESNFFVXPEIIFEGDXVSLVCEKEVLSSNVSWRYEEQQLEIQNSSRFSIYXALFNNMXSVSKLXIHNIXPGDAGEYVCKLILDIFEYECKKKIDVMPIQILANEEMKVMCDNNPVSLNCCSQGNVNWSKVEWKQEGKINIPGXPEXDIDSSCSRYXLKADGXQCPSGSSGXXVIYXCEFISAYGARGSANIKVXFISVANLXIXPDPISVSEGQNFSIKCISDVSNYDEVYWNXSAGIKIYQRFYXXRRYLDGAESVLXVKXSXREWNGXYHCIFRYKNSYSIAXKDVIVHPLPLKLNIMVDPLEAXVSCSGSHHIKCCIEEDGDYKVXFHXGSSSLPAAKEVNKKQVCYKHNFNASSVSWCSKXVDVCCHFXNAANNSVWSPSMKLNLVPGENIXCQDPVIGVGEPGKVIQKLCRFSNVPSSPESPIGGXIXYKCVGSQWEEKRNDCISAPINSLLQMAKALIKSPSQDEMLPXYLKDLSISIDKAEHEISSSPGSLGAIINILDLLSXVPXQVNSEMMXHVLSXVNVILGKPVLNXWKVLQQQWXNQSSQLLHSVERFSQALQSGDSPPLSFSQXNVQMSSMVIKSSHPEXYQQRFVFPYFDLWGNVVIDKSYLENLQSDSSIVXMAFPXLQAILAQDIQENNFAESLVMXXXVSHNXXMPFRISMXFKNNSPSGGEXKCVFWNFRLANNXGGWDSSGCYVEEGDGDNVXCICDHLXSFSILMSPDSPDPSSLLGILLDIISYVGVGFSILSLAACLVVEAVVWKSVXKNRXSYMRHXCIVNIAASLLVANXWFIVVAAIQDNRYILCKXACVAAXFFIHFFYLSVFFWMLXLGLMLFYRLVFILHEXSRSXQKAIAFCLGYGCPLAISVIXLGAXQPREVYXRKNVCWLNWEDXKALLAFAIPALIIVVVNIXIXIVVIXKILRPSIGDKPCKQEKSSLFQISKSIGVLXPLLGLXWGFGLXXVFPGXNLVFHIIFAILNVFQGLFILLFGCLWDLKVQEALLNKFSLSRWSSQHSKSXSLGSSXPVFSMSSPISRRFNNLFGKXGXYNVSXPEAXSSSLENSSSASSLLN

SEQ ID NO: 1679 - protein, 6 aa, Homo sapiens
  MOD_RES (2)..(2): Selenocysteine
MXPQSL

SEQ ID NO: 1680 - protein, 95 aa, Homo sapiens
  MOD_RES (2)..(2): Selenocysteine
  MOD_RES (9)..(10): Selenocysteine
  MOD_RES (86)..(86): Selenocysteine
  MOD_RES (89)..(89): Selenocysteine
MXPQSLLQXXLFLLSLLFLVQAHPASRSFPDPRGLYHFCLYWNRHAGRLHLLYGKRDFLLSDKASSLLCFQHQEESLAQGPPLLAXSVXSWWSPQ

SEQ ID NO: 1681 - protein, 125 aa, Homo sapiens
  MOD_RES (2)..(2): Selenocysteine
  MOD_RES (9)..(10): Selenocysteine
  MOD_RES (86)..(86): Selenocysteine
  MOD_RES (89)..(89): Selenocysteine
  MOD_RES (106)..(106): Selenocysteine
  MOD_RES (115)..(115): Selenocysteine
MXPQSLLQXXLFLLSLLFLVQAHPASRSFPDPRGLYHFCLYWNRHAGRLHLLYGKRDFLLSDKASSLLCFQHQEESLAQGPPLLAXSVXSWWSPQNISLPSAASFXFSFHSPPHXAAHNASVDMC

SEQ ID NO: 1682 - protein, 90 aa, Homo sapiens
  MOD_RES (2)..(2): Selenocysteine
  MOD_RES (9)..(10): Selenocysteine
  MOD_RES (25)..(25): Selenocysteine
  MOD_RES (38)..(38): Selenocysteine
  MOD_RES (42)..(42): Selenocysteine
  MOD_RES (45)..(45): Selenocysteine
  MOD_RES (53)..(53): Selenocysteine
  MOD_RES (56)..(56): Selenocysteine
  MOD_RES (61)..(62): Selenocysteine
  MOD_RES (67)..(67): Selenocysteine
  MOD_RES (74)..(74): Selenocysteine
  MOD_RES (89)..(89): Selenocysteine
MXPQSLLQXXLFLLSLLFLVQAPAXGSHLQPLPPQVPXAGAXGKXFASAASGXRHXGAASXXNPHQXCASPSRXPKRPSQSMPLSLQPXL

SEQ ID NO: 1683 - protein, 118 aa, Homo sapiens
  MOD_RES (2)..(2): Selenocysteine
  MOD_RES (9)..(10): Selenocysteine
  MOD_RES (25)..(25): Selenocysteine
  MOD_RES (38)..(38): Selenocysteine
  MOD_RES (42)..(42): Selenocysteine
  MOD_RES (45)..(45): Selenocysteine
  MOD_RES (53)..(53): Selenocysteine
  MOD_RES (56)..(56): Selenocysteine
  MOD_RES (61)..(62): Selenocysteine
  MOD_RES (67)..(67): Selenocysteine
  MOD_RES (74)..(74): Selenocysteine
  MOD_RES (89)..(89): Selenocysteine
  MOD_RES (97)..(97): Selenocysteine
  MOD_RES (102)..(103): Selenocysteine
  MOD_RES (107)..(107): Selenocysteine
  MOD_RES (109)..(109): Selenocysteine
MXPQSLLQXXLFLLSLLFLVQAPAXGSHLQPLPPQVPXAGAXGKXFASAASGXRHXGAASXXNPHQXCASPSRXPKRPSQSMPLSLQPXLLPDPSLXPGASXXSASXGXDMLGDYIFS

SEQ ID NO: 1684 - protein, 91 aa, Homo sapiens
  MOD_RES (2)..(2): Selenocysteine
  MOD_RES (9)..(10): Selenocysteine
  MOD_RES (46)..(46): Selenocysteine
  MOD_RES (56)..(56): Selenocysteine
  MOD_RES (71)..(71): Selenocysteine
MXPQSLLQXXLFLLSLLFLVQASASSGAHGRGHREDFRFCSQRNQXHRSSLHYKPXPDLRISIENSEEALXVHAPFPAAHPASRSFPDPRG

SEQ ID NO: 1685 - protein, 98 aa, Homo sapiens
  MOD_RES (2)..(2): Selenocysteine
  MOD_RES (9)..(10): Selenocysteine
  MOD_RES (46)..(46): Selenocysteine
  MOD_RES (56)..(56): Selenocysteine
  MOD_RES (71)..(71): Selenocysteine
MXPQSLLQXXLFLLSLLFLVQASASSGAHGRGHREDFRFCSQRNQXHRSSLHYKPXPDLRISIENSEEALXVHAPFPAAHPASRSFPDPRGLYHFCLY

SEQ ID NO: 1686 - protein, 103 aa, Homo sapiens
  MOD_RES (2)..(2): Selenocysteine
  MOD_RES (9)..(10): Selenocysteine
  MOD_RES (46)..(46): Selenocysteine
  MOD_RES (56)..(56): Selenocysteine
  MOD_RES (71)..(71): Selenocysteine
MXPQSLLQXXLFLLSLLFLVQASASSGAHGRGHREDFRFCSQRNQXHRSSLHYKPXPDLRISIENSEEALXVHAPFPAAHPASRSFPDPRGLYHFCLYWNRHA

SEQ ID NO: 1687 - protein, 114 aa, Homo sapiens
  MOD_RES (2)..(2): Selenocysteine
  MOD_RES (9)..(10): Selenocysteine
  MOD_RES (46)..(46): Selenocysteine
  MOD_RES (56)..(56): Selenocysteine
  MOD_RES (71)..(71): Selenocysteine
MXPQSLLQXXLFLLSLLFLVQASASSGAHGRGHREDFRFCSQRNQXHRSSLHYKPXPDLRISIENSEEALXVHAPFPAAHPASRSFPDPRGLYHFCLYWNRHAGRLHLLYGKRD

SEQ ID NO: 1688 - protein, 118 aa, Homo sapiens
  MOD_RES (2)..(2): Selenocysteine
  MOD_RES (9)..(10): Selenocysteine
  MOD_RES (46)..(46): Selenocysteine
  MOD_RES (56)..(56): Selenocysteine
  MOD_RES (71)..(71): Selenocysteine
MXPQSLLQXXLFLLSLLFLVQASASSGAHGRGHREDFRFCSQRNQXHRSSLHYKPXPDLRISIENSEEALXVHAPFPAAHPASRSFPDPRGLYHFCLYWNRHAGRLHLLYGKRDFLLS

SEQ ID NO: 1689 - protein, 125 aa, Homo sapiens
  MOD_RES (2)..(2): Selenocysteine
  MOD_RES (9)..(10): Selenocysteine
  MOD_RES (46)..(46): Selenocysteine
  MOD_RES (56)..(56): Selenocysteine
  MOD_RES (71)..(71): Selenocysteine
MXPQSLLQXXLFLLSLLFLVQASASSGAHGRGHREDFRFCSQRNQXHRSSLHYKPXPDLRISIENSEEALXVHAPFPAAHPASRSFPDPRGLYHFCLYWNRHAGRLHLLYGKRDFLLSDKASSLL

SEQ ID NO: 1690 - protein, 145 aa, Homo sapiens
  MOD_RES (2)..(2): Selenocysteine
  MOD_RES (9)..(10): Selenocysteine
  MOD_RES (46)..(46): Selenocysteine
  MOD_RES (56)..(56): Selenocysteine
  MOD_RES (71)..(71): Selenocysteine
  MOD_RES (143)..(143): Selenocysteine
MXPQSLLQXXLFLLSLLFLVQASASSGAHGRGHREDFRFCSQRNQXHRSSLHYKPXPDLRISIENSEEALXVHAPFPAAHPASRSFPDPRGLYHFCLYWNRHAGRLHLLYGKRDFLLSDKASSLLCFQHQEESLAQGPPLLAXSV

SEQ ID NO: 1691 - protein, 146 aa, Homo sapiens
  MOD_RES (2)..(2): Selenocysteine
  MOD_RES (9)..(10): Selenocysteine
  MOD_RES (46)..(46): Selenocysteine
  MOD_RES (56)..(56): Selenocysteine
  MOD_RES (71)..(71): Selenocysteine
  MOD_RES (143)..(143): Selenocysteine
  MOD_RES (146)..(146): Selenocysteine
MXPQSLLQXXLFLLSLLFLVQASASSGAHGRGHREDFRFCSQRNQXHRSSLHYKPXPDLRISIENSEEALXVHAPFPAAHPASRSFPDPRGLYHFCLYWNRHAGRLHLLYGKRDFLLSDKASSLLCFQHQEESLAQGPPLLAXSVX

SEQ ID NO: 1692 - protein, 164 aa, Homo sapiens
  MOD_RES (2)..(2): Selenocysteine
  MOD_RES (9)..(10): Selenocysteine
  MOD_RES (46)..(46): Selenocysteine
  MOD_RES (56)..(56): Selenocysteine
  MOD_RES (71)..(71): Selenocysteine
  MOD_RES (143)..(143): Selenocysteine
  MOD_RES (146)..(146): Selenocysteine
  MOD_RES (163)..(163): Selenocysteine
MXPQSLLQXXLFLLSLLFLVQASASSGAHGRGHREDFRFCSQRNQXHRSSLHYKPXPDLRISIENSEEALXVHAPFPAAHPASRSFPDPRGLYHFCLYWNRHAGRLHLLYGKRDFLLSDKASSLLCFQHQEESLAQGPPLLAXSVXSWWSPQNISLPSAASFXF

SEQ ID NO: 1693 - protein, 168 aa, Homo sapiens
  MOD_RES (2)..(2): Selenocysteine
  MOD_RES (9)..(10): Selenocysteine
  MOD_RES (46)..(46): Selenocysteine
  MOD_RES (56)..(56): Selenocysteine
  MOD_RES (71)..(71): Selenocysteine
  MOD_RES (143)..(143): Selenocysteine
  MOD_RES (146)..(146): Selenocysteine
  MOD_RES (163)..(163): Selenocysteine
MXPQSLLQXXLFLLSLLFLVQASASSGAHGRGHREDFRFCSQRNQXHRSSLHYKPXPDLRISIENSEEALXVHAPFPAAHPASRSFPDPRGLYHFCLYWNRHAGRLHLLYGKRDFLLSDKASSLLCFQHQEESLAQGPPLLAXSVXSWWSPQNISLPSAASFXFSFHS

SEQ ID NO: 1694 - protein, 198 aa, Homo sapiens
  MOD_RES (2)..(2): Selenocysteine
  MOD_RES (9)..(10): Selenocysteine
  MOD_RES (46)..(46): Selenocysteine
  MOD_RES (56)..(56): Selenocysteine
  MOD_RES (71)..(71): Selenocysteine
  MOD_RES (143)..(143): Selenocysteine
  MOD_RES (146)..(146): Selenocysteine
  MOD_RES (163)..(163): Selenocysteine
  MOD_RES (172)..(172): Selenocysteine
MXPQSLLQXXLFLLSLLFLVQASASSGAHGRGHREDFRFCSQRNQXHRSSLHYKPXPDLRISIENSEEALXVHAPFPAAHPASRSFPDPRGLYHFCLYWNRHAGRLHLLYGKRDFLLSDKASSLLCFQHQEESLAQGPPLLAXSVXSWWSPQNISLPSAASFXFSFHSPPHXAAHNASVDMCELKRDLQLLSQFLKHP

SEQ ID NO: 1695 - protein, 692 aa, Homo sapiens
  MOD_RES (2)..(2): Selenocysteine
  MOD_RES (9)..(10): Selenocysteine
  MOD_RES (46)..(46): Selenocysteine
  MOD_RES (56)..(56): Selenocysteine
  MOD_RES (71)..(71): Selenocysteine
  MOD_RES (143)..(143): Selenocysteine
  MOD_RES (146)..(146): Selenocysteine
  MOD_RES (163)..(163): Selenocysteine
  MOD_RES (172)..(172): Selenocysteine
  MOD_RES (222)..(222): Selenocysteine
  MOD_RES (241)..(241): Selenocysteine
  MOD_RES (248)..(248): Selenocysteine
  MOD_RES (277)..(277): Selenocysteine
  MOD_RES (282)..(282): Selenocysteine
  MOD_RES (325)..(325): Selenocysteine
  MOD_RES (331)..(331): Selenocysteine
  MOD_RES (337)..(337): Selenocysteine
  MOD_RES (348)..(348): Selenocysteine
  MOD_RES (359)..(359): Selenocysteine
  MOD_RES (373)..(373): Selenocysteine
  MOD_RES (378)..(378): Selenocysteine
  MOD_RES (380)..(380): Selenocysteine
  MOD_RES (388)..(388): Selenocysteine
  MOD_RES (426)..(426): Selenocysteine
  MOD_RES (441)..(441): Selenocysteine
  MOD_RES (457)..(457): Selenocysteine
  MOD_RES (468)..(468): Selenocysteine
  MOD_RES (487)..(487): Selenocysteine
  MOD_RES (509)..(509): Selenocysteine
  MOD_RES (531)..(531): Selenocysteine
  MOD_RES (551)..(551): Selenocysteine
  MOD_RES (572)..(572): Selenocysteine
  MOD_RES (590)..(590): Selenocysteine
  MOD_RES (602)..(602): Selenocysteine
  MOD_RES (610)..(610): Selenocysteine
  MOD_RES (633)..(633): Selenocysteine
  MOD_RES (646)..(646): Selenocysteine
  MOD_RES (687)..(687): Selenocysteine
MXPQSLLQXXLFLLSLLFLVQASASSGAHGRGHREDFRFCSQRNQXHRSSLHYKPXPDLRISIENSEEALXVHAPFPAAHPASRSFPDPRGLYHFCLYWNRHAGRLHLLYGKRDFLLSDKASSLLCFQHQEESLAQGPPLLAXSVXSWWSPQNISLPSAASFXFSFHSPPHXAAHNASVDMCELKRDLQLLSQFLKHPQKASRRPSAAPASQQLQSLESKLXSVRFMGDMVSFEEDRINAXVWKLQPXAGLQDLHIHSRQEEEQSEIMEYSVLLPRXLFQRXKGRSGEAEKRLLLVDFSSQALFQDKNSSQVLGEKVLGIVVQNXKVANLXEPVVLXFQHQLQPKNVXLQCVFWVEDPXLSSPGHWSSAGCEXVRREXQXSCFCNHLXYFAVLMVSSVEVDAVHKHYLSLLSYVGCVVSALACLVXIAAYLCSRRKPRDYXIKVHMNLLLAVFLLDXSFLLSEPVALXGSEAGCRASAIFLHFSLLXCLSWMGLEGYNLYRLVVEVFGXYVPGYLLKLSAMGWGFPIFLVXLVALVDVDNYGPIILAVHRXPEGVIYPSMCWIRDSLVSYIXNLGLFSLVFLFNMAMLAXMVVQILRLRPHXQKWSHVLXLLGLSLVLGLPWALIFFSFASGXFQLVVLYLFSIIXSFQGFLIFIWYWSMRLQARGGPSPLKSNSDSARLPISSGSXSSSRI

SEQ ID NO: 1696 - protein, 97 aa, Homo sapiens
  MOD_RES (2)..(2): Selenocysteine
  MOD_RES (9)..(10): Selenocysteine
  MOD_RES (25)..(25): Selenocysteine
  MOD_RES (28)..(28): Selenocysteine
  MOD_RES (33)..(34): Selenocysteine
  MOD_RES (39)..(39): Selenocysteine
  MOD_RES (46)..(46): Selenocysteine
  MOD_RES (61)..(61): Selenocysteine
  MOD_RES (69)..(69): Selenocysteine
  MOD_RES (74)..(75): Selenocysteine
  MOD_RES (79)..(79): Selenocysteine
  MOD_RES (81)..(81): Selenocysteine
  MOD_RES (95)..(95): Selenocysteine
MXPQSLLQXXLFLLSLLFLVQASGXRHXGAASXXNPHQXCASPSRXPKRPSQSMPLSLQPXLLPDPSLXPGASXXSASXGXDMLGDYIFSMASVXSC

SEQ ID NO: 1697 - protein, 68 aa, Homo sapiens
  MOD_RES (2)..(2): Selenocysteine
  MOD_RES (9)..(10): Selenocysteine
  MOD_RES (44)..(44): Selenocysteine
  MOD_RES (47)..(47): Selenocysteine
  MOD_RES (64)..(64): Selenocysteine
MXPQSLLQXXLFLLSLLFLVQASSLLCFQHQEESLAQGPPLLAXSVXSWWSPQNISLPSAASFXFSFH

SEQ ID NO: 1698 - protein, 42 aa, Homo sapiens
  MOD_RES (2)..(2): Selenocysteine
  MOD_RES (9)..(10): Selenocysteine
  MOD_RES (41)..(41): Selenocysteine
MXPQSLLQXXLFLLSLLFLVQGAHGRGHREDFRFCSQRNQXH

SEQ ID NO: 1699 - protein, 50 aa, Homo sapiens
  MOD_RES (2)..(2): Selenocysteine
  MOD_RES (9)..(10): Selenocysteine
  MOD_RES (41)..(41): Selenocysteine
MXPQSLLQXXLFLLSLLFLVQGAHGRGHREDFRFCSQRNQXHRSSLHYKP

SEQ ID NO: 1700 - protein, 55 aa, Homo sapiens
  MOD_RES (2)..(2): Selenocysteine
  MOD_RES (9)..(10): Selenocysteine
  MOD_RES (41)..(41): Selenocysteine
  MOD_RES (51)..(51): Selenocysteine
MXPQSLLQXXLFLLSLLFLVQGAHGRGHREDFRFCSQRNQXHRSSLHYKPXPDLR

SEQ ID NO: 1701 - protein, 56 aa, Homo sapiens
  MOD_RES (2)..(2): Selenocysteine
  MOD_RES (9)..(10): Selenocysteine
  MOD_RES (41)..(41): Selenocysteine
  MOD_RES (51)..(51): Selenocysteine
MXPQSLLQXXLFLLSLLFLVQGAHGRGHREDFRFCSQRNQXHRSSLHYKPXPDLRI

SEQ ID NO: 1702 - protein, 70 aa, Homo sapiens
  MOD_RES (2)..(2): Selenocysteine
  MOD_RES (9)..(10): Selenocysteine
  MOD_RES (41)..(41): Selenocysteine
  MOD_RES (51)..(51): Selenocysteine
  MOD_RES (66)..(66): Selenocysteine
MXPQSLLQXXLFLLSLLFLVQGAHGRGHREDFRFCSQRNQXHRSSLHYKPXPDLRISIENSEEALXVHAP

SEQ ID NO: 1703 - protein, 77 aa, Homo sapiens
  MOD_RES (2)..(2): Selenocysteine
  MOD_RES (9)..(10): Selenocysteine
  MOD_RES (41)..(41): Selenocysteine
  MOD_RES (51)..(51): Selenocysteine
  MOD_RES (66)..(66): Selenocysteine
MXPQSLLQXXLFLLSLLFLVQGAHGRGHREDFRFCSQRNQXHRSSLHYKPXPDLRISIENSEEALXVHAPFPAAHPA

SEQ ID NO: 1704 - protein, 84 aa, Homo sapiens
  MOD_RES (2)..(2): Selenocysteine
  MOD_RES (9)..(10): Selenocysteine
  MOD_RES (41)..(41): Selenocysteine
  MOD_RES (51)..(51): Selenocysteine
  MOD_RES (66)..(66): Selenocysteine
MXPQSLLQXXLFLLSLLFLVQGAHGRGHREDFRFCSQRNQXHRSSLHYKPXPDLRISIENSEEALXVHAPFPAAHPASRSFPDP

SEQ ID NO: 1705 - protein, 94 aa, Homo sapiens
  MOD_RES (2)..(2): Selenocysteine
  MOD_RES (9)..(10): Selenocysteine
  MOD_RES (41)..(41): Selenocysteine
  MOD_RES (51)..(51): Selenocysteine
  MOD_RES (66)..(66): Selenocysteine
MXPQSLLQXXLFLLSLLFLVQGAHGRGHREDFRFCSQRNQXHRSSLHYKPXPDLRISIENSEEALXVHAPFPAAHPASRSFPDPRGLYHFCLYW

SEQ ID NO: 1706 - protein, 100 aa, Homo sapiens
  MOD_RES (2)..(2): Selenocysteine
  MOD_RES (9)..(10): Selenocysteine
  MOD_RES (41)..(41): Selenocysteine
  MOD_RES (51)..(51): Selenocysteine
  MOD_RES (66)..(66): Selenocysteine
MXPQSLLQXXLFLLSLLFLVQGAHGRGHREDFRFCSQRNQXHRSSLHYKPXPDLRISIENSEEALXVHAPFPAAHPASRSFPDPRGLYHFCLYWNRHAGR

SEQ ID NO: 1707 - protein, 107 aa, Homo sapiens
  MOD_RES (2)..(2): Selenocysteine
  MOD_RES (9)..(10): Selenocysteine
  MOD_RES (41)..(41): Selenocysteine
  MOD_RES (51)..(51): Selenocysteine
  MOD_RES (66)..(66): Selenocysteine
MXPQSLLQXXLFLLSLLFLVQGAHGRGHREDFRFCSQRNQXHRSSLHYKPXPDLRISIENSEEALXVHAPFPAAHPASRSFPDPRGLYHFCLYWNRHAGRLHLLYGK

SEQ ID NO: 1708 - protein, 110 aa, Homo sapiens
  MOD_RES (2)..(2): Selenocysteine
  MOD_RES (9)..(10): Selenocysteine
  MOD_RES (41)..(41): Selenocysteine
  MOD_RES (51)..(51): Selenocysteine
  MOD_RES (66)..(66): Selenocysteine
MXPQSLLQXXLFLLSLLFLVQGAHGRGHREDFRFCSQRNQXHRSSLHYKPXPDLRISIENSEEALXVHAPFPAAHPASRSFPDPRGLYHFCLYWNRHAGRLHLLYGKRDF

SEQ ID NO: 1709 - protein, 111 aa, Homo sapiens
  MOD_RES (2)..(2): Selenocysteine
  MOD_RES (9)..(10): Selenocysteine
  MOD_RES (41)..(41): Selenocysteine
  MOD_RES (51)..(51): Selenocysteine
  MOD_RES (66)..(66): Selenocysteine
MXPQSLLQXXLFLLSLLFLVQGAHGRGHREDFRFCSQRNQXHRSSLHYKPXPDLRISIENSEEALXVHAPFPAAHPASRSFPDPRGLYHFCLYWNRHAGRLHLLYGKRDFL

SEQ ID NO: 1710 - protein, 113 aa, Homo sapiens
  MOD_RES (2)..(2): Selenocysteine
  MOD_RES (9)..(10): Selenocysteine
  MOD_RES (41)..(41): Selenocysteine
  MOD_RES (51)..(51): Selenocysteine
  MOD_RES (66)..(66): Selenocysteine
MXPQSLLQXXLFLLSLLFLVQGAHGRGHREDFRFCSQRNQXHRSSLHYKPXPDLRISIENSEEALXVHAPFPAAHPASRSFPDPRGLYHFCLYWNRHAGRLHLLYGKRDFLLS

SEQ ID NO: 1711 - protein, 116 aa, Homo sapiens
  MOD_RES (2)..(2): Selenocysteine
  MOD_RES (9)..(10): Selenocysteine
  MOD_RES (41)..(41): Selenocysteine
  MOD_RES (51)..(51): Selenocysteine
  MOD_RES (66)..(66): Selenocysteine
MXPQSLLQXXLFLLSLLFLVQGAHGRGHREDFRFCSQRNQXHRSSLHYKPXPDLRISIENSEEALXVHAPFPAAHPASRSFPDPRGLYHFCLYWNRHAGRLHLLYGKRDFLLSDKA

SEQ ID NO: 1712 - protein, 119 aa, Homo sapiens
  MOD_RES (2)..(2): Selenocysteine
  MOD_RES (9)..(10): Selenocysteine
  MOD_RES (41)..(41): Selenocysteine
  MOD_RES (51)..(51): Selenocysteine
  MOD_RES (66)..(66): Selenocysteine
MXPQSLLQXXLFLLSLLFLVQGAHGRGHREDFRFCSQRNQXHRSSLHYKPXPDLRISIENSEEALXVHAPFPAAHPASRSFPDPRGLYHFCLYWNRHAGRLHLLYGKRDFLLSDKASSL

SEQ ID NO: 1713 - protein, 122 aa, Homo sapiens
  MOD_RES (2)..(2): Selenocysteine
  MOD_RES (9)..(10): Selenocysteine
  MOD_RES (41)..(41): Selenocysteine
  MOD_RES (51)..(51): Selenocysteine
  MOD_RES (66)..(66): Selenocysteine
MXPQSLLQXXLFLLSLLFLVQGAHGRGHREDFRFCSQRNQXHRSSLHYKPXPDLRISIENSEEALXVHAPFPAAHPASRSFPDPRGLYHFCLYWNRHAGRLHLLYGKRDFLLSDKASSLLCF

SEQ ID NO: 1714 - protein, 131 aa, Homo sapiens
  MOD_RES (2)..(2): Selenocysteine
  MOD_RES (9)..(10): Selenocysteine
  MOD_RES (41)..(41): Selenocysteine
  MOD_RES (51)..(51): Selenocysteine
  MOD_RES (66)..(66): Selenocysteine
MXPQSLLQXXLFLLSLLFLVQGAHGRGHREDFRFCSQRNQXHRSSLHYKPXPDLRISIENSEEALXVHAPFPAAHPASRSFPDPRGLYHFCLYWNRHAGRLHLLYGKRDFLLSDKASSLLCFQHQEESLAQ

SEQ ID NO: 1715 - protein, 141 aa, Homo sapiens
  MOD_RES (2)..(2): Selenocysteine
  MOD_RES (9)..(10): Selenocysteine
  MOD_RES (41)..(41): Selenocysteine
  MOD_RES (51)..(51): Selenocysteine
  MOD_RES (66)..(66): Selenocysteine
  MOD_RES (138)..(138): Selenocysteine
  MOD_RES (141)..(141): Selenocysteine
MXPQSLLQXXLFLLSLLFLVQGAHGRGHREDFRFCSQRNQXHRSSLHYKPXPDLRISIENSEEALXVHAPFPAAHPASRSFPDPRGLYHFCLYWNRHAGRLHLLYGKRDFLLSDKASSLLCFQHQEESLAQGPPLLAXSVX

SEQ ID NO: 1716 - protein, 153 aa, Homo sapiens
  MOD_RES (2)..(2): Selenocysteine
  MOD_RES (9)..(10): Selenocysteine
  MOD_RES (41)..(41): Selenocysteine
  MOD_RES (51)..(51): Selenocysteine
  MOD_RES (66)..(66): Selenocysteine
  MOD_RES (138)..(138): Selenocysteine
  MOD_RES (141)..(141): Selenocysteine
MXPQSLLQXXLFLLSLLFLVQGAHGRGHREDFRFCSQRNQXHRSSLHYKPXPDLRISIENSEEALXVHAPFPAAHPASRSFPDPRGLYHFCLYWNRHAGRLHLLYGKRDFLLSDKASSLLCFQHQEESLAQGPPLLAXSVXSWWSPQNISLPS

SEQ ID NO: 1717 - protein, 154 aa, Homo sapiens
  MOD_RES (2)..(2): Selenocysteine
  MOD_RES (9)..(10): Selenocysteine
  MOD_RES (41)..(41): Selenocysteine
  MOD_RES (51)..(51): Selenocysteine
  MOD_RES (66)..(66): Selenocysteine
  MOD_RES (138)..(138): Selenocysteine
  MOD_RES (141)..(141): Selenocysteine
MXPQSLLQXXLFLLSLLFLVQGAHGRGHREDFRFCSQRNQXHRSSLHYKPXPDLRISIENSEEALXVHAPFPAAHPASRSFPDPRGLYHFCLYWNRHAGRLHLLYGKRDFLLSDKASSLLCFQHQEESLAQGPPLLAXSVXSWWSPQNISLPSA

SEQ ID NO: 1718 - protein, 160 aa, Homo sapiens
  MOD_RES (2)..(2): Selenocysteine
  MOD_RES (9)..(10): Selenocysteine
  MOD_RES (41)..(41): Selenocysteine
  MOD_RES (51)..(51): Selenocysteine
  MOD_RES (66)..(66): Selenocysteine
  MOD_RES (138)..(138): Selenocysteine
  MOD_RES (141)..(141): Selenocysteine
  MOD_RES (158)..(158): Selenocysteine
MXPQSLLQXXLFLLSLLFLVQGAHGRGHREDFRFCSQRNQXHRSSLHYKPXPDLRISIENSEEALXVHAPFPAAHPASRSFPDPRGLYHFCLYWNRHAGRLHLLYGKRDFLLSDKASSLLCFQHQEESLAQGPPLLAXSVXSWWSPQNISLPSAASFXFS

SEQ ID NO: 1719 - protein, 162 aa, Homo sapiens
  MOD_RES (2)..(2): Selenocysteine
  MOD_RES (9)..(10): Selenocysteine
  MOD_RES (41)..(41): Selenocysteine
  MOD_RES (51)..(51): Selenocysteine
  MOD_RES (66)..(66): Selenocysteine
  MOD_RES (138)..(138): Selenocysteine
  MOD_RES (141)..(141): Selenocysteine
  MOD_RES (158)..(158): Selenocysteine
MXPQSLLQXXLFLLSLLFLVQGAHGRGHREDFRFCSQRNQXHRSSLHYKPXPDLRISIENSEEALXVHAPFPAAHPASRSFPDPRGLYHFCLYWNRHAGRLHLLYGKRDFLLSDKASSLLCFQHQEESLAQGPPLLAXSVXSWWSPQNISLPSAASFXFSFH

SEQ ID NO: 1720 - protein, 167 aa, Homo sapiens
  MOD_RES (2)..(2): Selenocysteine
  MOD_RES (9)..(10): Selenocysteine
  MOD_RES (41)..(41): Selenocysteine
  MOD_RES (51)..(51): Selenocysteine
  MOD_RES (66)..(66): Selenocysteine
  MOD_RES (138)..(138): Selenocysteine
  MOD_RES (141)..(141): Selenocysteine
  MOD_RES (158)..(158): Selenocysteine
  MOD_RES (167)..(167): Selenocysteine
MXPQSLLQXXLFLLSLLFLVQGAHGRGHREDFRFCSQRNQXHRSSLHYKPXPDLRISIENSEEALXVHAPFPAAHPASRSFPDPRGLYHFCLYWNRHAGRLHLLYGKRDFLLSDKASSLLCFQHQEESLAQGPPLLAXSVXSWWSPQNISLPSAASFXFSFHSPPHX

SEQ ID NO: 1721 - protein, 199 aa, Homo sapiens
  MOD_RES (2)..(2): Selenocysteine
  MOD_RES (9)..(10): Selenocysteine
  MOD_RES (41)..(41): Selenocysteine
  MOD_RES (51)..(51): Selenocysteine
  MOD_RES (66)..(66): Selenocysteine
  MOD_RES (138)..(138): Selenocysteine
  MOD_RES (141)..(141): Selenocysteine
  MOD_RES (158)..(158): Selenocysteine
  MOD_RES (167)..(167): Selenocysteine
MXPQSLLQXXLFLLSLLFLVQGAHGRGHREDFRFCSQRNQXHRSSLHYKPXPDLRISIENSEEALXVHAPFPAAHPASRSFPDPRGLYHFCLYWNRHAGRLHLLYGKRDFLLSDKASSLLCFQHQEESLAQGPPLLAXSVXSWWSPQNISLPSAASFXFSFHSPPHXAAHNASVDMCELKRDLQLLSQFLKHPQKASRR

SEQ ID NO: 1722 - protein, 256 aa, Homo sapiens
  MOD_RES (2)..(2): Selenocysteine
  MOD_RES (9)..(10): Selenocysteine
  MOD_RES (41)..(41): Selenocysteine
  MOD_RES (51)..(51): Selenocysteine
  MOD_RES (66)..(66): Selenocysteine
  MOD_RES (138)..(138): Selenocysteine
  MOD_RES (141)..(141): Selenocysteine
  MOD_RES (158)..(158): Selenocysteine
  MOD_RES (167)..(167): Selenocysteine
  MOD_RES (217)..(217): Selenocysteine
  MOD_RES (236)..(236): Selenocysteine
  MOD_RES (243)..(243): Selenocysteine
MXPQSLLQXXLFLLSLLFLVQGAHGRGHREDFRFCSQRNQXHRSSLHYKPXPDLRISIENSEEALXVHAPFPAAHPASRSFPDPRGLYHFCLYWNRHAGRLHLLYGKRDFLLSDKASSLLCFQHQEESLAQGPPLLAXSVXSWWSPQNISLPSAASFXFSFHSPPHXAAHNASVDMCELKRDLQLLSQFLKHPQKASRRPSAAPASQQLQSLESKLXSVRFMGDMVSFEEDRINAXVWKLQPXAGLQDLHIHSRQE

SEQ ID NO: 1723 - protein, 687 aa, Homo sapiens
  MOD_RES (2)..(2): Selenocysteine
  MOD_RES (9)..(10): Selenocysteine
  MOD_RES (41)..(41): Selenocysteine
  MOD_RES (51)..(51): Selenocysteine
  MOD_RES (66)..(66): Selenocysteine
  MOD_RES (138)..(138): Selenocysteine
  MOD_RES (141)..(141): Selenocysteine
  MOD_RES (158)..(158): Selenocysteine
  MOD_RES (167)..(167): Selenocysteine
  MOD_RES (217)..(217): Selenocysteine
  MOD_RES (236)..(236): Selenocysteine
  MOD_RES (243)..(243): Selenocysteine
  MOD_RES (272)..(272): Selenocysteine
  MOD_RES (277)..(277): Selenocysteine
  MOD_RES (320)..(320): Selenocysteine
  MOD_RES (326)..(326): Selenocysteine
  MOD_RES (332)..(332): Selenocysteine
  MOD_RES (343)..(343): Selenocysteine
  MOD_RES (354)..(354): Selenocysteine
  MOD_RES (368)..(368): Selenocysteine
  MOD_RES (373)..(373): Selenocysteine
  MOD_RES (375)..(375): Selenocysteine
  MOD_RES (383)..(383): Selenocysteine
  MOD_RES (421)..(421): Selenocysteine
  MOD_RES (436)..(436): Selenocysteine
  MOD_RES (452)..(452): Selenocysteine
  MOD_RES (463)..(463): Selenocysteine
  MOD_RES (482)..(482): Selenocysteine
  MOD_RES (504)..(504): Selenocysteine
  MOD_RES (526)..(526): Selenocysteine
  MOD_RES (546)..(546): Selenocysteine
  MOD_RES (567)..(567): Selenocysteine
  MOD_RES (585)..(585): Selenocysteine
  MOD_RES (597)..(597): Selenocysteine
  MOD_RES (605)..(605): Selenocysteine
  MOD_RES (628)..(628): Selenocysteine
  MOD_RES (641)..(641): Selenocysteine
  MOD_RES (682)..(682): Selenocysteine
MXPQSLLQXXLFLLSLLFLVQGAHGRGHREDFRFCSQRNQXHRSSLHYKPXPDLRISIENSEEALXVHAPFPAAHPASRSFPDPRGLYHFCLYWNRHAGRLHLLYGKRDFLLSDKASSLLCFQHQEESLAQGPPLLAXSVXSWWSPQNISLPSAASFXFSFHSPPHXAAHNASVDMCELKRDLQLLSQFLKHPQKASRRPSAAPASQQLQSLESKLXSVRFMGDMVSFEEDRINAXVWKLQPXAGLQDLHIHSRQEEEQSEIMEYSVLLPRXLFQRXKGRSGEAEKRLLLVDFSSQALFQDKNSSQVLGEKVLGIVVQNXKVANLXEPVVLXFQHQLQPKNVXLQCVFWVEDPXLSSPGHWSSAGCEXVRREXQXSCFCNHLXYFAVLMVSSVEVDAVHKHYLSLLSYVGCVVSALACLVXIAAYLCSRRKPRDYXIKVHMNLLLAVFLLDXSFLLSEPVALXGSEAGCRASAIFLHFSLLXCLSWMGLEGYNLYRLVVEVFGXYVPGYLLKLSAMGWGFPIFLVXLVALVDVDNYGPIILAVHRXPEGVIYPSMCWIRDSLVSYIXNLGLFSLVFLFNMAMLAXMVVQILRLRPHXQKWSHVLXLLGLSLVLGLPWALIFFSFASGXFQLVVLYLFSIIXSFQGFLIFIWYWSMRLQARGGPSPLKSNSDSARLPISSGSXSSSRI

SEQ ID NO: 1724 - protein, 693 aa, Homo sapiens
  MOD_RES (2)..(2): Selenocysteine
  MOD_RES (9)..(10): Selenocysteine
  MOD_RES (41)..(41): Selenocysteine
  MOD_RES (51)..(51): Selenocysteine
  MOD_RES (66)..(66): Selenocysteine
  MOD_RES (138)..(138): Selenocysteine
  MOD_RES (141)..(141): Selenocysteine
  MOD_RES (158)..(158): Selenocysteine
  MOD_RES (167)..(167): Selenocysteine
  MOD_RES (217)..(217): Selenocysteine
  MOD_RES (236)..(236): Selenocysteine
  MOD_RES (243)..(243): Selenocysteine
  MOD_RES (272)..(272): Selenocysteine
  MOD_RES (277)..(277): Selenocysteine
  MOD_RES (320)..(320): Selenocysteine
  MOD_RES (326)..(326): Selenocysteine
  MOD_RES (332)..(332): Selenocysteine
  MOD_RES (343)..(343): Selenocysteine
  MOD_RES (354)..(354): Selenocysteine
  MOD_RES (368)..(368): Selenocysteine
  MOD_RES (373)..(373): Selenocysteine
  MOD_RES (375)..(375): Selenocysteine
  MOD_RES (383)..(383): Selenocysteine
  MOD_RES (421)..(421): Selenocysteine
  MOD_RES (442)..(442): Selenocysteine
  MOD_RES (458)..(458): Selenocysteine
  MOD_RES (469)..(469): Selenocysteine
  MOD_RES (488)..(488): Selenocysteine
  MOD_RES (510)..(510): Selenocysteine
  MOD_RES (532)..(532): Selenocysteine
  MOD_RES (552)..(552): Selenocysteine
  MOD_RES (573)..(573): Selenocysteine
  MOD_RES (591)..(591): Selenocysteine
  MOD_RES (603)..(603): Selenocysteine
  MOD_RES (611)..(611): Selenocysteine
  MOD_RES (634)..(634): Selenocysteine
  MOD_RES (647)..(647): Selenocysteine
  MOD_RES (688)..(688): Selenocysteine
MXPQSLLQXXLFLLSLLFLVQGAHGRGHREDFRFCSQRNQXHRSSLHYKPXPDLRISIENSEEALXVHAPFPAAHPASRSFPDPRGLYHFCLYWNRHAGRLHLLYGKRDFLLSDKASSLLCFQHQEESLAQGPPLLAXSVXSWWSPQNISLPSAASFXFSFHSPPHXAAHNASVDMCELKRDLQLLSQFLKHPQKASRRPSAAPASQQLQSLESKLXSVRFMGDMVSFEEDRINAXVWKLQPXAGLQDLHIHSRQEEEQSEIMEYSVLLPRXLFQRXKGRSGEAEKRLLLVDFSSQALFQDKNSSQVLGEKVLGIVVQNXKVANLXEPVVLXFQHQLQPKNVXLQCVFWVEDPXLSSPGHWSSAGCEXVRREXQXSCFCNHLXYFAVLMVSSVEVDAVHKHYLSLLSYVGCVVSALACLVXIAAYLCSRVPLPCRRKPRDYXIKVHMNLLLAVFLLDXSFLLSEPVALXGSEAGCRASAIFLHFSLLXCLSWMGLEGYNLYRLVVEVFGXYVPGYLLKLSAMGWGFPIFLVXLVALVDVDNYGPIILAVHRXPEGVIYPSMCWIRDSLVSYIXNLGLFSLVFLFNMAMLAXMVVQILRLRPHXQKWSHVLXLLGLSLVLGLPWALIFFSFASGXFQLVVLYLFSIIXSFQGFLIFIWYWSMRLQARGGPSPLKSNSDSARLPISSGSXSSSRI

SEQ ID NO: 1725 - protein, 78 aa, Homo sapiens
  MOD_RES (2)..(2): Selenocysteine
  MOD_RES (9)..(10): Selenocysteine
  MOD_RES (43)..(43): Selenocysteine
  MOD_RES (51)..(51): Selenocysteine
  MOD_RES (53)..(53): Selenocysteine
MXPQSLLQXXLFLLSLLFLVQGRCPRQGPQGRLSLLQPAEPDXQEQPPLQXHXRPAHLHRELRRGPHSPCPFPCSPPC

SEQ ID NO: 1726 - protein, 81 aa, Homo sapiens
  MOD_RES (2)..(2): Selenocysteine
  MOD_RES (9)..(10): Selenocysteine
  MOD_RES (43)..(43): Selenocysteine
  MOD_RES (51)..(51): Selenocysteine
  MOD_RES (53)..(53): Selenocysteine
MXPQSLLQXXLFLLSLLFLVQGRCPRQGPQGRLSLLQPAEPDXQEQPPLQXHXRPAHLHRELRRGPHSPCPFPCSPPCFPI

SEQ ID NO: 1727 - protein, 97 aa, Homo sapiens
  MOD_RES (2)..(2): Selenocysteine
  MOD_RES (9)..(10): Selenocysteine
  MOD_RES (25)..(25): Selenocysteine
  MOD_RES (28)..(28): Selenocysteine
  MOD_RES (33)..(34): Selenocysteine
  MOD_RES (39)..(39): Selenocysteine
  MOD_RES (46)..(46): Selenocysteine
  MOD_RES (61)..(61): Selenocysteine
  MOD_RES (69)..(69): Selenocysteine
  MOD_RES (74)..(75): Selenocysteine
  MOD_RES (79)..(79): Selenocysteine
  MOD_RES (81)..(81): Selenocysteine
  MOD_RES (95)..(95): Selenocysteine
MXPQSLLQXXLFLLSLLFLVQGSGXRHXGAASXXNPHQXCASPSRXPKRPSQSMPLSLQPXLLPDPSLXPGASXXSASXGXDMLGDYIFSMASVXSC

SEQ ID NO: 1728 - protein, 187 aa, Homo sapiens
  MOD_RES (1)..(1): Any amino acid
  MOD_RES (46)..(46): Selenocysteine
  MOD_RES (65)..(65): Selenocysteine
  MOD_RES (72)..(72): Selenocysteine
  MOD_RES (101)..(101): Selenocysteine
  MOD_RES (106)..(106): Selenocysteine
  MOD_RES (144)..(144): Selenocysteine
  MOD_RES (166)..(166): Selenocysteine
  MOD_RES (186)..(186): Selenocysteine
XSVDMCELKRDLQLLSQFLKHPQKASRRPSAAPASQQLQSLESKLXSVRFMGDMVSFEEDRINAXVWKLQPXAGLQDLHIHSRQEEEQSEIMEYSVLLPRXLFQRXKGRSGEAEKRLLLVDFSSQALFQDKNSSQVLGEKVFGXYVPGYLLKLSAMGWGFPIFLVXLVALVDVDNYGPIILAVHRXP

SEQ ID NO: 1729 - protein, 1014 aa, Homo sapiens
  MOD_RES (14)..(14): Selenocysteine
  MOD_RES (20)..(20): Selenocysteine
  MOD_RES (36)..(36): Selenocysteine
  MOD_RES (42)..(42): Selenocysteine
  MOD_RES (68)..(69): Selenocysteine
  MOD_RES (75)..(75): Selenocysteine
  MOD_RES (84)..(84): Selenocysteine
  MOD_RES (87)..(87): Selenocysteine
  MOD_RES (90)..(90): Selenocysteine
  MOD_RES (94)..(94): Selenocysteine
  MOD_RES (132)..(132): Selenocysteine
  MOD_RES (140)..(140): Selenocysteine
  MOD_RES (143)..(143): Selenocysteine
  MOD_RES (145)..(145): Selenocysteine
  MOD_RES (161)..(161): Selenocysteine
  MOD_RES (164)..(164): Selenocysteine
  MOD_RES (168)..(168): Selenocysteine
  MOD_RES (175)..(175): Selenocysteine
  MOD_RES (181)..(181): Selenocysteine
  MOD_RES (185)..(185): Selenocysteine
  MOD_RES (187)..(187): Selenocysteine
  MOD_RES (193)..(193): Selenocysteine
  MOD_RES (265)..(265): Selenocysteine
  MOD_RES (274)..(274): Selenocysteine
  MOD_RES (286)..(286): Selenocysteine
  MOD_RES (321)..(321): Selenocysteine
  MOD_RES (329)..(329): Selenocysteine
  MOD_RES (334)..(334): Selenocysteine
  MOD_RES (346)..(346): Selenocysteine
  MOD_RES (355)..(356): Selenocysteine
  MOD_RES (363)..(363): Selenocysteine
  MOD_RES (368)..(368): Selenocysteine
  MOD_RES (436)..(437): Selenocysteine
  MOD_RES (441)..(441): Selenocysteine
  MOD_RES (459)..(461): Selenocysteine
  MOD_RES (476)..(476): Selenocysteine
  MOD_RES (485)..(485): Selenocysteine
  MOD_RES (487)..(487): Selenocysteine
  MOD_RES (514)..(514): Selenocysteine
  MOD_RES (541)..(541): Selenocysteine
  MOD_RES (546)..(546): Selenocysteine
  MOD_RES (550)..(550): Selenocysteine
  MOD_RES (552)..(552): Selenocysteine
  MOD_RES (564)..(564): Selenocysteine
  MOD_RES (596)..(596): Selenocysteine
  MOD_RES (599)..(599): Selenocysteine
  MOD_RES (604)..(604): Selenocysteine
  MOD_RES (615)..(615): Selenocysteine
  MOD_RES (626)..(626): Selenocysteine
  MOD_RES (629)..(629): Selenocysteine
  MOD_RES (643)..(643): Selenocysteine
  MOD_RES (646)..(646): Selenocysteine
  MOD_RES (707)..(707): Selenocysteine
  MOD_RES (726)..(726): Selenocysteine
  MOD_RES (748)..(748): Selenocysteine
  MOD_RES (752)..(752): Selenocysteine
  MOD_RES (786)..(786): Selenocysteine
  MOD_RES (824)..(824): Selenocysteine
  MOD_RES (836)..(836): Selenocysteine
  MOD_RES (842)..(842): Selenocysteine
  MOD_RES (856)..(856): Selenocysteine
  MOD_RES (866)..(866): Selenocysteine
  MOD_RES (907)..(907): Selenocysteine
  MOD_RES (909)..(909): Selenocysteine
  MOD_RES (916)..(916): Selenocysteine
  MOD_RES (935)..(935): Selenocysteine
  MOD_RES (938)..(939): Selenocysteine
  MOD_RES (958)..(958): Selenocysteine
  MOD_RES (978)..(978): Selenocysteine
  MOD_RES (1002)..(1002): Selenocysteine
MVFSVRQCGHVGRXEEVLLXFKIFLVIICLHVVLVXSLEEDXDNSSLSPPPAKLSVVSFAPSSNEVEXXSLNDVXLSLLPSNEXEKXKIXIVKXFNASGVKPQRNICNLSSICNDSAFFRGEIMFQYDKESXVPQNQHIXNGXLXGVLSLSELKRSELNKXLQXLSEXYFIMCAXAEAQSXLNCXFXIKLNNXMNACAVIAALERVKIRPMEHCCCSVRIPCPSSPEELEKLQCDLQDPIVCLADHPRGPPFSSSQSIPVVPRAXVLSQVPKAXSFAEPPDYSPVXHNVPSPIGEIQPLSPQPSAPIASSPAIDMPPQSEXISSPMPQXHVSGXPPPVKASFSSPXVSAPANVNXXSAPPVQXDIVNXSSISDLENQVLQMEKALSLGSLEPNLAGEMINQVSRLLHSPPDMLAPLAQRLLKVVDDIGLQLNFSNXXISLXSPSLALAVIRVNASSFNXXXFVAQDPANLQVSLEXQAPENSIGXIXLPSSLMNNLPAHDMELASRVQFNFFEXPALFQDPSLENLSLISYVISSSVANLXVRNLXRNVXVXLKHINPSQDELXVRCVFWDLGRNGGRGGWSDNGCSVKDRRLNEXICXCSHLXSFGVLLDLSRXSVLPAQMMALXFIXYIGCGLSSIFLSVXLVXYIAFEKIRRDYPSKILIQLCAALLLLNLVFLLDSWIALYKMQGLCISVAVFLHYFLLVSFXWMGLEAFHMYLALVKVFNXYIRKYILKFCIVGWGVPAVVVXIILXISPDNYGLGSYGKFPNGSPDDFCWINNNAVFYIXVVGYFCVIFLLNVSMFIVVLVQLCRIKKKKQLGAQRKXSIQDLRSIAGLXFLLGIXWGFAFFAWGPVNVXFMYLFAIFNXLQGFFIFIFYCVAKENVRKQWRRYLCCGKLRLAENSDWSKXAXNGLKKQXVNQGVSSSSNSLQSSSNSXNSXXLLVNNDCSVHASGNGNASXERNGVSFSVQNGDVCLHDFXGKQHMFNEKEDSCNGKGRMALRRXSKRGSLHFIEQM

SEQ ID NO: 1730 - protein, 995 aa, Homo sapiens
  MOD_RES (14)..(14): Selenocysteine
  MOD_RES (20)..(20): Selenocysteine
  MOD_RES (36)..(36): Selenocysteine
  MOD_RES (42)..(42): Selenocysteine
  MOD_RES (66)..(66): Selenocysteine
  MOD_RES (70)..(70): Selenocysteine
  MOD_RES (79)..(79): Selenocysteine
  MOD_RES (113)..(113): Selenocysteine
  MOD_RES (121)..(121): Selenocysteine
  MOD_RES (124)..(124): Selenocysteine
  MOD_RES (126)..(126): Selenocysteine
  MOD_RES (142)..(142): Selenocysteine
  MOD_RES (145)..(145): Selenocysteine
  MOD_RES (149)..(149): Selenocysteine
  MOD_RES (156)..(156): Selenocysteine
  MOD_RES (162)..(162): Selenocysteine
  MOD_RES (166)..(166): Selenocysteine
  MOD_RES (168)..(168): Selenocysteine
  MOD_RES (174)..(174): Selenocysteine
  MOD_RES (246)..(246): Selenocysteine
  MOD_RES (255)..(255): Selenocysteine
  MOD_RES (267)..(267): Selenocysteine
  MOD_RES (302)..(302): Selenocysteine
  MOD_RES (310)..(310): Selenocysteine
  MOD_RES (315)..(315): Selenocysteine
  MOD_RES (327)..(327): Selenocysteine
  MOD_RES (336)..(337): Selenocysteine
  MOD_RES (344)..(344): Selenocysteine
  MOD_RES (349)..(349): Selenocysteine
  MOD_RES (417)..(418): Selenocysteine
  MOD_RES (422)..(422): Selenocysteine
  MOD_RES (440)..(442): Selenocysteine
  MOD_RES (457)..(457): Selenocysteine
  MOD_RES (466)..(466): Selenocysteine
  MOD_RES (468)..(468): Selenocysteine
  MOD_RES (495)..(495): Selenocysteine
  MOD_RES (522)..(522): Selenocysteine
  MOD_RES (527)..(527): Selenocysteine
  MOD_RES (531)..(531): Selenocysteine
  MOD_RES (533)..(533): Selenocysteine
  MOD_RES (545)..(545): Selenocysteine
  MOD_RES (577)..(577): Selenocysteine
  MOD_RES (580)..(580): Selenocysteine
  MOD_RES (585)..(585): Selenocysteine
  MOD_RES (596)..(596): Selenocysteine
  MOD_RES (607)..(607): Selenocysteine
  MOD_RES (610)..(610): Selenocysteine
  MOD_RES (624)..(624): Selenocysteine
  MOD_RES (627)..(627): Selenocysteine
  MOD_RES (688)..(688): Selenocysteine
  MOD_RES (707)..(707): Selenocysteine
  MOD_RES (729)..(729): Selenocysteine
  MOD_RES (733)..(733): Selenocysteine
  MOD_RES (767)..(767): Selenocysteine
  MOD_RES (805)..(805): Selenocysteine
  MOD_RES (817)..(817): Selenocysteine
  MOD_RES (823)..(823): Selenocysteine
  MOD_RES (837)..(837): Selenocysteine
  MOD_RES (847)..(847): Selenocysteine
  MOD_RES (888)..(888): Selenocysteine
  MOD_RES (890)..(890): Selenocysteine
  MOD_RES (897)..(897): Selenocysteine
  MOD_RES (916)..(916): Selenocysteine
  MOD_RES (919)..(920): Selenocysteine
  MOD_RES (939)..(939): Selenocysteine
  MOD_RES (959)..(959): Selenocysteine
  MOD_RES (983)..(983): Selenocysteine
MVFSVRQCGHVGRXEEVLLXFKIFLVIICLHVVLVXSLEEDXDNSSLSPPPAKLSVVSFAPSSNGXPDVXLSLLPSNEXGVKPQRNICNLSSICNDSAFFRGEIMFQYDKESXVPQNQHIXNGXLXGVLSLSELKRSELNKXLQXLSEXYFIMCAXAEAQSXLNCXFXIKLNNXMNACAVIAALERVKIRPMEHCCCSVRIPCPSSPEELEKLQCDLQDPIVCLADHPRGPPFSSSQSIPVVPRAXVLSQVPKAXSFAEPPDYSPVXHNVPSPIGEIQPLSPQPSAPIASSPAIDMPPQSEXISSPMPQXHVSGXPPPVKASFSSPXVSAPANVNXXSAPPVQXDIVNXSSISDLENQVLQMEKALSLGSLEPNLAGEMINQVSRLLHSPPDMLAPLAQRLLKVVDDIGLQLNFSNXXISLXSPSLALAVIRVNASSFNXXXFVAQDPANLQVSLEXQAPENSIGXIXLPSSLMNNLPAHDMELASRVQFNFFEXPALFQDPSLENLSLISYVISSSVANLXVRNLXRNVXVXLKHINPSQDELXVRCVFWDLGRNGGRGGWSDNGCSVKDRRLNEXICXCSHLXSFGVLLDLSRXSVLPAQMMALXFIXYIGCGLSSIFLSVXLVXYIAFEKIRRDYPSKILIQLCAALLLLNLVFLLDSWIALYKMQGLCISVAVFLHYFLLVSFXWMGLEAFHMYLALVKVFNXYIRKYILKFCIVGWGVPAVVVXIILXISPDNYGLGSYGKFPNGSPDDFCWINNNAVFYIXVVGYFCVIFLLNVSMFIVVLVQLCRIKKKKQLGAQRKXSIQDLRSIAGLXFLLGIXWGFAFFAWGPVNVXFMYLFAIFNXLQGFFIFIFYCVAKENVRKQWRRYLCCGKLRLAENSDWSKXAXNGLKKQXVNQGVSSSSNSLQSSSNSXNSXXLLVNNDCSVHASGNGNASXERNGVSFSVQNGDVCLHDFXGKQHMFNEKEDSCNGKGRMALRRXSKRGSLHFIEQM

SEQ ID NO: 1731 - protein, 966 aa, Homo sapiens
  MOD_RES (14)..(14): Selenocysteine
  MOD_RES (20)..(20): Selenocysteine
  MOD_RES (36)..(36): Selenocysteine
  MOD_RES (42)..(42): Selenocysteine
  MOD_RES (66)..(66): Selenocysteine
  MOD_RES (71)..(72): Selenocysteine
  MOD_RES (78)..(78): Selenocysteine
  MOD_RES (87)..(87): Selenocysteine
  MOD_RES (90)..(90): Selenocysteine
  MOD_RES (93)..(93): Selenocysteine
  MOD_RES (97)..(97): Selenocysteine
  MOD_RES (135)..(135): Selenocysteine
  MOD_RES (143)..(143): Selenocysteine
  MOD_RES (146)..(146): Selenocysteine
  MOD_RES (148)..(148): Selenocysteine
  MOD_RES (164)..(164): Selenocysteine
  MOD_RES (167)..(167): Selenocysteine
  MOD_RES (171)..(171): Selenocysteine
  MOD_RES (178)..(178): Selenocysteine
  MOD_RES (184)..(184): Selenocysteine
  MOD_RES (188)..(188): Selenocysteine
  MOD_RES (190)..(190): Selenocysteine
  MOD_RES (196)..(196): Selenocysteine
  MOD_RES (268)..(268): Selenocysteine
  MOD_RES (277)..(277): Selenocysteine
  MOD_RES (289)..(289): Selenocysteine
  MOD_RES (324)..(324): Selenocysteine
  MOD_RES (332)..(332): Selenocysteine
  MOD_RES (337)..(337): Selenocysteine
  MOD_RES (349)..(349): Selenocysteine
  MOD_RES (358)..(359): Selenocysteine
  MOD_RES (366)..(366): Selenocysteine
  MOD_RES (371)..(371): Selenocysteine
  MOD_RES (439)..(440): Selenocysteine
  MOD_RES (444)..(444): Selenocysteine
  MOD_RES (462)..(464): Selenocysteine
  MOD_RES (479)..(479): Selenocysteine
  MOD_RES (488)..(488): Selenocysteine
  MOD_RES (490)..(490): Selenocysteine
  MOD_RES (517)..(517): Selenocysteine
  MOD_RES (544)..(544): Selenocysteine
  MOD_RES (549)..(549): Selenocysteine
  MOD_RES (553)..(553): Selenocysteine
  MOD_RES (555)..(555): Selenocysteine
  MOD_RES (567)..(567): Selenocysteine
  MOD_RES (599)..(599): Selenocysteine
  MOD_RES (602)..(602): Selenocysteine
  MOD_RES (607)..(607): Selenocysteine
  MOD_RES (618)..(618): Selenocysteine
  MOD_RES (629)..(629): Selenocysteine
  MOD_RES (632)..(632): Selenocysteine
  MOD_RES (646)..(646): Selenocysteine
  MOD_RES (649)..(649): Selenocysteine
  MOD_RES (710)..(710): Selenocysteine
  MOD_RES (729)..(729): Selenocysteine
  MOD_RES (751)..(751): Selenocysteine
  MOD_RES (755)..(755): Selenocysteine
  MOD_RES (789)..(789): Selenocysteine
  MOD_RES (827)..(827): Selenocysteine
  MOD_RES (839)..(839): Selenocysteine
  MOD_RES (845)..(845): Selenocysteine
  MOD_RES (859)..(859): Selenocysteine
  MOD_RES (869)..(869): Selenocysteine
  MOD_RES (910)..(910): Selenocysteine
  MOD_RES (930)..(930): Selenocysteine
  MOD_RES (954)..(954): Selenocysteine
MVFSVRQCGHVGRXEEVLLXFKIFLVIICLHVVLVXSLEEDXDNSSLSPPPAKLSVVSFAPSSNGXPEVEXXSLNDVXLSLLPSNEXEKXKIXIVKXFNASGVKPQRNICNLSSICNDSAFFRGEIMFQYDKESXVPQNQHIXNGXLXGVLSLSELKRSELNKXLQXLSEXYFIMCAXAEAQSXLNCXFXIKLNNXMNACAVIAALERVKIRPMEHCCCSVRIPCPSSPEELEKLQCDLQDPIVCLADHPRGPPFSSSQSIPVVPRAXVLSQVPKAXSFAEPPDYSPVXHNVPSPIGEIQPLSPQPSAPIASSPAIDMPPQSEXISSPMPQXHVSGXPPPVKASFSSPXVSAPANVNXXSAPPVQXDIVNXSSISDLENQVLQMEKALSLGSLEPNLAGEMINQVSRLLHSPPDMLAPLAQRLLKVVDDIGLQLNFSNXXISLXSPSLALAVIRVNASSFNXXXFVAQDPANLQVSLEXQAPENSIGXIXLPSSLMNNLPAHDMELASRVQFNFFEXPALFQDPSLENLSLISYVISSSVANLXVRNLXRNVXVXLKHINPSQDELXVRCVFWDLGRNGGRGGWSDNGCSVKDRRLNEXICXCSHLXSFGVLLDLSRXSVLPAQMMALXFIXYIGCGLSSIFLSVXLVXYIAFEKIRRDYPSKILIQLCAALLLLNLVFLLDSWIALYKMQGLCISVAVFLHYFLLVSFXWMGLEAFHMYLALVKVFNXYIRKYILKFCIVGWGVPAVVVXIILXISPDNYGLGSYGKFPNGSPDDFCWINNNAVFYIXVVGYFCVIFLLNVSMFIVVLVQLCRIKKKKQLGAQRKXSIQDLRSIAGLXFLLGIXWGFAFFAWGPVNVXFMYLFAIFNXLQGFFIFIFYCVAKENVRKQWRRYLCCGKLRLAENSGNASXERNGVSFSVQNGDVCLHDFXGKQHMFNEKEDSCNGKGRMALRRXSKRGSLHFIEQM

SEQ ID NO: 1732 - protein, 1017 aa, Homo sapiens
  MOD_RES (14)..(14): Selenocysteine
  MOD_RES (20)..(20): Selenocysteine
  MOD_RES (36)..(36): Selenocysteine
  MOD_RES (42)..(42): Selenocysteine
  MOD_RES (66)..(66): Selenocysteine
  MOD_RES (71)..(72): Selenocysteine
  MOD_RES (78)..(78): Selenocysteine
  MOD_RES (87)..(87): Selenocysteine
  MOD_RES (90)..(90): Selenocysteine
  MOD_RES (93)..(93): Selenocysteine
  MOD_RES (97)..(97): Selenocysteine
  MOD_RES (135)..(135): Selenocysteine
  MOD_RES (143)..(143): Selenocysteine
  MOD_RES (146)..(146): Selenocysteine
  MOD_RES (148)..(148): Selenocysteine
  MOD_RES (164)..(164): Selenocysteine
  MOD_RES (167)..(167): Selenocysteine
  MOD_RES (171)..(171): Selenocysteine
  MOD_RES (178)..(178): Selenocysteine
  MOD_RES (184)..(184): Selenocysteine
  MOD_RES (188)..(188): Selenocysteine
  MOD_RES (190)..(190): Selenocysteine
  MOD_RES (196)..(196): Selenocysteine
  MOD_RES (268)..(268): Selenocysteine
  MOD_RES (277)..(277): Selenocysteine
  MOD_RES (289)..(289): Selenocysteine
  MOD_RES (324)..(324): Selenocysteine
  MOD_RES (332)..(332): Selenocysteine
  MOD_RES (337)..(337): Selenocysteine
  MOD_RES (349)..(349): Selenocysteine
  MOD_RES (358)..(359): Selenocysteine
  MOD_RES (366)..(366): Selenocysteine
  MOD_RES (371)..(371): Selenocysteine
  MOD_RES (439)..(440): Selenocysteine
  MOD_RES (444)..(444): Selenocysteine
  MOD_RES (462)..(464): Selenocysteine
  MOD_RES (479)..(479): Selenocysteine
  MOD_RES (488)..(488): Selenocysteine
  MOD_RES (490)..(490): Selenocysteine
  MOD_RES (517)..(517): Selenocysteine
  MOD_RES (544)..(544): Selenocysteine
  MOD_RES (549)..(549): Selenocysteine
  MOD_RES (553)..(553): Selenocysteine
  MOD_RES (555)..(555): Selenocysteine
  MOD_RES (567)..(567): Selenocysteine
  MOD_RES (599)..(599): Selenocysteine
  MOD_RES (602)..(602): Selenocysteine
  MOD_RES (607)..(607): Selenocysteine
  MOD_RES (618)..(618): Selenocysteine
  MOD_RES (629)..(629): Selenocysteine
  MOD_RES (632)..(632): Selenocysteine
  MOD_RES (646)..(646): Selenocysteine
  MOD_RES (649)..(649): Selenocysteine
  MOD_RES (710)..(710): Selenocysteine
  MOD_RES (729)..(729): Selenocysteine
  MOD_RES (751)..(751): Selenocysteine
  MOD_RES (755)..(755): Selenocysteine
  MOD_RES (789)..(789): Selenocysteine
  MOD_RES (827)..(827): Selenocysteine
  MOD_RES (839)..(839): Selenocysteine
  MOD_RES (845)..(845): Selenocysteine
  MOD_RES (859)..(859): Selenocysteine
  MOD_RES (869)..(869): Selenocysteine
  MOD_RES (910)..(910): Selenocysteine
  MOD_RES (912)..(912): Selenocysteine
  MOD_RES (919)..(919): Selenocysteine
  MOD_RES (938)..(938): Selenocysteine
  MOD_RES (941)..(942): Selenocysteine
  MOD_RES (961)..(961): Selenocysteine
  MOD_RES (981)..(981): Selenocysteine
  MOD_RES (1005)..(1005): Selenocysteine
MVFSVRQCGHVGRXEEVLLXFKIFLVIICLHVVLVXSLEEDXDNSSLSPPPAKLSVVSFAPSSNGXPEVEXXSLNDVXLSLLPSNEXEKXKIXIVKXFNASGVKPQRNICNLSSICNDSAFFRGEIMFQYDKESXVPQNQHIXNGXLXGVLSLSELKRSELNKXLQXLSEXYFIMCAXAEAQSXLNCXFXIKLNNXMNACAVIAALERVKIRPMEHCCCSVRIPCPSSPEELEKLQCDLQDPIVCLADHPRGPPFSSSQSIPVVPRAXVLSQVPKAXSFAEPPDYSPVXHNVPSPIGEIQPLSPQPSAPIASSPAIDMPPQSEXISSPMPQXHVSGXPPPVKASFSSPXVSAPANVNXXSAPPVQXDIVNXSSISDLENQVLQMEKALSLGSLEPNLAGEMINQVSRLLHSPPDMLAPLAQRLLKVVDDIGLQLNFSNXXISLXSPSLALAVIRVNASSFNXXXFVAQDPANLQVSLEXQAPENSIGXIXLPSSLMNNLPAHDMELASRVQFNFFEXPALFQDPSLENLSLISYVISSSVANLXVRNLXRNVXVXLKHINPSQDELXVRCVFWDLGRNGGRGGWSDNGCSVKDRRLNEXICXCSHLXSFGVLLDLSRXSVLPAQMMALXFIXYIGCGLSSIFLSVXLVXYIAFEKIRRDYPSKILIQLCAALLLLNLVFLLDSWIALYKMQGLCISVAVFLHYFLLVSFXWMGLEAFHMYLALVKVFNXYIRKYILKFCIVGWGVPAVVVXIILXISPDNYGLGSYGKFPNGSPDDFCWINNNAVFYIXVVGYFCVIFLLNVSMFIVVLVQLCRIKKKKQLGAQRKXSIQDLRSIAGLXFLLGIXWGFAFFAWGPVNVXFMYLFAIFNXLQGFFIFIFYCVAKENVRKQWRRYLCCGKLRLAENSDWSKXAXNGLKKQXVNQGVSSSSNSLQSSSNSXNSXXLLVNNDCSVHASGNGNASXERNGVSFSVQNGDVCLHDFXGKQHMFNEKEDSCNGKGRMALRRXSKRGSLHFIEQM

SEQ ID NO: 1733 - protein, 1003 aa, Homo sapiens
  MOD_RES (14)..(14): Selenocysteine
  MOD_RES (20)..(20): Selenocysteine
  MOD_RES (36)..(36): Selenocysteine
  MOD_RES (42)..(42): Selenocysteine
  MOD_RES (66)..(66): Selenocysteine
  MOD_RES (71)..(72): Selenocysteine
  MOD_RES (78)..(78): Selenocysteine
  MOD_RES (87)..(87): Selenocysteine
  MOD_RES (121)..(121): Selenocysteine
  MOD_RES (129)..(129): Selenocysteine
  MOD_RES (132)..(132): Selenocysteine
  MOD_RES (134)..(134): Selenocysteine
  MOD_RES (150)..(150): Selenocysteine
  MOD_RES (153)..(153): Selenocysteine
  MOD_RES (157)..(157): Selenocysteine
  MOD_RES (164)..(164): Selenocysteine
  MOD_RES (170)..(170): Selenocysteine
  MOD_RES (174)..(174): Selenocysteine
  MOD_RES (176)..(176): Selenocysteine
  MOD_RES (182)..(182): Selenocysteine
  MOD_RES (254)..(254): Selenocysteine
  MOD_RES (263)..(263): Selenocysteine
  MOD_RES (275)..(275): Selenocysteine
  MOD_RES (310)..(310): Selenocysteine
  MOD_RES (318)..(318): Selenocysteine
  MOD_RES (323)..(323): Selenocysteine
  MOD_RES (335)..(335): Selenocysteine
  MOD_RES (344)..(345): Selenocysteine
  MOD_RES (352)..(352): Selenocysteine
  MOD_RES (357)..(357): Selenocysteine
  MOD_RES (425)..(426): Selenocysteine
  MOD_RES (430)..(430): Selenocysteine
  MOD_RES (448)..(450): Selenocysteine
  MOD_RES (465)..(465): Selenocysteine
  MOD_RES (474)..(474): Selenocysteine
  MOD_RES (476)..(476): Selenocysteine
  MOD_RES (503)..(503): Selenocysteine
  MOD_RES (530)..(530): Selenocysteine
  MOD_RES (535)..(535): Selenocysteine
  MOD_RES (539)..(539): Selenocysteine
  MOD_RES (541)..(541): Selenocysteine
  MOD_RES (553)..(553): Selenocysteine
  MOD_RES (585)..(585): Selenocysteine
  MOD_RES (588)..(588): Selenocysteine
  MOD_RES (593)..(593): Selenocysteine
  MOD_RES (604)..(604): Selenocysteine
  MOD_RES (615)..(615): Selenocysteine
  MOD_RES (618)..(618): Selenocysteine
  MOD_RES (632)..(632): Selenocysteine
  MOD_RES (635)..(635): Selenocysteine
  MOD_RES (696)..(696): Selenocysteine
  MOD_RES (715)..(715): Selenocysteine
  MOD_RES (737)..(737): Selenocysteine
  MOD_RES (741)..(741): Selenocysteine
  MOD_RES (775)..(775): Selenocysteine
  MOD_RES (813)..(813): Selenocysteine
  MOD_RES (825)..(825): Selenocysteine
  MOD_RES (831)..(831): Selenocysteine
  MOD_RES (845)..(845): Selenocysteine
  MOD_RES (855)..(855): Selenocysteine
  MOD_RES (896)..(896): Selenocysteine
  MOD_RES (898)..(898): Selenocysteine
  MOD_RES (905)..(905): Selenocysteine
  MOD_RES (924)..(924): Selenocysteine
  MOD_RES (927)..(928): Selenocysteine
  MOD_RES (947)..(947): Selenocysteine
  MOD_RES (967)..(967): Selenocysteine
  MOD_RES (991)..(991): Selenocysteine
MVFSVRQCGHVGRXEEVLLXFKIFLVIICLHVVLVXSLEEDXDNSSLSPPPAKLSVVSFAPSSNGXPEVEXXSLNDVXLSLLPSNEXGVKPQRNICNLSSICNDSAFFRGEIMFQYDKESXVPQNQHIXNGXLXGVLSLSELKRSELNKXLQXLSEXYFIMCAXAEAQSXLNCXFXIKLNNXMNACAVIAALERVKIRPMEHCCCSVRIPCPSSPEELEKLQCDLQDPIVCLADHPRGPPFSSSQSIPVVPRAXVLSQVPKAXSFAEPPDYSPVXHNVPSPIGEIQPLSPQPSAPIASSPAIDMPPQSEXISSPMPQXHVSGXPPPVKASFSSPXVSAPANVNXXSAPPVQXDIVNXSSISDLENQVLQMEKALSLGSLEPNLAGEMINQVSRLLHSPPDMLAPLAQRLLKVVDDIGLQLNFSNXXISLXSPSLALAVIRVNASSFNXXXFVAQDPANLQVSLEXQAPENSIGXIXLPSSLMNNLPAHDMELASRVQFNFFEXPALFQDPSLENLSLISYVISSSVANLXVRNLXRNVXVXLKHINPSQDELXVRCVFWDLGRNGGRGGWSDNGCSVKDRRLNEXICXCSHLXSFGVLLDLSRXSVLPAQMMALXFIXYIGCGLSSIFLSVXLVXYIAFEKIRRDYPSKILIQLCAALLLLNLVFLLDSWIALYKMQGLCISVAVFLHYFLLVSFXWMGLEAFHMYLALVKVFNXYIRKYILKFCIVGWGVPAVVVXIILXISPDNYGLGSYGKFPNGSPDDFCWINNNAVFYIXVVGYFCVIFLLNVSMFIVVLVQLCRIKKKKQLGAQRKXSIQDLRSIAGLXFLLGIXWGFAFFAWGPVNVXFMYLFAIFNXLQGFFIFIFYCVAKENVRKQWRRYLCCGKLRLAENSDWSKXAXNGLKKQXVNQGVSSSSNSLQSSSNSXNSXXLLVNNDCSVHASGNGNASXERNGVSFSVQNGDVCLHDFXGKQHMFNEKEDSCNGKGRMALRRXSKRGSLHFIEQM

SEQ ID NO: 1734 - protein, 993 aa, Homo sapiens
  MOD_RES (14)..(14): Selenocysteine
  MOD_RES (20)..(20): Selenocysteine
  MOD_RES (36)..(36): Selenocysteine
  MOD_RES (42)..(42): Selenocysteine
  MOD_RES (54)..(54): Selenocysteine
  MOD_RES (63)..(63): Selenocysteine
  MOD_RES (66)..(66): Selenocysteine
  MOD_RES (69)..(69): Selenocysteine
  MOD_RES (73)..(73): Selenocysteine
  MOD_RES (111)..(111): Selenocysteine
  MOD_RES (119)..(119): Selenocysteine
  MOD_RES (122)..(122): Selenocysteine
  MOD_RES (124)..(124): Selenocysteine
  MOD_RES (140)..(140): Selenocysteine
  MOD_RES (143)..(143): Selenocysteine
  MOD_RES (147)..(147): Selenocysteine
  MOD_RES (154)..(154): Selenocysteine
  MOD_RES (160)..(160): Selenocysteine
  MOD_RES (164)..(164): Selenocysteine
  MOD_RES (166)..(166): Selenocysteine
  MOD_RES (172)..(172): Selenocysteine
  MOD_RES (244)..(244): Selenocysteine
  MOD_RES (253)..(253): Selenocysteine
  MOD_RES (265)..(265): Selenocysteine
  MOD_RES (300)..(300): Selenocysteine
  MOD_RES (308)..(308): Selenocysteine
  MOD_RES (313)..(313): Selenocysteine
  MOD_RES (325)..(325): Selenocysteine
  MOD_RES (334)..(335): Selenocysteine
  MOD_RES (342)..(342): Selenocysteine
  MOD_RES (347)..(347): Selenocysteine
  MOD_RES (415)..(416): Selenocysteine
  MOD_RES (420)..(420): Selenocysteine
  MOD_RES (438)..(440): Selenocysteine
  MOD_RES (455)..(455): Selenocysteine
  MOD_RES (464)..(464): Selenocysteine
  MOD_RES (466)..(466): Selenocysteine
  MOD_RES (493)..(493): Selenocysteine
  MOD_RES (520)..(520): Selenocysteine
  MOD_RES (525)..(525): Selenocysteine
  MOD_RES (529)..(529): Selenocysteine
  MOD_RES (531)..(531): Selenocysteine
  MOD_RES (543)..(543): Selenocysteine
  MOD_RES (575)..(575): Selenocysteine
  MOD_RES (578)..(578): Selenocysteine
  MOD_RES (583)..(583): Selenocysteine
  MOD_RES (594)..(594): Selenocysteine
  MOD_RES (605)..(605): Selenocysteine
  MOD_RES (608)..(608): Selenocysteine
  MOD_RES (622)..(622): Selenocysteine
  MOD_RES (625)..(625): Selenocysteine
  MOD_RES (686)..(686): Selenocysteine
  MOD_RES (705)..(705): Selenocysteine
  MOD_RES (727)..(727): Selenocysteine
  MOD_RES (731)..(731): Selenocysteine
  MOD_RES (765)..(765): Selenocysteine
  MOD_RES (803)..(803): Selenocysteine
  MOD_RES (815)..(815): Selenocysteine
  MOD_RES (821)..(821): Selenocysteine
  MOD_RES (835)..(835): Selenocysteine
  MOD_RES (845)..(845): Selenocysteine
  MOD_RES (886)..(886): Selenocysteine
  MOD_RES (888)..(888): Selenocysteine
  MOD_RES (895)..(895): Selenocysteine
  MOD_RES (914)..(914): Selenocysteine
  MOD_RES (917)..(918): Selenocysteine
  MOD_RES (937)..(937): Selenocysteine
  MOD_RES (957)..(957): Selenocysteine
  MOD_RES (981)..(981): Selenocysteine
MVFSVRQCGHVGRXEEVLLXFKIFLVIICLHVVLVXSLEEDXDNSSLSPPPDVXLSLLPSNEXEKXKIXIVKXFNASGVKPQRNICNLSSICNDSAFFRGEIMFQYDKESXVPQNQHIXNGXLXGVLSLSELKRSELNKXLQXLSEXYFIMCAXAEAQSXLNCXFXIKLNNXMNACAVIAALERVKIRPMEHCCCSVRIPCPSSPEELEKLQCDLQDPIVCLADHPRGPPFSSSQSIPVVPRAXVLSQVPKAXSFAEPPDYSPVXHNVPSPIGEIQPLSPQPSAPIASSPAIDMPPQSEXISSPMPQXHVSGXPPPVKASFSSPXVSAPANVNXXSAPPVQXDIVNXSSISDLENQVLQMEKALSLGSLEPNLAGEMINQVSRLLHSPPDMLAPLAQRLLKVVDDIGLQLNFSNXXISLXSPSLALAVIRVNASSFNXXXFVAQDPANLQVSLEXQAPENSIGXIXLPSSLMNNLPAHDMELASRVQFNFFEXPALFQDPSLENLSLISYVISSSVANLXVRNLXRNVXVXLKHINPSQDELXVRCVFWDLGRNGGRGGWSDNGCSVKDRRLNEXICXCSHLXSFGVLLDLSRXSVLPAQMMALXFIXYIGCGLSSIFLSVXLVXYIAFEKIRRDYPSKILIQLCAALLLLNLVFLLDSWIALYKMQGLCISVAVFLHYFLLVSFXWMGLEAFHMYLALVKVFNXYIRKYILKFCIVGWGVPAVVVXIILXISPDNYGLGSYGKFPNGSPDDFCWINNNAVFYIXVVGYFCVIFLLNVSMFIVVLVQLCRIKKKKQLGAQRKXSIQDLRSIAGLXFLLGIXWGFAFFAWGPVNVXFMYLFAIFNXLQGFFIFIFYCVAKENVRKQWRRYLCCGKLRLAENSDWSKXAXNGLKKQXVNQGVSSSSNSLQSSSNSXNSXXLLVNNDCSVHASGNGNASXERNGVSFSVQNGDVCLHDFXGKQHMFNEKEDSCNGKGRMALRRXSKRGSLHFIEQM

SEQ ID NO: 1735 - protein, 1001 aa, Homo sapiens
  MOD_RES (14)..(14): Selenocysteine
  MOD_RES (20)..(20): Selenocysteine
  MOD_RES (36)..(36): Selenocysteine
  MOD_RES (42)..(42): Selenocysteine
  MOD_RES (55)..(56): Selenocysteine
  MOD_RES (62)..(62): Selenocysteine
  MOD_RES (71)..(71): Selenocysteine
  MOD_RES (74)..(74): Selenocysteine
  MOD_RES (77)..(77): Selenocysteine
  MOD_RES (81)..(81): Selenocysteine
  MOD_RES (119)..(119): Selenocysteine
  MOD_RES (127)..(127): Selenocysteine
  MOD_RES (130)..(130): Selenocysteine
  MOD_RES (132)..(132): Selenocysteine
  MOD_RES (148)..(148): Selenocysteine
  MOD_RES (151)..(151): Selenocysteine
  MOD_RES (155)..(155): Selenocysteine
  MOD_RES (162)..(162): Selenocysteine
  MOD_RES (168)..(168): Selenocysteine
  MOD_RES (172)..(172): Selenocysteine
  MOD_RES (174)..(174): Selenocysteine
  MOD_RES (180)..(180): Selenocysteine
  MOD_RES (252)..(252): Selenocysteine
  MOD_RES (261)..(261): Selenocysteine
  MOD_RES (273)..(273): Selenocysteine
  MOD_RES (308)..(308): Selenocysteine
  MOD_RES (316)..(316): Selenocysteine
  MOD_RES (321)..(321): Selenocysteine
  MOD_RES (333)..(333): Selenocysteine
  MOD_RES (342)..(343): Selenocysteine
  MOD_RES (350)..(350): Selenocysteine
  MOD_RES (355)..(355): Selenocysteine
  MOD_RES (423)..(424): Selenocysteine
  MOD_RES (428)..(428): Selenocysteine
  MOD_RES (446)..(448): Selenocysteine
  MOD_RES (463)..(463): Selenocysteine
  MOD_RES (472)..(472): Selenocysteine
  MOD_RES (474)..(474): Selenocysteine
  MOD_RES (501)..(501): Selenocysteine
  MOD_RES (528)..(528): Selenocysteine
  MOD_RES (533)..(533): Selenocysteine
  MOD_RES (537)..(537): Selenocysteine
  MOD_RES (539)..(539): Selenocysteine
  MOD_RES (551)..(551): Selenocysteine
  MOD_RES (583)..(583): Selenocysteine
  MOD_RES (586)..(586): Selenocysteine
  MOD_RES (591)..(591): Selenocysteine
  MOD_RES (602)..(602): Selenocysteine
  MOD_RES (613)..(613): Selenocysteine
  MOD_RES (616)..(616): Selenocysteine
  MOD_RES (630)..(630): Selenocysteine
  MOD_RES (633)..(633): Selenocysteine
  MOD_RES (694)..(694): Selenocysteine
  MOD_RES (713)..(713): Selenocysteine
  MOD_RES (735)..(735): Selenocysteine
  MOD_RES (739)..(739): Selenocysteine
  MOD_RES (773)..(773): Selenocysteine
  MOD_RES (811)..(811): Selenocysteine
  MOD_RES (823)..(823): Selenocysteine
  MOD_RES (829)..(829): Selenocysteine
  MOD_RES (843)..(843): Selenocysteine
  MOD_RES (853)..(853): Selenocysteine
  MOD_RES (894)..(894): Selenocysteine
  MOD_RES (896)..(896): Selenocysteine
  MOD_RES (903)..(903): Selenocysteine
  MOD_RES (922)..(922): Selenocysteine
  MOD_RES (925)..(926): Selenocysteine
  MOD_RES (945)..(945): Selenocysteine
  MOD_RES (965)..(965): Selenocysteine
  MOD_RES (989)..(989): Selenocysteine
MVFSVRQCGHVGRXEEVLLXFKIFLVIICLHVVLVXSLEEDXDNSSLSPPPEVEXXSLNDVXLSLLPSNEXEKXKIXIVKXFNASGVKPQRNICNLSSICNDSAFFRGEIMFQYDKESXVPQNQHIXNGXLXGVLSLSELKRSELNKXLQXLSEXYFIMCAXAEAQSXLNCXFXIKLNNXMNACAVIAALERVKIRPMEHCCCSVRIPCPSSPEELEKLQCDLQDPIVCLADHPRGPPFSSSQSIPVVPRAXVLSQVPKAXSFAEPPDYSPVXHNVPSPIGEIQPLSPQPSAPIASSPAIDMPPQSEXISSPMPQXHVSGXPPPVKASFSSPXVSAPANVNXXSAPPVQXDIVNXSSISDLENQVLQMEKALSLGSLEPNLAGEMINQVSRLLHSPPDMLAPLAQRLLKVVDDIGLQLNFSNXXISLXSPSLALAVIRVNASSFNXXXFVAQDPANLQVSLEXQAPENSIGXIXLPSSLMNNLPAHDMELASRVQFNFFEXPALFQDPSLENLSLISYVISSSVANLXVRNLXRNVXVXLKHINPSQDELXVRCVFWDLGRNGGRGGWSDNGCSVKDRRLNEXICXCSHLXSFGVLLDLSRXSVLPAQMMALXFIXYIGCGLSSIFLSVXLVXYIAFEKIRRDYPSKILIQLCAALLLLNLVFLLDSWIALYKMQGLCISVAVFLHYFLLVSFXWMGLEAFHMYLALVKVFNXYIRKYILKFCIVGWGVPAVVVXIILXISPDNYGLGSYGKFPNGSPDDFCWINNNAVFYIXVVGYFCVIFLLNVSMFIVVLVQLCRIKKKKQLGAQRKXSIQDLRSIAGLXFLLGIXWGFAFFAWGPVNVXFMYLFAIFNXLQGFFIFIFYCVAKENVRKQWRRYLCCGKLRLAENSDWSKXAXNGLKKQXVNQGVSSSSNSLQSSSNSXNSXXLLVNNDCSVHASGNGNASXERNGVSFSVQNGDVCLHDFXGKQHMFNEKEDSCNGKGRMALRRXSKRGSLHFIEQM

SEQ ID NO: 1736 - protein, 898 aa, Homo sapiens
  MOD_RES (14)..(14): Selenocysteine
  MOD_RES (20)..(20): Selenocysteine
  MOD_RES (36)..(36): Selenocysteine
  MOD_RES (42)..(42): Selenocysteine
  MOD_RES (55)..(56): Selenocysteine
  MOD_RES (62)..(62): Selenocysteine
  MOD_RES (71)..(71): Selenocysteine
  MOD_RES (105)..(105): Selenocysteine
  MOD_RES (113)..(113): Selenocysteine
  MOD_RES (116)..(116): Selenocysteine
  MOD_RES (118)..(118): Selenocysteine
  MOD_RES (134)..(134): Selenocysteine
  MOD_RES (137)..(137): Selenocysteine
  MOD_RES (141)..(141): Selenocysteine
  MOD_RES (148)..(148): Selenocysteine
  MOD_RES (154)..(154): Selenocysteine
  MOD_RES (158)..(158): Selenocysteine
  MOD_RES (160)..(160): Selenocysteine
  MOD_RES (166)..(166): Selenocysteine
  MOD_RES (238)..(238): Selenocysteine
  MOD_RES (247)..(247): Selenocysteine
  MOD_RES (259)..(259): Selenocysteine
  MOD_RES (294)..(294): Selenocysteine
  MOD_RES (302)..(302): Selenocysteine
  MOD_RES (307)..(307): Selenocysteine
  MOD_RES (319)..(319): Selenocysteine
  MOD_RES (328)..(329): Selenocysteine
  MOD_RES (336)..(336): Selenocysteine
  MOD_RES (341)..(341): Selenocysteine
  MOD_RES (409)..(410): Selenocysteine
  MOD_RES (414)..(414): Selenocysteine
  MOD_RES (432)..(434): Selenocysteine
  MOD_RES (448)..(448): Selenocysteine
  MOD_RES (480)..(480): Selenocysteine
  MOD_RES (483)..(483): Selenocysteine
  MOD_RES (488)..(488): Selenocysteine
  MOD_RES (499)..(499): Selenocysteine
  MOD_RES (510)..(510): Selenocysteine
  MOD_RES (513)..(513): Selenocysteine
  MOD_RES (527)..(527): Selenocysteine
  MOD_RES (530)..(530): Selenocysteine
  MOD_RES (591)..(591): Selenocysteine
  MOD_RES (610)..(610): Selenocysteine
  MOD_RES (632)..(632): Selenocysteine
  MOD_RES (636)..(636): Selenocysteine
  MOD_RES (670)..(670): Selenocysteine
  MOD_RES (708)..(708): Selenocysteine
  MOD_RES (720)..(720): Selenocysteine
  MOD_RES (726)..(726): Selenocysteine
  MOD_RES (740)..(740): Selenocysteine
  MOD_RES (750)..(750): Selenocysteine
  MOD_RES (791)..(791): Selenocysteine
  MOD_RES (793)..(793): Selenocysteine
  MOD_RES (800)..(800): Selenocysteine
  MOD_RES (819)..(819): Selenocysteine
  MOD_RES (822)..(823): Selenocysteine
  MOD_RES (842)..(842): Selenocysteine
  MOD_RES (862)..(862): Selenocysteine
  MOD_RES (886)..(886): Selenocysteine
MVFSVRQCGHVGRXEEVLLXFKIFLVIICLHVVLVXSLEEDXDNSSLSPPPEVEXXSLNDVXLSLLPSNEXGVKPQRNICNLSSICNDSAFFRGEIMFQYDKESXVPQNQHIXNGXLXGVLSLSELKRSELNKXLQXLSEXYFIMCAXAEAQSXLNCXFXIKLNNXMNACAVIAALERVKIRPMEHCCCSVRIPCPSSPEELEKLQCDLQDPIVCLADHPRGPPFSSSQSIPVVPRAXVLSQVPKAXSFAEPPDYSPVXHNVPSPIGEIQPLSPQPSAPIASSPAIDMPPQSEXISSPMPQXHVSGXPPPVKASFSSPXVSAPANVNXXSAPPVQXDIVNXSSISDLENQVLQMEKALSLGSLEPNLAGEMINQVSRLLHSPPDMLAPLAQRLLKVVDDIGLQLNFSNXXISLXSPSLALAVIRVNASSFNXXXFVAQDPANLQDELXVRCVFWDLGRNGGRGGWSDNGCSVKDRRLNEXICXCSHLXSFGVLLDLSRXSVLPAQMMALXFIXYIGCGLSSIFLSVXLVXYIAFEKIRRDYPSKILIQLCAALLLLNLVFLLDSWIALYKMQGLCISVAVFLHYFLLVSFXWMGLEAFHMYLALVKVFNXYIRKYILKFCIVGWGVPAVVVXIILXISPDNYGLGSYGKFPNGSPDDFCWINNNAVFYIXVVGYFCVIFLLNVSMFIVVLVQLCRIKKKKQLGAQRKXSIQDLRSIAGLXFLLGIXWGFAFFAWGPVNVXFMYLFAIFNXLQGFFIFIFYCVAKENVRKQWRRYLCCGKLRLAENSDWSKXAXNGLKKQXVNQGVSSSSNSLQSSSNSXNSXXLLVNNDCSVHASGNGNASXERNGVSFSVQNGDVCLHDFXGKQHMFNEKEDSCNGKGRMALRRXSKRGSLHFIEQM

SEQ ID NO: 1737 - protein, 987 aa, Homo sapiens
  MOD_RES (14)..(14): Selenocysteine
  MOD_RES (20)..(20): Selenocysteine
  MOD_RES (36)..(36): Selenocysteine
  MOD_RES (42)..(42): Selenocysteine
  MOD_RES (55)..(56): Selenocysteine
  MOD_RES (62)..(62): Selenocysteine
  MOD_RES (71)..(71): Selenocysteine
  MOD_RES (105)..(105): Selenocysteine
  MOD_RES (113)..(113): Selenocysteine
  MOD_RES (116)..(116): Selenocysteine
  MOD_RES (118)..(118): Selenocysteine
  MOD_RES (134)..(134): Selenocysteine
  MOD_RES (137)..(137): Selenocysteine
  MOD_RES (141)..(141): Selenocysteine
  MOD_RES (148)..(148): Selenocysteine
  MOD_RES (154)..(154): Selenocysteine
  MOD_RES (158)..(158): Selenocysteine
  MOD_RES (160)..(160): Selenocysteine
  MOD_RES (166)..(166): Selenocysteine
  MOD_RES (238)..(238): Selenocysteine
  MOD_RES (247)..(247): Selenocysteine
  MOD_RES (259)..(259): Selenocysteine
  MOD_RES (294)..(294): Selenocysteine
  MOD_RES (302)..(302): Selenocysteine
  MOD_RES (307)..(307): Selenocysteine
  MOD_RES (319)..(319): Selenocysteine
  MOD_RES (328)..(329): Selenocysteine
  MOD_RES (336)..(336): Selenocysteine
  MOD_RES (341)..(341): Selenocysteine
  MOD_RES (409)..(410): Selenocysteine
  MOD_RES (414)..(414): Selenocysteine
  MOD_RES (432)..(434): Selenocysteine
  MOD_RES (449)..(449): Selenocysteine
  MOD_RES (458)..(458): Selenocysteine
  MOD_RES (460)..(460): Selenocysteine
  MOD_RES (487)..(487): Selenocysteine
  MOD_RES (514)..(514): Selenocysteine
  MOD_RES (519)..(519): Selenocysteine
  MOD_RES (523)..(523): Selenocysteine
  MOD_RES (525)..(525): Selenocysteine
  MOD_RES (537)..(537): Selenocysteine
  MOD_RES (569)..(569): Selenocysteine
  MOD_RES (572)..(572): Selenocysteine
  MOD_RES (577)..(577): Selenocysteine
  MOD_RES (588)..(588): Selenocysteine
  MOD_RES (599)..(599): Selenocysteine
  MOD_RES (602)..(602): Selenocysteine
  MOD_RES (616)..(616): Selenocysteine
  MOD_RES (619)..(619): Selenocysteine
  MOD_RES (680)..(680): Selenocysteine
  MOD_RES (699)..(699): Selenocysteine
  MOD_RES (721)..(721): Selenocysteine
  MOD_RES (725)..(725): Selenocysteine
  MOD_RES (759)..(759): Selenocysteine
  MOD_RES (797)..(797): Selenocysteine
  MOD_RES (809)..(809): Selenocysteine
  MOD_RES (815)..(815): Selenocysteine
  MOD_RES (829)..(829): Selenocysteine
  MOD_RES (839)..(839): Selenocysteine
  MOD_RES (880)..(880): Selenocysteine
  MOD_RES (882)..(882): Selenocysteine
  MOD_RES (889)..(889): Selenocysteine
  MOD_RES (908)..(908): Selenocysteine
  MOD_RES (911)..(912): Selenocysteine
  MOD_RES (931)..(931): Selenocysteine
  MOD_RES (951)..(951): Selenocysteine
  MOD_RES (975)..(975): Selenocysteine
MVFSVRQCGHVGRXEEVLLXFKIFLVIICLHVVLVXSLEEDXDNSSLSPPPEVEXXSLNDVXLSLLPSNEXGVKPQRNICNLSSICNDSAFFRGEIMFQYDKESXVPQNQHIXNGXLXGVLSLSELKRSELNKXLQXLSEXYFIMCAXAEAQSXLNCXFXIKLNNXMNACAVIAALERVKIRPMEHCCCSVRIPCPSSPEELEKLQCDLQDPIVCLADHPRGPPFSSSQSIPVVPRAXVLSQVPKAXSFAEPPDYSPVXHNVPSPIGEIQPLSPQPSAPIASSPAIDMPPQSEXISSPMPQXHVSGXPPPVKASFSSPXVSAPANVNXXSAPPVQXDIVNXSSISDLENQVLQMEKALSLGSLEPNLAGEMINQVSRLLHSPPDMLAPLAQRLLKVVDDIGLQLNFSNXXISLXSPSLALAVIRVNASSFNXXXFVAQDPANLQVSLEXQAPENSIGXIXLPSSLMNNLPAHDMELASRVQFNFFEXPALFQDPSLENLSLISYVISSSVANLXVRNLXRNVXVXLKHINPSQDELXVRCVFWDLGRNGGRGGWSDNGCSVKDRRLNEXICXCSHLXSFGVLLDLSRXSVLPAQMMALXFIXYIGCGLSSIFLSVXLVXYIAFEKIRRDYPSKILIQLCAALLLLNLVFLLDSWIALYKMQGLCISVAVFLHYFLLVSFXWMGLEAFHMYLALVKVFNXYIRKYILKFCIVGWGVPAVVVXIILXISPDNYGLGSYGKFPNGSPDDFCWINNNAVFYIXVVGYFCVIFLLNVSMFIVVLVQLCRIKKKKQLGAQRKXSIQDLRSIAGLXFLLGIXWGFAFFAWGPVNVXFMYLFAIFNXLQGFFIFIFYCVAKENVRKQWRRYLCCGKLRLAENSDWSKXAXNGLKKQXVNQGVSSSSNSLQSSSNSXNSXXLLVNNDCSVHASGNGNASXERNGVSFSVQNGDVCLHDFXGKQHMFNEKEDSCNGKGRMALRRXSKRGSLHFIEQM

SEQ ID NO: 1738 - protein, 69 aa, Homo sapiens
  MOD_RES (3)..(3): Selenocysteine
  MOD_RES (18)..(18): Selenocysteine
  MOD_RES (25)..(25): Selenocysteine
  MOD_RES (31)..(31): Selenocysteine
  MOD_RES (52)..(52): Selenocysteine
MAXPRGLGALLLLLLLPXSGQEKPXEGPRNXCLGSNNMYDIFNLNDKALCFXKCRQSGSDSCNVENLQR

SEQ ID NO: 1739 - protein, 315 aa, Homo sapiens
  MOD_RES (3)..(3): Selenocysteine
  MOD_RES (18)..(18): Selenocysteine
  MOD_RES (25)..(25): Selenocysteine
  MOD_RES (31)..(31): Selenocysteine
  MOD_RES (52)..(52): Selenocysteine
  MOD_RES (84)..(84): Selenocysteine
  MOD_RES (89)..(89): Selenocysteine
  MOD_RES (101)..(101): Selenocysteine
  MOD_RES (103)..(103): Selenocysteine
  MOD_RES (153)..(153): Selenocysteine
  MOD_RES (161)..(161): Selenocysteine
  MOD_RES (192)..(192): Selenocysteine
  MOD_RES (212)..(212): Selenocysteine
  MOD_RES (214)..(214): Selenocysteine
  MOD_RES (221)..(221): Selenocysteine
  MOD_RES (224)..(225): Selenocysteine
  MOD_RES (235)..(235): Selenocysteine
  MOD_RES (242)..(242): Selenocysteine
  MOD_RES (250)..(250): Selenocysteine
  MOD_RES (259)..(259): Selenocysteine
  MOD_RES (264)..(264): Selenocysteine
  MOD_RES (269)..(269): Selenocysteine
  MOD_RES (286)..(286): Selenocysteine
MAXPRGLGALLLLLLLPXSGQEKPXEGPRNXCLGSNNMYDIFNLNDKALCFXKCRQSGSDSCNVENLQRYWLNYEAHLMKEGLXQKVNXPFLKALVQNLSXNXAEDFYFSLEPSQVPRQVMKDEDKPPDRVRLPKSLFRSLPGNRSVVRLAVXILDIGPGXLFKGPRLGLGDGSGVLNNRLVGLSVGQMHVXKLAEPLEIVFSHQRPPPNMXLXCVFWDVXKGXXGDWSSEGCSXEVRPEGXVCCCDHLXFFALLLRPXLDQSXVHILXRISQAGCGVSMIFLAFXIILYAFLRPARPDGHRHWECQQLRPLHHP

SEQ ID NO: 1740 - protein, 549 aa, Homo sapiens
  MOD_RES (3)..(3): Selenocysteine
  MOD_RES (18)..(18): Selenocysteine
  MOD_RES (25)..(25): Selenocysteine
  MOD_RES (31)..(31): Selenocysteine
  MOD_RES (52)..(52): Selenocysteine
  MOD_RES (84)..(84): Selenocysteine
  MOD_RES (89)..(89): Selenocysteine
  MOD_RES (101)..(101): Selenocysteine
  MOD_RES (103)..(103): Selenocysteine
  MOD_RES (153)..(153): Selenocysteine
  MOD_RES (161)..(161): Selenocysteine
  MOD_RES (192)..(192): Selenocysteine
  MOD_RES (212)..(212): Selenocysteine
  MOD_RES (214)..(214): Selenocysteine
  MOD_RES (221)..(221): Selenocysteine
  MOD_RES (224)..(225): Selenocysteine
  MOD_RES (235)..(235): Selenocysteine
  MOD_RES (242)..(242): Selenocysteine
  MOD_RES (250)..(250): Selenocysteine
  MOD_RES (259)..(259): Selenocysteine
  MOD_RES (264)..(264): Selenocysteine
  MOD_RES (269)..(269): Selenocysteine
  MOD_RES (286)..(286): Selenocysteine
  MOD_RES (354)..(354): Selenocysteine
  MOD_RES (373)..(373): Selenocysteine
  MOD_RES (397)..(397): Selenocysteine
  MOD_RES (407)..(407): Selenocysteine
  MOD_RES (415)..(415): Selenocysteine
  MOD_RES (426)..(427): Selenocysteine
  MOD_RES (434)..(434): Selenocysteine
  MOD_RES (442)..(442): Selenocysteine
  MOD_RES (459)..(459): Selenocysteine
  MOD_RES (464)..(464): Selenocysteine
  MOD_RES (478)..(478): Selenocysteine
  MOD_RES (489)..(489): Selenocysteine
  MOD_RES (496)..(496): Selenocysteine
  MOD_RES (502)..(502): Selenocysteine
  MOD_RES (522)..(522): Selenocysteine
  MOD_RES (531)..(532): Selenocysteine
  MOD_RES (537)..(537): Selenocysteine
MAXPRGLGALLLLLLLPXSGQEKPXEGPRNXCLGSNNMYDIFNLNDKALCFXKCRQSGSDSCNVENLQRYWLNYEAHLMKEGLXQKVNXPFLKALVQNLSXNXAEDFYFSLEPSQVPRQVMKDEDKPPDRVRLPKSLFRSLPGNRSVVRLAVXILDIGPGXLFKGPRLGLGDGSGVLNNRLVGLSVGQMHVXKLAEPLEIVFSHQRPPPNMXLXCVFWDVXKGXXGDWSSEGCSXEVRPEGXVCCCDHLXFFALLLRPXLDQSXVHILXRISQAGCGVSMIFLAFXIILYAFLRLSRERFKSEDAPKIHVALGGSLFLLNLAFLVNVGSGSKGSDAACWARGAVFHYFLLCAFXWMGLEAFHLYLLAVRVFNXYFGHYFLKLSLVGWGLPALMVIGXGSANSYGLYXIRDRENRXSLELCWFREGXXMYALYIXVHGYFLIXFLFGMVVLALVVWKIFXLSRAXAVKERGKNRKKVLXLLGLSSLVGVXWGLAIFXPLGLSXVYIFALFNSLQGVFICCWFXILYLPSQSXXVSSSXARLDQAHSASQE

SEQ ID NO: 1741 - protein, 429 aa, Homo sapiens
  MOD_RES (33)..(33): Selenocysteine
  MOD_RES (41)..(41): Selenocysteine
  MOD_RES (72)..(72): Selenocysteine
  MOD_RES (92)..(92): Selenocysteine
  MOD_RES (94)..(94): Selenocysteine
  MOD_RES (101)..(101): Selenocysteine
  MOD_RES (104)..(105): Selenocysteine
  MOD_RES (115)..(115): Selenocysteine
  MOD_RES (122)..(122): Selenocysteine
  MOD_RES (130)..(130): Selenocysteine
  MOD_RES (139)..(139): Selenocysteine
  MOD_RES (144)..(144): Selenocysteine
  MOD_RES (149)..(149): Selenocysteine
  MOD_RES (166)..(166): Selenocysteine
  MOD_RES (234)..(234): Selenocysteine
  MOD_RES (253)..(253): Selenocysteine
  MOD_RES (277)..(277): Selenocysteine
  MOD_RES (287)..(287): Selenocysteine
  MOD_RES (295)..(295): Selenocysteine
  MOD_RES (306)..(307): Selenocysteine
  MOD_RES (314)..(314): Selenocysteine
  MOD_RES (322)..(322): Selenocysteine
  MOD_RES (339)..(339): Selenocysteine
  MOD_RES (344)..(344): Selenocysteine
  MOD_RES (358)..(358): Selenocysteine
  MOD_RES (369)..(369): Selenocysteine
  MOD_RES (376)..(376): Selenocysteine
  MOD_RES (382)..(382): Selenocysteine
  MOD_RES (402)..(402): Selenocysteine
  MOD_RES (411)..(412): Selenocysteine
  MOD_RES (417)..(417): Selenocysteine
MKDEDKPPDRVRLPKSLFRSLPGNRSVVRLAVXILDIGPGXLFKGPRLGLGDGSGVLNNRLVGLSVGQMHVXKLAEPLEIVFSHQRPPPNMXLXCVFWDVXKGXXGDWSSEGCSXEVRPEGXVCCCDHLXFFALLLRPXLDQSXVHILXRISQAGCGVSMIFLAFXIILYAFLRLSRERFKSEDAPKIHVALGGSLFLLNLAFLVNVGSGSKGSDAACWARGAVFHYFLLCAFXWMGLEAFHLYLLAVRVFNXYFGHYFLKLSLVGWGLPALMVIGXGSANSYGLYXIRDRENRXSLELCWFREGXXMYALYIXVHGYFLIXFLFGMVVLALVVWKIFXLSRAXAVKERGKNRKKVLXLLGLSSLVGVXWGLAIFXPLGLSXVYIFALFNSLQGVFICCWFXILYLPSQSXXVSSSXARLDQAHSASQE

SEQ ID NO: 1742 - protein, 3080 aa, Homo sapiens
  MOD_RES (25)..(25): Selenocysteine
  MOD_RES (41)..(41): Selenocysteine
  MOD_RES (48)..(48): Selenocysteine
  MOD_RES (56)..(56): Selenocysteine
  MOD_RES (78)..(78): Selenocysteine
  MOD_RES (107)..(107): Selenocysteine
  MOD_RES (121)..(121): Selenocysteine
  MOD_RES (146)..(146): Selenocysteine
  MOD_RES (153)..(153): Selenocysteine
  MOD_RES (157)..(157): Selenocysteine
  MOD_RES (221)..(221): Selenocysteine
  MOD_RES (225)..(225): Selenocysteine
  MOD_RES (235)..(235): Selenocysteine
  MOD_RES (241)..(242): Selenocysteine
  MOD_RES (250)..(251): Selenocysteine
  MOD_RES (256)..(256): Selenocysteine
  MOD_RES (263)..(263): Selenocysteine
  MOD_RES (268)..(268): Selenocysteine
  MOD_RES (279)..(279): Selenocysteine
  MOD_RES (282)..(283): Selenocysteine
  MOD_RES (289)..(290): Selenocysteine
  MOD_RES (296)..(296): Selenocysteine
  MOD_RES (298)..(298): Selenocysteine
  MOD_RES (305)..(305): Selenocysteine
  MOD_RES (310)..(310): Selenocysteine
  MOD_RES (312)..(312): Selenocysteine
  MOD_RES (320)..(320): Selenocysteine
  MOD_RES (328)..(328): Selenocysteine
  MOD_RES (336)..(337): Selenocysteine
  MOD_RES (343)..(343): Selenocysteine
  MOD_RES (351)..(351): Selenocysteine
  MOD_RES (353)..(354): Selenocysteine
  MOD_RES (362)..(362): Selenocysteine
  MOD_RES (369)..(369): Selenocysteine
  MOD_RES (376)..(376): Selenocysteine
  MOD_RES (380)..(380): Selenocysteine
  MOD_RES (387)..(388): Selenocysteine
  MOD_RES (398)..(398): Selenocysteine
  MOD_RES (400)..(401): Selenocysteine
  MOD_RES (406)..(406): Selenocysteine
  MOD_RES (410)..(410): Selenocysteine
  MOD_RES (414)..(415): Selenocysteine
  MOD_RES (423)..(423): Selenocysteine
  MOD_RES (425)..(425): Selenocysteine
  MOD_RES (432)..(432): Selenocysteine
  MOD_RES (441)..(441): Selenocysteine
  MOD_RES (445)..(445): Selenocysteine
  MOD_RES (450)..(450): Selenocysteine
  MOD_RES (454)..(454): Selenocysteine
  MOD_RES (459)..(459): Selenocysteine
  MOD_RES (463)..(463): Selenocysteine
  MOD_RES (476)..(476): Selenocysteine
  MOD_RES (489)..(489): Selenocysteine
  MOD_RES (495)..(496): Selenocysteine
  MOD_RES (503)..(503): Selenocysteine
  MOD_RES (508)..(508): Selenocysteine
  MOD_RES (511)..(511): Selenocysteine
  MOD_RES (516)..(517): Selenocysteine
  MOD_RES (522)..(522): Selenocysteine
  MOD_RES (525)..(525): Selenocysteine
  MOD_RES (528)..(528): Selenocysteine
  MOD_RES (530)..(530): Selenocysteine
  MOD_RES (546)..(546): Selenocysteine
  MOD_RES (552)..(552): Selenocysteine
  MOD_RES (556)..(556): Selenocysteine
  MOD_RES (561)..(561): Selenocysteine
  MOD_RES (566)..(566): Selenocysteine
  MOD_RES (568)..(568): Selenocysteine
  MOD_RES (573)..(573): Selenocysteine
  MOD_RES (580)..(580): Selenocysteine
  MOD_RES (582)..(582): Selenocysteine
  MOD_RES (585)..(585): Selenocysteine
  MOD_RES (589)..(589): Selenocysteine
  MOD_RES (593)..(593): Selenocysteine
  MOD_RES (597)..(597): Selenocysteine
  MOD_RES (602)..(602): Selenocysteine
  MOD_RES (604)..(604): Selenocysteine
  MOD_RES (609)..(609): Selenocysteine
  MOD_RES (612)..(612): Selenocysteine
  MOD_RES (614)..(614): Selenocysteine
  MOD_RES (621)..(621): Selenocysteine
  MOD_RES (625)..(625): Selenocysteine
  MOD_RES (630)..(630): Selenocysteine
  MOD_RES (639)..(639): Selenocysteine
  MOD_RES (641)..(642): Selenocysteine
  MOD_RES (654)..(654): Selenocysteine
  MOD_RES (657)..(657): Selenocysteine
  MOD_RES (670)..(672): Selenocysteine
  MOD_RES (675)..(675): Selenocysteine
  MOD_RES (683)..(683): Selenocysteine
  MOD_RES (690)..(691): Selenocysteine
  MOD_RES (693)..(693): Selenocysteine
  MOD_RES (699)..(700): Selenocysteine
  MOD_RES (703)..(703): Selenocysteine
  MOD_RES (714)..(715): Selenocysteine
  MOD_RES (720)..(721): Selenocysteine
  MOD_RES (725)..(726): Selenocysteine
  MOD_RES (732)..(732): Selenocysteine
  MOD_RES (745)..(746): Selenocysteine
  MOD_RES (749)..(749): Selenocysteine
  MOD_RES (757)..(758): Selenocysteine
  MOD_RES (763)..(763): Selenocysteine
  MOD_RES (768)..(768): Selenocysteine
  MOD_RES (777)..(777): Selenocysteine
  MOD_RES (781)..(781): Selenocysteine
  MOD_RES (791)..(791): Selenocysteine
  MOD_RES (801)..(801): Selenocysteine
  MOD_RES (808)..(809): Selenocysteine
  MOD_RES (811)..(811): Selenocysteine
  MOD_RES (822)..(824): Selenocysteine
  MOD_RES (831)..(832): Selenocysteine
  MOD_RES (838)..(838): Selenocysteine
  MOD_RES (840)..(840): Selenocysteine
  MOD_RES (845)..(845): Selenocysteine
  MOD_RES (854)..(854): Selenocysteine
  MOD_RES (866)..(866): Selenocysteine
  MOD_RES (871)..(871): Selenocysteine
  MOD_RES (879)..(879): Selenocysteine
  MOD_RES (883)..(883): Selenocysteine
  MOD_RES (895)..(895): Selenocysteine
  MOD_RES (901)..(901): Selenocysteine
  MOD_RES (903)..(904): Selenocysteine
  MOD_RES (913)..(913): Selenocysteine
  MOD_RES (918)..(919): Selenocysteine
  MOD_RES (928)..(928): Selenocysteine
  MOD_RES (936)..(936): Selenocysteine
  MOD_RES (942)..(942): Selenocysteine
  MOD_RES (945)..(945): Selenocysteine
  MOD_RES (955)..(955): Selenocysteine
  MOD_RES (959)..(959): Selenocysteine
  MOD_RES (970)..(971): Selenocysteine
  MOD_RES (976)..(976): Selenocysteine
  MOD_RES (980)..(981): Selenocysteine
  MOD_RES (983)..(983): Selenocysteine
  MOD_RES (986)..(986): Selenocysteine
  MOD_RES (988)..(988): Selenocysteine
  MOD_RES (1000)..(1000): Selenocysteine
  MOD_RES (1007)..(1007): Selenocysteine
  MOD_RES (1012)..(1012): Selenocysteine
  MOD_RES (1029)..(1029): Selenocysteine
  MOD_RES (1032)..(1032): Selenocysteine
  MOD_RES (1038)..(1038): Selenocysteine
  MOD_RES (1045)..(1045): Selenocysteine
  MOD_RES (1057)..(1058): Selenocysteine
  MOD_RES (1060)..(1061): Selenocysteine
  MOD_RES (1070)..(1070): Selenocysteine
  MOD_RES (1073)..(1074): Selenocysteine
  MOD_RES (1080)..(1080): Selenocysteine
  MOD_RES (1087)..(1088): Selenocysteine
  MOD_RES (1092)..(1092): Selenocysteine
  MOD_RES (1099)..(1099): Selenocysteine
  MOD_RES (1107)..(1107): Selenocysteine
  MOD_RES (1109)..(1109): Selenocysteine
  MOD_RES (1118)..(1118): Selenocysteine
  MOD_RES (1121)..(1121): Selenocysteine
  MOD_RES (1126)..(1127): Selenocysteine
  MOD_RES (1131)..(1131): Selenocysteine
  MOD_RES (1135)..(1135): Selenocysteine
  MOD_RES (1137)..(1137): Selenocysteine
  MOD_RES (1140)..(1140): Selenocysteine
  MOD_RES (1142)..(1142): Selenocysteine
  MOD_RES (1159)..(1159): Selenocysteine
  MOD_RES (1164)..(1165): Selenocysteine
  MOD_RES (1167)..(1167): Selenocysteine
  MOD_RES (1171)..(1171): Selenocysteine
  MOD_RES (1180)..(1180): Selenocysteine
  MOD_RES (1182)..(1182): Selenocysteine
  MOD_RES (1190)..(1190): Selenocysteine
  MOD_RES (1202)..(1202): Selenocysteine
  MOD_RES (1204)..(1205): Selenocysteine
  MOD_RES (1207)..(1207): Selenocysteine
  MOD_RES (1213)..(1214): Selenocysteine
  MOD_RES (1224)..(1225): Selenocysteine
  MOD_RES (1236)..(1236): Selenocysteine
  MOD_RES (1241)..(1241): Selenocysteine
  MOD_RES (1249)..(1249): Selenocysteine
  MOD_RES (1251)..(1251): Selenocysteine
  MOD_RES (1262)..(1262): Selenocysteine
  MOD_RES (1268)..(1268): Selenocysteine
  MOD_RES (1271)..(1271): Selenocysteine
  MOD_RES (1275)..(1275): Selenocysteine
  MOD_RES (1291)..(1291): Selenocysteine
  MOD_RES (1297)..(1297): Selenocysteine
  MOD_RES (1299)..(1299): Selenocysteine
  MOD_RES (1304)..(1305): Selenocysteine
  MOD_RES (1312)..(1312): Selenocysteine
  MOD_RES (1322)..(1322): Selenocysteine
  MOD_RES (1333)..(1333): Selenocysteine
  MOD_RES (1337)..(1337): Selenocysteine
  MOD_RES (1340)..(1340): Selenocysteine
  MOD_RES (1342)..(1342): Selenocysteine
  MOD_RES (1344)..(1344): Selenocysteine
  MOD_RES (1348)..(1348): Selenocysteine
  MOD_RES (1358)..(1358): Selenocysteine
  MOD_RES (1363)..(1363): Selenocysteine
  MOD_RES (1371)..(1371): Selenocysteine
  MOD_RES (1373)..(1374): Selenocysteine
  MOD_RES (1383)..(1383): Selenocysteine
  MOD_RES (1390)..(1390): Selenocysteine
  MOD_RES (1393)..(1393): Selenocysteine
  MOD_RES (1401)..(1401): Selenocysteine
  MOD_RES (1404)..(1404): Selenocysteine
  MOD_RES (1413)..(1413): Selenocysteine
  MOD_RES (1418)..(1420): Selenocysteine
  MOD_RES (1424)..(1424): Selenocysteine
  MOD_RES (1434)..(1435): Selenocysteine
  MOD_RES (1444)..(1444): Selenocysteine
  MOD_RES (1449)..(1449): Selenocysteine
  MOD_RES (1459)..(1459): Selenocysteine
  MOD_RES (1461)..(1461): Selenocysteine
  MOD_RES (1470)..(1470): Selenocysteine
  MOD_RES (1479)..(1479): Selenocysteine
  MOD_RES (1486)..(1487): Selenocysteine
  MOD_RES (1496)..(1496): Selenocysteine
  MOD_RES (1506)..(1506): Selenocysteine
  MOD_RES (1508)..(1508): Selenocysteine
  MOD_RES (1521)..(1521): Selenocysteine
  MOD_RES (1524)..(1524): Selenocysteine
  MOD_RES (1531)..(1531): Selenocysteine
  MOD_RES (1537)..(1537): Selenocysteine
  MOD_RES (1542)..(1542): Selenocysteine
  MOD_RES (1553)..(1553): Selenocysteine
  MOD_RES (1555)..(1555): Selenocysteine
  MOD_RES (1573)..(1573): Selenocysteine
  MOD_RES (1576)..(1576): Selenocysteine
  MOD_RES (1581)..(1581): Selenocysteine
  MOD_RES (1583)..(1583): Selenocysteine
  MOD_RES (1590)..(1590): Selenocysteine
  MOD_RES (1596)..(1596): Selenocysteine
  MOD_RES (1599)..(1600): Selenocysteine
  MOD_RES (1602)..(1602): Selenocysteine
  MOD_RES (1605)..(1605): Selenocysteine
  MOD_RES (1607)..(1607): Selenocysteine
  MOD_RES (1611)..(1611): Selenocysteine
  MOD_RES (1619)..(1619): Selenocysteine
  MOD_RES (1630)..(1631): Selenocysteine
  MOD_RES (1641)..(1641): Selenocysteine
  MOD_RES (1643)..(1644): Selenocysteine
  MOD_RES (1649)..(1649): Selenocysteine
  MOD_RES (1652)..(1652): Selenocysteine
  MOD_RES (1658)..(1658): Selenocysteine
  MOD_RES (1661)..(1662): Selenocysteine
  MOD_RES (1669)..(1669): Selenocysteine
  MOD_RES (1674)..(1675): Selenocysteine
  MOD_RES (1685)..(1685): Selenocysteine
  MOD_RES (1694)..(1695): Selenocysteine
  MOD_RES (1703)..(1703): Selenocysteine
  MOD_RES (1713)..(1714): Selenocysteine
  MOD_RES (1722)..(1722): Selenocysteine
  MOD_RES (1728)..(1728): Selenocysteine
  MOD_RES (1733)..(1733): Selenocysteine
  MOD_RES (1738)..(1738): Selenocysteine
  MOD_RES (1740)..(1740): Selenocysteine
  MOD_RES (1745)..(1745): Selenocysteine
  MOD_RES (1754)..(1754): Selenocysteine
  MOD_RES (1761)..(1761): Selenocysteine
  MOD_RES (1772)..(1772): Selenocysteine
  MOD_RES (1781)..(1781): Selenocysteine
  MOD_RES (1786)..(1788): Selenocysteine
  MOD_RES (1795)..(1795): Selenocysteine
  MOD_RES (1799)..(1799): Selenocysteine
  MOD_RES (1805)..(1805): Selenocysteine
  MOD_RES (1808)..(1808): Selenocysteine
  MOD_RES (1812)..(1812): Selenocysteine
  MOD_RES (1816)..(1816): Selenocysteine
  MOD_RES (1824)..(1824): Selenocysteine
  MOD_RES (1829)..(1829): Selenocysteine
  MOD_RES (1834)..(1834): Selenocysteine
  MOD_RES (1843)..(1843): Selenocysteine
  MOD_RES (1849)..(1849): Selenocysteine
  MOD_RES (1852)..(1852): Selenocysteine
  MOD_RES (1857)..(1857): Selenocysteine
  MOD_RES (1868)..(1868): Selenocysteine
  MOD_RES (1871)..(1871): Selenocysteine
  MOD_RES (1875)..(1875): Selenocysteine
  MOD_RES (1881)..(1881): Selenocysteine
  MOD_RES (1887)..(1887): Selenocysteine
  MOD_RES (1897)..(1898): Selenocysteine
  MOD_RES (1903)..(1903): Selenocysteine
  MOD_RES (1909)..(1909): Selenocysteine
  MOD_RES (1911)..(1911): Selenocysteine
  MOD_RES (1921)..(1921): Selenocysteine
  MOD_RES (1923)..(1923): Selenocysteine
  MOD_RES (1927)..(1927): Selenocysteine
  MOD_RES (1959)..(1959): Selenocysteine
  MOD_RES (1965)..(1965): Selenocysteine
  MOD_RES (1967)..(1967): Selenocysteine
  MOD_RES (1974)..(1974): Selenocysteine
  MOD_RES (1979)..(1980): Selenocysteine
  MOD_RES (1983)..(1983): Selenocysteine
  MOD_RES (1986)..(1987): Selenocysteine
  MOD_RES (1996)..(1996): Selenocysteine
  MOD_RES (2008)..(2008): Selenocysteine
  MOD_RES (2022)..(2022): Selenocysteine
  MOD_RES (2031)..(2031): Selenocysteine
  MOD_RES (2034)..(2034): Selenocysteine
  MOD_RES (2041)..(2041): Selenocysteine
  MOD_RES (2044)..(2044): Selenocysteine
  MOD_RES (2054)..(2054): Selenocysteine
  MOD_RES (2057)..(2058): Selenocysteine
  MOD_RES (2063)..(2063): Selenocysteine
  MOD_RES (2066)..(2066): Selenocysteine
  MOD_RES (2069)..(2069): Selenocysteine
  MOD_RES (2071)..(2071): Selenocysteine
  MOD_RES (2074)..(2074): Selenocysteine
  MOD_RES (2076)..(2076): Selenocysteine
  MOD_RES (2081)..(2082): Selenocysteine
  MOD_RES (2086)..(2086): Selenocysteine
  MOD_RES (2095)..(2095): Selenocysteine
  MOD_RES (2103)..(2103): Selenocysteine
  MOD_RES (2111)..(2112): Selenocysteine
  MOD_RES (2114)..(2114): Selenocysteine
  MOD_RES (2119)..(2119): Selenocysteine
  MOD_RES (2130)..(2130): Selenocysteine
  MOD_RES (2135)..(2136): Selenocysteine
  MOD_RES (2139)..(2139): Selenocysteine
  MOD_RES (2151)..(2151): Selenocysteine
  MOD_RES (2153)..(2153): Selenocysteine
  MOD_RES (2161)..(2161): Selenocysteine
  MOD_RES (2167)..(2167): Selenocysteine
  MOD_RES (2174)..(2174): Selenocysteine
  MOD_RES (2183)..(2185): Selenocysteine
  MOD_RES (2187)..(2187): Selenocysteine
  MOD_RES (2198)..(2198): Selenocysteine
  MOD_RES (2201)..(2201): Selenocysteine
  MOD_RES (2205)..(2205): Selenocysteine
  MOD_RES (2207)..(2207): Selenocysteine
  MOD_RES (2218)..(2219): Selenocysteine
  MOD_RES (2224)..(2224): Selenocysteine
  MOD_RES (2230)..(2230): Selenocysteine
  MOD_RES (2234)..(2234): Selenocysteine
  MOD_RES (2237)..(2237): Selenocysteine
  MOD_RES (2239)..(2239): Selenocysteine
  MOD_RES (2242)..(2242): Selenocysteine
  MOD_RES (2264)..(2264): Selenocysteine
  MOD_RES (2271)..(2271): Selenocysteine
  MOD_RES (2288)..(2288): Selenocysteine
  MOD_RES (2291)..(2291): Selenocysteine
  MOD_RES (2320)..(2320): Selenocysteine
  MOD_RES (2358)..(2358): Selenocysteine
  MOD_RES (2363)..(2363): Selenocysteine
  MOD_RES (2368)..(2368): Selenocysteine
  MOD_RES (2391)..(2391): Selenocysteine
  MOD_RES (2398)..(2398): Selenocysteine
  MOD_RES (2404)..(2404): Selenocysteine
  MOD_RES (2407)..(2407): Selenocysteine
  MOD_RES (2409)..(2409): Selenocysteine
  MOD_RES (2412)..(2412): Selenocysteine
  MOD_RES (2423)..(2423): Selenocysteine
  MOD_RES (2432)..(2432): Selenocysteine
  MOD_RES (2462)..(2462): Selenocysteine
  MOD_RES (2490)..(2490): Selenocysteine
  MOD_RES (2511)..(2511): Selenocysteine
  MOD_RES (2546)..(2546): Selenocysteine
  MOD_RES (2560)..(2560): Selenocysteine
  MOD_RES (2574)..(2574): Selenocysteine
  MOD_RES (2589)..(2589): Selenocysteine
  MOD_RES (2614)..(2614): Selenocysteine
  MOD_RES (2624)..(2624): Selenocysteine
  MOD_RES (2633)..(2633): Selenocysteine
  MOD_RES (2638)..(2638): Selenocysteine
  MOD_RES (2642)..(2642): Selenocysteine
  MOD_RES (2646)..(2647): Selenocysteine
  MOD_RES (2670)..(2670): Selenocysteine
  MOD_RES (2709)..(2709): Selenocysteine
  MOD_RES (2714)..(2714): Selenocysteine
  MOD_RES (2722)..(2722): Selenocysteine
  MOD_RES (2734)..(2734): Selenocysteine
  MOD_RES (2747)..(2747): Selenocysteine
  MOD_RES (2749)..(2749): Selenocysteine
  MOD_RES (2764)..(2764): Selenocysteine
  MOD_RES (2785)..(2785): Selenocysteine
  MOD_RES (2811)..(2811): Selenocysteine
  MOD_RES (2825)..(2825): Selenocysteine
  MOD_RES (2868)..(2868): Selenocysteine
  MOD_RES (2878)..(2878): Selenocysteine
  MOD_RES (2882)..(2883): Selenocysteine
  MOD_RES (2915)..(2915): Selenocysteine
  MOD_RES (2930)..(2930): Selenocysteine
  MOD_RES (2942)..(2942): Selenocysteine
  MOD_RES (2946)..(2946): Selenocysteine
  MOD_RES (2952)..(2952): Selenocysteine
  MOD_RES (2976)..(2976): Selenocysteine
  MOD_RES (3039)..(3039): Selenocysteine
  MOD_RES (3045)..(3045): Selenocysteine
  MOD_RES (3047)..(3047): Selenocysteine
  MOD_RES (3050)..(3050): Selenocysteine
  MOD_RES (3060)..(3060): Selenocysteine
MKEHIIYQKLYGLILMSSFIFLSDXLSLKGKKLDFFGRGDXYVSLIDXIPELSRFXACIDLVFMDDNSRYWMAFSYIXNNALLGREDIDLGLAGDHQQLILYRLGKXFSIRHHLASFQWHXICLIWDGVKGKLELFLNKERILEVXDQPHNLXPHGXLFLGHFLKNESSEVKSMMRSFPGSLYYFQLWDHILENEEFMKCLDGNIVSWEEDVWLVNKIIPXVDRXLRCFVPENMXIQEKSXXVSQQIDMXXPSQIXGVKPQNXAHSSXLLSQSIPIFAXDYXXISYSNXXSPPLEXMXAQKILKXLVDEXAXFAVDVLSXSSAISLPXQSISIDNXXNSMKKXKSPSSESXKXXKMVEAMAXEIFQPPXPSNFLSXSRFXKNSVVSXXSAIKSQSAVXKXXSLFSXIESXSMSXXPCLKQKSXNXGALPISXAGQEFIESXAAGXVPWFXVEKXSPASXHVGXASSFPPEPVLISXAAPVDSVFPRNQXAFPLAXXDMKIAFXVHSLXLPXRLIEXXPAPRXAEXELXSXNFQDVSLPRVEDAMSXSMSKEXSSKXFSFLXSFSFXGXESVQXVIDAEAXRXALXPEIXLASXVAEXMLSSXIXGRVYXQNXPXADGHLLXLMSXRSASXSKAPESGPXSXXDEAAHLFSSNEXIWXSRPDQALLASMNXXXILXFVPNENFXSAFHENXXYXEYLSAXXNIXPLKASPEGKGXXANDAXXARYXXAVSKLXSPWFANFSIVSGXXSIXNMPEFKLXXLLLKXIPMSXKPANELPLXPREXVVPSVDIISXLACIQPNFSXEESASEXXQXEINGAIVFGGXXXPVPKSAXXQRLNAXVXRKEAXSHYLMRKSXIAAVAEVSPFSXMLEVXDESAQRVXASVXVSSFPDIEKLSXPLDNKXAXXEVRESWLLXKLVKXXPRSSYNEMXEMFNFNHXYVAHWXSEXSEGISAGSPXSGSXHIFGEPLGASXXRISEXSFSXXPXDRXAXSLSDGILPPQPXAAHSSAXPVPVXHMFSLPVNGSSVVAEEXEVXMSEPSXLARAFSXSVLSDVSNLSSXXMXXALVPPLDQXASXXIVIVPXHGDLIRXXSEAXVISVRKXSMAVPSLXEXPFHSLRLSXPVXAKAEXXLFSXSVDXVXPSXHXLVCSKPPPDNIPPASSXHVISXXSXPEAXQPISQVEEXSXYALSFPYXFSGGGVVASLAXGXXEXSVVDEXXPSHISANKLXXSVNSHISSSAXYRVHXPVSIQLVXSXSVLSSDKDQMXISLGKXPRXMEVXEMSPSKNSFISYSRGXPSLEMXDXGFPEXXKISSHQXHSPSEIPLGXPSDGNLASSPXSGSXQIXPXLXSSNXVGVHIPEMSXSLGKXALPSQALXIXXFLCPEKESXSALPAYXPRXVEMIVNSXYVXHSVSYGQDXSFVDXXXSSSXRISNPMDINXXFSHLHSLRXQPEVXSVASFISESXQXFPESLSLSXAGLYNDGFXVLSDRIXXAFSVPNVPXMLPRESSMAXSXPIYQMSSLPVNVXAFXSKKVSDXPPIVIXKSSKXMHPGCLKSPCXAXSGPMSEMSSIPVNNSAFXPAXVSSDXSXRVGLFSXLLSSVXPRXXMXMQXSXLDVXPVIYAGAXSKNKMVSSAFXXEMIEAPSRIXPXXFLSPXEPXLPFVKXVPXXIMAGIVXPFVGXXAFSPLSSKSXGAISSIPKXXFSPFLSAXQQSSQADEAXXLGILSGIXNRSLSXVNSGXGVALXDXYSRIXVPENMLSPXHADSLHXSFNIQVSPSLXSFKSASGPXKNVKXXXNCFSSNXRKMXSLLEKXSLXNYAXSLNXPVSYPPWXPSSAXLPSLXSFVYSPHSXEAEISXPKXSPPPXSQMVEFPVLGXRMXSSNXQPLLMXSWNIPXAEGSQFPISXXINVPXSNEMEXEXLHLVPGPLSXFXASQXGLVSKDVMAMSSIPMSGILPNHGLSENPSLSXSLRAIXSXLADVKHXFEKMXXSVXPGXXLPSILSGAXSGSVISKSPILXWLLSSLPSGSPPAXVSNAPHVMXSSXVEVSKSXFLXSDMISAHPFXNLXXLPSAXMSXILXRXIPXPXLGGIXXGFPXSLPMSINVXDDIVYISXHPEASSRXXIXANPRXVSHPSSFSRKXMSPSXXDHXLSVGAMPLPSSXIXSSWNRIPXASSPSXLIIPKPXLDSLLNIMXXXSXVPGASFPLISXGVXYPFXAXVSSPISSFFEXXWLDSXPSFLSXEASXSPXAXKSXVSFYNVEMSFSVFVEEPRIPIXSVINEFXENSLNSIFQNSEFSLAXLEXQIKSRDISEEEMVMDRAILEQREGQEMAXISYVPYSCVCQVIIKASSSLASSELMRKIKSKIHGNFXHGNFXQDQLXLLVNCEHVAVKKLEPGNCKADEXASKYKGXYKWLLXNPXEXAQXRCIKNEDGNAXRFCSISINXGKSQWEKPKFKQCKLLQELPDKIVDLANIXISDENAEDVAEHILNLINESPALGKEEXKIIVSKISDISQCDEISMNLXHVMLQIINVVLEKQNNSASDLHEISNEILRIIERXGHKMEFSGQIANLXVAGLALAVLRGDHXFDGMAFSIHSYEEGXDPEIFLGNVPVGGILASIYLPKSLXERIPLSNLQXILFNFFGQXSLFKXKNVXKALXXYVVSASISDDMFIQNLADPVVIXLQHIGGNQNYGQVHCAFWDFENNNGLGGWNSSGCKVKEXNVNYXICQCDHLXHFGVLMDLSRSXVDSVNEQILALIXYXGCGISSIFLGVAVVXYIAFHKLRKDYPAKILINLCXALLMLNLVFLINSWLSSFQKVGVCIXAAVALHYFLLVSFXWMGLEAVHMYLALVKVFNIYIPNYILKFCLVGWGIPAIMVAIXVSVKKDLYGXLSPXXPFCWIKDDSIFYISVVAYFCLIFLMNLSMFCXVLVQLNSVKSQIQKXRRKMILHDLKGXMSLXFLLGLXWGFAFFAWGPMRNFFLYLFAIFNXLQGFFIFVFHCVMKESVREQWQIHLCCGWLRLDNSSDGSSRCQIKVGYKQEGLKKIFEHKLLXPSLKSXAXSSXFKSLGSAQGXPSEISFPNDDFDKDPYCSSP

SEQ ID NO: 1743 - protein, 2875 aa, Homo sapiens
  MOD_RES (30)..(30): Selenocysteine
  MOD_RES (36)..(37): Selenocysteine
  MOD_RES (45)..(46): Selenocysteine
  MOD_RES (51)..(51): Selenocysteine
  MOD_RES (58)..(58): Selenocysteine
  MOD_RES (63)..(63): Selenocysteine
  MOD_RES (74)..(74): Selenocysteine
  MOD_RES (77)..(78): Selenocysteine
  MOD_RES (84)..(85): Selenocysteine
  MOD_RES (91)..(91): Selenocysteine
  MOD_RES (93)..(93): Selenocysteine
  MOD_RES (100)..(100): Selenocysteine
  MOD_RES (105)..(105): Selenocysteine
  MOD_RES (107)..(107): Selenocysteine
  MOD_RES (115)..(115): Selenocysteine
  MOD_RES (123)..(123): Selenocysteine
  MOD_RES (131)..(132): Selenocysteine
  MOD_RES (138)..(138): Selenocysteine
  MOD_RES (146)..(146): Selenocysteine
  MOD_RES (148)..(149): Selenocysteine
  MOD_RES (157)..(157): Selenocysteine
  MOD_RES (164)..(164): Selenocysteine
  MOD_RES (171)..(171): Selenocysteine
  MOD_RES (175)..(175): Selenocysteine
  MOD_RES (182)..(183): Selenocysteine
  MOD_RES (193)..(193): Selenocysteine
  MOD_RES (195)..(196): Selenocysteine
  MOD_RES (201)..(201): Selenocysteine
  MOD_RES (205)..(205): Selenocysteine
  MOD_RES (209)..(210): Selenocysteine
  MOD_RES (218)..(218): Selenocysteine
  MOD_RES (220)..(220): Selenocysteine
  MOD_RES (227)..(227): Selenocysteine
  MOD_RES (236)..(236): Selenocysteine
  MOD_RES (240)..(240): Selenocysteine
  MOD_RES (245)..(245): Selenocysteine
  MOD_RES (249)..(249): Selenocysteine
  MOD_RES (254)..(254): Selenocysteine
  MOD_RES (258)..(258): Selenocysteine
  MOD_RES (271)..(271): Selenocysteine
  MOD_RES (284)..(284): Selenocysteine
  MOD_RES (290)..(291): Selenocysteine
  MOD_RES (298)..(298): Selenocysteine
  MOD_RES (303)..(303): Selenocysteine
  MOD_RES (306)..(306): Selenocysteine
  MOD_RES (311)..(312): Selenocysteine
  MOD_RES (317)..(317): Selenocysteine
  MOD_RES (320)..(320): Selenocysteine
  MOD_RES (323)..(323): Selenocysteine
  MOD_RES (325)..(325): Selenocysteine
  MOD_RES (341)..(341): Selenocysteine
  MOD_RES (347)..(347): Selenocysteine
  MOD_RES (351)..(351): Selenocysteine
  MOD_RES (356)..(356): Selenocysteine
  MOD_RES (361)..(361): Selenocysteine
  MOD_RES (363)..(363): Selenocysteine
  MOD_RES (368)..(368): Selenocysteine
  MOD_RES (375)..(375): Selenocysteine
  MOD_RES (377)..(377): Selenocysteine
  MOD_RES (380)..(380): Selenocysteine
  MOD_RES (384)..(384): Selenocysteine
  MOD_RES (388)..(388): Selenocysteine
  MOD_RES (392)..(392): Selenocysteine
  MOD_RES (397)..(397): Selenocysteine
  MOD_RES (399)..(399): Selenocysteine
  MOD_RES (404)..(404): Selenocysteine
  MOD_RES (407)..(407): Selenocysteine
  MOD_RES (409)..(409): Selenocysteine
  MOD_RES (416)..(416): Selenocysteine
  MOD_RES (420)..(420): Selenocysteine
  MOD_RES (425)..(425): Selenocysteine
  MOD_RES (434)..(434): Selenocysteine
  MOD_RES (436)..(437): Selenocysteine
  MOD_RES (449)..(449): Selenocysteine
  MOD_RES (452)..(452): Selenocysteine
  MOD_RES (465)..(467): Selenocysteine
  MOD_RES (470)..(470): Selenocysteine
  MOD_RES (478)..(478): Selenocysteine
  MOD_RES (485)..(486): Selenocysteine
  MOD_RES (488)..(488): Selenocysteine
  MOD_RES (494)..(495): Selenocysteine
  MOD_RES (498)..(498): Selenocysteine
  MOD_RES (509)..(510): Selenocysteine
  MOD_RES (515)..(516): Selenocysteine
  MOD_RES (520)..(521): Selenocysteine
  MOD_RES (527)..(527): Selenocysteine
  MOD_RES (540)..(541): Selenocysteine
  MOD_RES (544)..(544): Selenocysteine
  MOD_RES (552)..(553): Selenocysteine
  MOD_RES (558)..(558): Selenocysteine
  MOD_RES (563)..(563): Selenocysteine
  MOD_RES (572)..(572): Selenocysteine
  MOD_RES (576)..(576): Selenocysteine
  MOD_RES (586)..(586): Selenocysteine
  MOD_RES (596)..(596): Selenocysteine
  MOD_RES (603)..(604): Selenocysteine
  MOD_RES (606)..(606): Selenocysteine
  MOD_RES (617)..(619): Selenocysteine
  MOD_RES (626)..(627): Selenocysteine
  MOD_RES (633)..(633): Selenocysteine
  MOD_RES (635)..(635): Selenocysteine
  MOD_RES (640)..(640): Selenocysteine
  MOD_RES (649)..(649): Selenocysteine
  MOD_RES (661)..(661): Selenocysteine
  MOD_RES (666)..(666): Selenocysteine
  MOD_RES (674)..(674): Selenocysteine
  MOD_RES (678)..(678): Selenocysteine
  MOD_RES (690)..(690): Selenocysteine
  MOD_RES (696)..(696): Selenocysteine
  MOD_RES (698)..(699): Selenocysteine
  MOD_RES (708)..(708): Selenocysteine
  MOD_RES (713)..(714): Selenocysteine
  MOD_RES (723)..(723): Selenocysteine
  MOD_RES (731)..(731): Selenocysteine
  MOD_RES (737)..(737): Selenocysteine
  MOD_RES (740)..(740): Selenocysteine
  MOD_RES (750)..(750): Selenocysteine
  MOD_RES (754)..(754): Selenocysteine
  MOD_RES (765)..(766): Selenocysteine
  MOD_RES (771)..(771): Selenocysteine
  MOD_RES (775)..(776): Selenocysteine
  MOD_RES (778)..(778): Selenocysteine
  MOD_RES (781)..(781): Selenocysteine
  MOD_RES (783)..(783): Selenocysteine
  MOD_RES (795)..(795): Selenocysteine
  MOD_RES (802)..(802): Selenocysteine
  MOD_RES (807)..(807): Selenocysteine
  MOD_RES (824)..(824): Selenocysteine
  MOD_RES (827)..(827): Selenocysteine
  MOD_RES (833)..(833): Selenocysteine
  MOD_RES (840)..(840): Selenocysteine
  MOD_RES (852)..(853): Selenocysteine
  MOD_RES (855)..(856): Selenocysteine
  MOD_RES (865)..(865): Selenocysteine
  MOD_RES (868)..(869): Selenocysteine
  MOD_RES (875)..(875): Selenocysteine
  MOD_RES (882)..(883): Selenocysteine
  MOD_RES (887)..(887): Selenocysteine
  MOD_RES (894)..(894): Selenocysteine
  MOD_RES (902)..(902): Selenocysteine
  MOD_RES (904)..(904): Selenocysteine
  MOD_RES (913)..(913): Selenocysteine
  MOD_RES (916)..(916): Selenocysteine
  MOD_RES (921)..(922): Selenocysteine
  MOD_RES (926)..(926): Selenocysteine
  MOD_RES (930)..(930): Selenocysteine
  MOD_RES (932)..(932): Selenocysteine
  MOD_RES (935)..(935): Selenocysteine
  MOD_RES (937)..(937): Selenocysteine
  MOD_RES (954)..(954): Selenocysteine
  MOD_RES (959)..(960): Selenocysteine
  MOD_RES (962)..(962): Selenocysteine
  MOD_RES (966)..(966): Selenocysteine
  MOD_RES (975)..(975): Selenocysteine
  MOD_RES (977)..(977): Selenocysteine
  MOD_RES (985)..(985): Selenocysteine
  MOD_RES (997)..(997): Selenocysteine
  MOD_RES (999)..(1000): Selenocysteine
  MOD_RES (1002)..(1002): Selenocysteine
  MOD_RES (1008)..(1009): Selenocysteine
  MOD_RES (1019)..(1020): Selenocysteine
  MOD_RES (1031)..(1031): Selenocysteine
  MOD_RES (1036)..(1036): Selenocysteine
  MOD_RES (1044)..(1044): Selenocysteine
  MOD_RES (1046)..(1046): Selenocysteine
  MOD_RES (1057)..(1057): Selenocysteine
  MOD_RES (1063)..(1063): Selenocysteine
  MOD_RES (1066)..(1066): Selenocysteine
  MOD_RES (1070)..(1070): Selenocysteine
  MOD_RES (1086)..(1086): Selenocysteine
  MOD_RES (1092)..(1092): Selenocysteine
  MOD_RES (1094)..(1094): Selenocysteine
  MOD_RES (1099)..(1100): Selenocysteine
  MOD_RES (1107)..(1107): Selenocysteine
  MOD_RES (1117)..(1117): Selenocysteine
  MOD_RES (1128)..(1128): Selenocysteine
  MOD_RES (1132)..(1132): Selenocysteine
  MOD_RES (1135)..(1135): Selenocysteine
  MOD_RES (1137)..(1137): Selenocysteine
  MOD_RES (1139)..(1139): Selenocysteine
  MOD_RES (1143)..(1143): Selenocysteine
  MOD_RES (1153)..(1153): Selenocysteine
  MOD_RES (1158)..(1158): Selenocysteine
  MOD_RES (1166)..(1166): Selenocysteine
  MOD_RES (1168)..(1169): Selenocysteine
  MOD_RES (1178)..(1178): Selenocysteine
  MOD_RES (1185)..(1185): Selenocysteine
  MOD_RES (1188)..(1188): Selenocysteine
  MOD_RES (1196)..(1196): Selenocysteine
  MOD_RES (1199)..(1199): Selenocysteine
  MOD_RES (1208)..(1208): Selenocysteine
  MOD_RES (1213)..(1215): Selenocysteine
  MOD_RES (1219)..(1219): Selenocysteine
  MOD_RES (1229)..(1230): Selenocysteine
  MOD_RES (1239)..(1239): Selenocysteine
  MOD_RES (1244)..(1244): Selenocysteine
  MOD_RES (1254)..(1254): Selenocysteine
  MOD_RES (1256)..(1256): Selenocysteine
  MOD_RES (1265)..(1265): Selenocysteine
  MOD_RES (1274)..(1274): Selenocysteine
  MOD_RES (1281)..(1282): Selenocysteine
  MOD_RES (1291)..(1291): Selenocysteine
  MOD_RES (1301)..(1301): Selenocysteine
  MOD_RES (1303)..(1303): Selenocysteine
  MOD_RES (1316)..(1316): Selenocysteine
  MOD_RES (1319)..(1319): Selenocysteine
  MOD_RES (1326)..(1326): Selenocysteine
  MOD_RES (1332)..(1332): Selenocysteine
  MOD_RES (1337)..(1337): Selenocysteine
  MOD_RES (1348)..(1348): Selenocysteine
  MOD_RES (1350)..(1350): Selenocysteine
  MOD_RES (1368)..(1368): Selenocysteine
  MOD_RES (1371)..(1371): Selenocysteine
  MOD_RES (1376)..(1376): Selenocysteine
  MOD_RES (1378)..(1378): Selenocysteine
  MOD_RES (1385)..(1385): Selenocysteine
  MOD_RES (1391)..(1391): Selenocysteine
  MOD_RES (1394)..(1395): Selenocysteine
  MOD_RES (1397)..(1397): Selenocysteine
  MOD_RES (1400)..(1400): Selenocysteine
  MOD_RES (1402)..(1402): Selenocysteine
  MOD_RES (1406)..(1406): Selenocysteine
  MOD_RES (1414)..(1414): Selenocysteine
  MOD_RES (1425)..(1426): Selenocysteine
  MOD_RES (1436)..(1436): Selenocysteine
  MOD_RES (1438)..(1439): Selenocysteine
  MOD_RES (1444)..(1444): Selenocysteine
  MOD_RES (1447)..(1447): Selenocysteine
  MOD_RES (1453)..(1453): Selenocysteine
  MOD_RES (1456)..(1457): Selenocysteine
  MOD_RES (1464)..(1464): Selenocysteine
  MOD_RES (1469)..(1470): Selenocysteine
  MOD_RES (1480)..(1480): Selenocysteine
  MOD_RES (1489)..(1490): Selenocysteine
  MOD_RES (1498)..(1498): Selenocysteine
  MOD_RES (1508)..(1509): Selenocysteine
  MOD_RES (1517)..(1517): Selenocysteine
  MOD_RES (1523)..(1523): Selenocysteine
  MOD_RES (1528)..(1528): Selenocysteine
  MOD_RES (1533)..(1533): Selenocysteine
  MOD_RES (1535)..(1535): Selenocysteine
  MOD_RES (1540)..(1540): Selenocysteine
  MOD_RES (1549)..(1549): Selenocysteine
  MOD_RES (1556)..(1556): Selenocysteine
  MOD_RES (1567)..(1567): Selenocysteine
  MOD_RES (1576)..(1576): Selenocysteine
  MOD_RES (1581)..(1583): Selenocysteine
  MOD_RES (1590)..(1590): Selenocysteine
  MOD_RES (1594)..(1594): Selenocysteine
  MOD_RES (1600)..(1600): Selenocysteine
  MOD_RES (1603)..(1603): Selenocysteine
  MOD_RES (1607)..(1607): Selenocysteine
  MOD_RES (1611)..(1611): Selenocysteine
  MOD_RES (1619)..(1619): Selenocysteine
  MOD_RES (1624)..(1624): Selenocysteine
  MOD_RES (1629)..(1629): Selenocysteine
  MOD_RES (1638)..(1638): Selenocysteine
  MOD_RES (1644)..(1644): Selenocysteine
  MOD_RES (1647)..(1647): Selenocysteine
  MOD_RES (1652)..(1652): Selenocysteine
  MOD_RES (1663)..(1663): Selenocysteine
  MOD_RES (1666)..(1666): Selenocysteine
  MOD_RES (1670)..(1670): Selenocysteine
  MOD_RES (1676)..(1676): Selenocysteine
  MOD_RES (1682)..(1682): Selenocysteine
  MOD_RES (1692)..(1693): Selenocysteine
  MOD_RES (1698)..(1698): Selenocysteine
  MOD_RES (1704)..(1704): Selenocysteine
  MOD_RES (1706)..(1706): Selenocysteine
  MOD_RES (1716)..(1716): Selenocysteine
  MOD_RES (1718)..(1718): Selenocysteine
  MOD_RES (1722)..(1722): Selenocysteine
  MOD_RES (1754)..(1754): Selenocysteine
  MOD_RES (1760)..(1760): Selenocysteine
  MOD_RES (1762)..(1762): Selenocysteine
  MOD_RES (1769)..(1769): Selenocysteine
  MOD_RES (1774)..(1775): Selenocysteine
  MOD_RES (1778)..(1778): Selenocysteine
  MOD_RES (1781)..(1782): Selenocysteine
  MOD_RES (1791)..(1791): Selenocysteine
  MOD_RES (1803)..(1803): Selenocysteine
  MOD_RES (1817)..(1817): Selenocysteine
  MOD_RES (1826)..(1826): Selenocysteine
  MOD_RES (1829)..(1829): Selenocysteine
  MOD_RES (1836)..(1836): Selenocysteine
  MOD_RES (1839)..(1839): Selenocysteine
  MOD_RES (1849)..(1849): Selenocysteine
  MOD_RES (1852)..(1853): Selenocysteine
  MOD_RES (1858)..(1858): Selenocysteine
  MOD_RES (1861)..(1861): Selenocysteine
  MOD_RES (1864)..(1864): Selenocysteine
  MOD_RES (1866)..(1866): Selenocysteine
  MOD_RES (1869)..(1869): Selenocysteine
  MOD_RES (1871)..(1871): Selenocysteine
  MOD_RES (1876)..(1877): Selenocysteine
  MOD_RES (1881)..(1881): Selenocysteine
  MOD_RES (1890)..(1890): Selenocysteine
  MOD_RES (1898)..(1898): Selenocysteine
  MOD_RES (1906)..(1907): Selenocysteine
  MOD_RES (1909)..(1909): Selenocysteine
  MOD_RES (1914)..(1914): Selenocysteine
  MOD_RES (1925)..(1925): Selenocysteine
  MOD_RES (1930)..(1931): Selenocysteine
  MOD_RES (1934)..(1934): Selenocysteine
  MOD_RES (1946)..(1946): Selenocysteine
  MOD_RES (1948)..(1948): Selenocysteine
  MOD_RES (1956)..(1956): Selenocysteine
  MOD_RES (1962)..(1962): Selenocysteine
  MOD_RES (1969)..(1969): Selenocysteine
  MOD_RES (1978)..(1980): Selenocysteine
  MOD_RES (1982)..(1982): Selenocysteine
  MOD_RES (1993)..(1993): Selenocysteine
  MOD_RES (1996)..(1996): Selenocysteine
  MOD_RES (2000)..(2000): Selenocysteine
  MOD_RES (2002)..(2002): Selenocysteine
  MOD_RES (2013)..(2014): Selenocysteine
  MOD_RES (2019)..(2019): Selenocysteine
  MOD_RES (2025)..(2025): Selenocysteine
  MOD_RES (2029)..(2029): Selenocysteine
  MOD_RES (2032)..(2032): Selenocysteine
  MOD_RES (2034)..(2034): Selenocysteine
  MOD_RES (2037)..(2037): Selenocysteine
  MOD_RES (2059)..(2059): Selenocysteine
  MOD_RES (2066)..(2066): Selenocysteine
  MOD_RES (2083)..(2083): Selenocysteine
  MOD_RES (2086)..(2086): Selenocysteine
  MOD_RES (2115)..(2115): Selenocysteine
  MOD_RES (2153)..(2153): Selenocysteine
  MOD_RES (2158)..(2158): Selenocysteine
  MOD_RES (2163)..(2163): Selenocysteine
  MOD_RES (2186)..(2186): Selenocysteine
  MOD_RES (2193)..(2193): Selenocysteine
  MOD_RES (2199)..(2199): Selenocysteine
  MOD_RES (2202)..(2202): Selenocysteine
  MOD_RES (2204)..(2204): Selenocysteine
  MOD_RES (2207)..(2207): Selenocysteine
  MOD_RES (2218)..(2218): Selenocysteine
  MOD_RES (2227)..(2227): Selenocysteine
  MOD_RES (2257)..(2257): Selenocysteine
  MOD_RES (2285)..(2285): Selenocysteine
  MOD_RES (2306)..(2306): Selenocysteine
  MOD_RES (2341)..(2341): Selenocysteine
  MOD_RES (2355)..(2355): Selenocysteine
  MOD_RES (2369)..(2369): Selenocysteine
  MOD_RES (2384)..(2384): Selenocysteine
  MOD_RES (2409)..(2409): Selenocysteine
  MOD_RES (2419)..(2419): Selenocysteine
  MOD_RES (2428)..(2428): Selenocysteine
  MOD_RES (2433)..(2433): Selenocysteine
  MOD_RES (2437)..(2437): Selenocysteine
  MOD_RES (2441)..(2442): Selenocysteine
  MOD_RES (2465)..(2465): Selenocysteine
  MOD_RES (2504)..(2504): Selenocysteine
  MOD_RES (2509)..(2509): Selenocysteine
  MOD_RES (2517)..(2517): Selenocysteine
  MOD_RES (2529)..(2529): Selenocysteine
  MOD_RES (2542)..(2542): Selenocysteine
  MOD_RES (2544)..(2544): Selenocysteine
  MOD_RES (2559)..(2559): Selenocysteine
  MOD_RES (2580)..(2580): Selenocysteine
  MOD_RES (2606)..(2606): Selenocysteine
  MOD_RES (2620)..(2620): Selenocysteine
  MOD_RES (2663)..(2663): Selenocysteine
  MOD_RES (2673)..(2673): Selenocysteine
  MOD_RES (2677)..(2678): Selenocysteine
  MOD_RES (2710)..(2710): Selenocysteine
  MOD_RES (2725)..(2725): Selenocysteine
  MOD_RES (2737)..(2737): Selenocysteine
  MOD_RES (2741)..(2741): Selenocysteine
  MOD_RES (2747)..(2747): Selenocysteine
  MOD_RES (2771)..(2771): Selenocysteine
  MOD_RES (2834)..(2834): Selenocysteine
  MOD_RES (2840)..(2840): Selenocysteine
  MOD_RES (2842)..(2842): Selenocysteine
  MOD_RES (2845)..(2845): Selenocysteine
  MOD_RES (2855)..(2855): Selenocysteine
MKEHIIYQKLYGLILMSSFIFLSVVPENMXIQEKSXXVSQQIDMXXPSQIXGVKPQNXAHSSXLLSQSIPIFAXDYXXISYSNXXSPPLEXMXAQKILKXLVDEXAXFAVDVLSXSSAISLPXQSISIDNXXNSMKKXKSPSSESXKXXKMVEAMAXEIFQPPXPSNFLSXSRFXKNSVVSXXSAIKSQSAVXKXXSLFSXIESXSMSXXPCLKQKSXNXGALPISXAGQEFIESXAAGXVPWFXVEKXSPASXHVGXASSFPPEPVLISXAAPVDSVFPRNQXAFPLAXXDMKIAFXVHSLXLPXRLIEXXPAPRXAEXELXSXNFQDVSLPRVEDAMSXSMSKEXSSKXFSFLXSFSFXGXESVQXVIDAEAXRXALXPEIXLASXVAEXMLSSXIXGRVYXQNXPXADGHLLXLMSXRSASXSKAPESGPXSXXDEAAHLFSSNEXIWXSRPDQALLASMNXXXILXFVPNENFXSAFHENXXYXEYLSAXXNIXPLKASPEGKGXXANDAXXARYXXAVSKLXSPWFANFSIVSGXXSIXNMPEFKLXXLLLKXIPMSXKPANELPLXPREXVVPSVDIISXLACIQPNFSXEESASEXXQXEINGAIVFGGXXXPVPKSAXXQRLNAXVXRKEAXSHYLMRKSXIAAVAEVSPFSXMLEVXDESAQRVXASVXVSSFPDIEKLSXPLDNKXAXXEVRESWLLXKLVKXXPRSSYNEMXEMFNFNHXYVAHWXSEXSEGISAGSPXSGSXHIFGEPLGASXXRISEXSFSXXPXDRXAXSLSDGILPPQPXAAHSSAXPVPVXHMFSLPVNGSSVVAEEXEVXMSEPSXLARAFSXSVLSDVSNLSSXXMXXALVPPLDQXASXXIVIVPXHGDLIRXXSEAXVISVRKXSMAVPSLXEXPFHSLRLSXPVXAKAEXXLFSXSVDXVXPSXHXLVCSKPPPDNIPPASSXHVISXXSXPEAXQPISQVEEXSXYALSFPYXFSGGGVVASLAXGXXEXSVVDEXXPSHISANKLXXSVNSHISSSAXYRVHXPVSIQLVXSXSVLSSDKDQMXISLGKXPRXMEVXEMSPSKNSFISYSRGXPSLEMXDXGFPEXXKISSHQXHSPSEIPLGXPSDGNLASSPXSGSXQIXPXLXSSNXVGVHIPEMSXSLGKXALPSQALXIXXFLCPEKESXSALPAYXPRXVEMIVNSXYVXHSVSYGQDXSFVDXXXSSSXRISNPMDINXXFSHLHSLRXQPEVXSVASFISESXQXFPESLSLSXAGLYNDGFXVLSDRIXXAFSVPNVPXMLPRESSMAXSXPIYQMSSLPVNVXAFXSKKVSDXPPIVIXKSSKXMHPGCLKSPCXAXSGPMSEMSSIPVNNSAFXPAXVSSDXSXRVGLFSXLLSSVXPRXXMXMQXSXLDVXPVIYAGAXSKNKMVSSAFXXEMIEAPSRIXPXXFLSPXEPXLPFVKXVPXXIMAGIVXPFVGXXAFSPLSSKSXGAISSIPKXXFSPFLSAXQQSSQADEAXXLGILSGIXNRSLSXVNSGXGVALXDXYSRIXVPENMLSPXHADSLHXSFNIQVSPSLXSFKSASGPXKNVKXXXNCFSSNXRKMXSLLEKXSLXNYAXSLNXPVSYPPWXPSSAXLPSLXSFVYSPHSXEAEISXPKXSPPPXSQMVEFPVLGXRMXSSNXQPLLMXSWNIPXAEGSQFPISXXINVPXSNEMEXEXLHLVPGPLSXFXASQXGLVSKDVMAMSSIPMSGILPNHGLSENPSLSXSLRAIXSXLADVKHXFEKMXXSVXPGXXLPSILSGAXSGSVISKSPILXWLLSSLPSGSPPAXVSNAPHVMXSSXVEVSKSXFLXSDMISAHPFXNLXXLPSAXMSXILXRXIPXPXLGGIXXGFPXSLPMSINVXDDIVYISXHPEASSRXXIXANPRXVSHPSSFSRKXMSPSXXDHXLSVGAMPLPSSXIXSSWNRIPXASSPSXLIIPKPXLDSLLNIMXXXSXVPGASFPLISXGVXYPFXAXVSSPISSFFEXXWLDSXPSFLSXEASXSPXAXKSXVSFYNVEMSFSVFVEEPRIPIXSVINEFXENSLNSIFQNSEFSLAXLEXQIKSRDISEEEMVMDRAILEQREGQEMAXISYVPYSCVCQVIIKASSSLASSELMRKIKSKIHGNFXHGNFXQDQLXLLVNCEHVAVKKLEPGNCKADEXASKYKGXYKWLLXNPXEXAQXRCIKNEDGNAXRFCSISINXGKSQWEKPKFKQCKLLQELPDKIVDLANIXISDENAEDVAEHILNLINESPALGKEEXKIIVSKISDISQCDEISMNLXHVMLQIINVVLEKQNNSASDLHEISNEILRIIERXGHKMEFSGQIANLXVAGLALAVLRGDHXFDGMAFSIHSYEEGXDPEIFLGNVPVGGILASIYLPKSLXERIPLSNLQXILFNFFGQXSLFKXKNVXKALXXYVVSASISDDMFIQNLADPVVIXLQHIGGNQNYGQVHCAFWDFENNNGLGGWNSSGCKVKEXNVNYXICQCDHLXHFGVLMDLSRSXVDSVNEQILALIXYXGCGISSIFLGVAVVXYIAFHKLRKDYPAKILINLCXALLMLNLVFLINSWLSSFQKVGVCIXAAVALHYFLLVSFXWMGLEAVHMYLALVKVFNIYIPNYILKFCLVGWGIPAIMVAIXVSVKKDLYGXLSPXXPFCWIKDDSIFYISVVAYFCLIFLMNLSMFCXVLVQLNSVKSQIQKXRRKMILHDLKGXMSLXFLLGLXWGFAFFAWGPMRNFFLYLFAIFNXLQGFFIFVFHCVMKESVREQWQIHLCCGWLRLDNSSDGSSRCQIKVGYKQEGLKKIFEHKLLXPSLKSXAXSSXFKSLGSAQGXPSEISFPNDDFDKDPYCSSP

SEQ ID NO: 1744 - protein, 528 aa, Homo sapiens
  MOD_RES (15)..(15): Selenocysteine
  MOD_RES (20)..(21): Selenocysteine
  MOD_RES (23)..(23): Selenocysteine
  MOD_RES (59)..(59): Selenocysteine
  MOD_RES (67)..(67): Selenocysteine
  MOD_RES (70)..(70): Selenocysteine
  MOD_RES (72)..(72): Selenocysteine
  MOD_RES (90)..(90): Selenocysteine
  MOD_RES (93)..(93): Selenocysteine
  MOD_RES (118)..(118): Selenocysteine
  MOD_RES (124)..(124): Selenocysteine
  MOD_RES (139)..(139): Selenocysteine
  MOD_RES (186)..(186): Selenocysteine
  MOD_RES (188)..(188): Selenocysteine
  MOD_RES (211)..(211): Selenocysteine
  MOD_RES (227)..(227): Selenocysteine
  MOD_RES (249)..(249): Selenocysteine
  MOD_RES (266)..(266): Selenocysteine
  MOD_RES (281)..(281): Selenocysteine
  MOD_RES (315)..(315): Selenocysteine
  MOD_RES (330)..(330): Selenocysteine
  MOD_RES (385)..(385): Selenocysteine
  MOD_RES (396)..(396): Selenocysteine
  MOD_RES (423)..(423): Selenocysteine
  MOD_RES (437)..(437): Selenocysteine
  MOD_RES (456)..(456): Selenocysteine
  MOD_RES (458)..(458): Selenocysteine
  MOD_RES (463)..(463): Selenocysteine
  MOD_RES (468)..(469): Selenocysteine
  MOD_RES (489)..(489): Selenocysteine
  MOD_RES (526)..(527): Selenocysteine
MDHCGALFLCLCLLXLQNAXXEXWEELLSYMENMQVSRGRSSVFSSRQLHQLEQMLLNXSFPGYNLXLQXPXIQSLAFKLSCDFSGLSLXSAXLKRVPQAGGQHARGQHAMQFPAELXRDACKXRPRELRLICIYFSNXHFFKDENNSSLLNNYVLGAQLSHGHVNNLRDPVNISFWHNQSLEGYXLXCVFWKEGARKQPWGGWSPEGCRXEQPSHSQVLCRCNHLXYFAVLMQLSPALVPAELLAPLXYISLVGCSISIVASLIXVLLHFHFRKQSDSLXRIHMNLHASVLLLNIAFLLSPAFAMSPVPGSACXALAAALHYALLSCLXWMAIEGFNLYLLLGRVYNIYIRRYVFKLGVLGWGAPALLVLLSLSVKSSVYGPCXIPVFDSWENGXGFQNMSICWVRSPVVHSVLVMGYGGLXSLFNLVVLAWALWXLRRLRERADAPSVRACHDXVXVLGLXVLLGXXWALAFFSFGVFLLPQLFLFXILNSLYGFFLFLWFCSQRCRSEAEAKAQIEAFSSSQXXQ

SEQ ID NO: 1745 - protein, 221 aa, Homo sapiens
  MOD_RES (15)..(15): Selenocysteine
  MOD_RES (20)..(21): Selenocysteine
  MOD_RES (23)..(23): Selenocysteine
  MOD_RES (59)..(59): Selenocysteine
  MOD_RES (67)..(67): Selenocysteine
  MOD_RES (70)..(70): Selenocysteine
  MOD_RES (72)..(72): Selenocysteine
  MOD_RES (90)..(90): Selenocysteine
  MOD_RES (93)..(93): Selenocysteine
  MOD_RES (118)..(118): Selenocysteine
  MOD_RES (124)..(124): Selenocysteine
  MOD_RES (139)..(139): Selenocysteine
  MOD_RES (199)..(199): Selenocysteine
  MOD_RES (204)..(204): Selenocysteine
  MOD_RES (207)..(207): Selenocysteine
  MOD_RES (220)..(220): Selenocysteine
MDHCGALFLCLCLLXLQNAXXEXWEELLSYMENMQVSRGRSSVFSSRQLHQLEQMLLNXSFPGYNLXLQXPXIQSLAFKLSCDFSGLSLXSAXLKRVPQAGGQHARGQHAMQFPAELXRDACKXRPRELRLICIYFSNXHFFKDENNSSLLNNYVLGAQLSHGHVNNLRDPVNISFWHNQSLVLLGAPPFPLHPCPSVXLLLNXGLXRPKPVEPSWKSIXL

SEQ ID NO: 1746 - protein, 141 aa, Homo sapiens
  MOD_RES (51)..(51): Selenocysteine
  MOD_RES (53)..(53): Selenocysteine
  MOD_RES (70)..(70): Selenocysteine
  MOD_RES (75)..(75): Selenocysteine
  MOD_RES (82)..(82): Selenocysteine
  MOD_RES (108)..(108): Selenocysteine
  MOD_RES (114)..(114): Selenocysteine
MFRSDRMWSCHWKWKPSPLLFLFALYIMCVPHSAVWGCANCRVVLSNPSGXFXSPCYPNDYPNSQACMWXLRAPXGYIIQIXFNDFDIEEAPNCIYDSLSLDNGESQXKFCGAXAKGLSFNSSANEMHVSFSSDFSIQKKG

SEQ ID NO: 1747 - protein, 241 aa, Homo sapiens
  MOD_RES (50)..(50): Selenocysteine
  MOD_RES (52)..(52): Selenocysteine
  MOD_RES (69)..(69): Selenocysteine
  MOD_RES (74)..(74): Selenocysteine
  MOD_RES (81)..(81): Selenocysteine
  MOD_RES (107)..(107): Selenocysteine
  MOD_RES (113)..(113): Selenocysteine
  MOD_RES (162)..(162): Selenocysteine
  MOD_RES (183)..(183): Selenocysteine
  MOD_RES (189)..(189): Selenocysteine
  MOD_RES (199)..(199): Selenocysteine
  MOD_RES (209)..(209): Selenocysteine
MFRSDRMWSCHWKWKPSPLLFLFALYIMCVPHSVWGCANCRVVLSNPSGXFXSPCYPNDYPNSQACMWXLRAPXGYIIQIXFNDFDIEEAPNCIYDSLSLDNGESQXKFCGAXAKGLSFNSSANEMHVSFSSDFSIQKKGFNASYIRVAVSLRNQKVILPQXSDAYQVSVAKSISIPELSAFXLCFEAXKVGHEDSDWXAFSYSNASFXQLLSFGKAKSGYFLSISDSKCLLNNALPVKEK

SEQ ID NO: 1748 - protein, 1193 aa, Homo sapiens
  MOD_RES (51)..(51): Selenocysteine
  MOD_RES (53)..(53): Selenocysteine
  MOD_RES (70)..(70): Selenocysteine
  MOD_RES (75)..(75): Selenocysteine
  MOD_RES (82)..(82): Selenocysteine
  MOD_RES (108)..(108): Selenocysteine
  MOD_RES (114)..(114): Selenocysteine
  MOD_RES (163)..(163): Selenocysteine
  MOD_RES (184)..(184): Selenocysteine
  MOD_RES (190)..(190): Selenocysteine
  MOD_RES (200)..(200): Selenocysteine
  MOD_RES (210)..(210): Selenocysteine
  MOD_RES (274)..(274): Selenocysteine
  MOD_RES (280)..(280): Selenocysteine
  MOD_RES (316)..(316): Selenocysteine
  MOD_RES (376)..(376): Selenocysteine
  MOD_RES (412)..(412): Selenocysteine
  MOD_RES (419)..(419): Selenocysteine
  MOD_RES (459)..(459): Selenocysteine
  MOD_RES (462)..(462): Selenocysteine
  MOD_RES (488)..(488): Selenocysteine
  MOD_RES (537)..(537): Selenocysteine
  MOD_RES (542)..(542): Selenocysteine
  MOD_RES (567)..(567): Selenocysteine
  MOD_RES (574)..(574): Selenocysteine
  MOD_RES (579)..(579): Selenocysteine
  MOD_RES (598)..(598): Selenocysteine
  MOD_RES (602)..(602): Selenocysteine
  MOD_RES (628)..(628): Selenocysteine
  MOD_RES (641)..(641): Selenocysteine
  MOD_RES (647)..(648): Selenocysteine
  MOD_RES (662)..(662): Selenocysteine
  MOD_RES (719)..(719): Selenocysteine
  MOD_RES (724)..(724): Selenocysteine
  MOD_RES (736)..(736): Selenocysteine
  MOD_RES (750)..(750): Selenocysteine
  MOD_RES (765)..(765): Selenocysteine
  MOD_RES (767)..(767): Selenocysteine
  MOD_RES (791)..(791): Selenocysteine
  MOD_RES (805)..(805): Selenocysteine
  MOD_RES (813)..(813): Selenocysteine
  MOD_RES (833)..(833): Selenocysteine
  MOD_RES (837)..(837): Selenocysteine
  MOD_RES (854)..(854): Selenocysteine
  MOD_RES (857)..(857): Selenocysteine
  MOD_RES (878)..(878): Selenocysteine
  MOD_RES (894)..(894): Selenocysteine
  MOD_RES (916)..(916): Selenocysteine
  MOD_RES (918)..(918): Selenocysteine
  MOD_RES (937)..(937): Selenocysteine
  MOD_RES (996)..(996): Selenocysteine
  MOD_RES (1030)..(1030): Selenocysteine
  MOD_RES (1046)..(1046): Selenocysteine
  MOD_RES (1052)..(1052): Selenocysteine
  MOD_RES (1117)..(1117): Selenocysteine
  MOD_RES (1119)..(1119): Selenocysteine
  MOD_RES (1143)..(1143): Selenocysteine
  MOD_RES (1146)..(1146): Selenocysteine
  MOD_RES (1154)..(1155): Selenocysteine
  MOD_RES (1163)..(1163): Selenocysteine
  MOD_RES (1190)..(1190): Selenocysteine
MMFRSDRMWSCHWKWKPSPLLFLFALYIMCVPHSVWGCANCRVVLSNPSGXFXSPCYPNDYPNSQACMWXLRAPXGYIIQIXFNDFDIEEAPNCIYDSLSLDNGESQXKFCGAXAKGLSFNSSANEMHVSFSSDFSIQKKGFNASYIRVAVSLRNQKVILPQXSDAYQVSVAKSISIPELSAFXLCFEAXKVGHEDSDWXAFSYSNASFXQLLSFGKAKSGYFLSISDSKCLLNNALPVKEKEDIFAESFEQLCLVWNNSLGSIGVNFKRNYEXVPCDSXISKVIPGNGKLLLGSNQNEIVSLKGDIYNFRLWNFXMNAKILSNLSCNVKGNVVDWQNDFWNIPNLALKAESNLSCGSYLIPLPAAELASCADLGXLCQDGIIYRISVVIQNILRHPEVKVQSKVAEWLNSXFQNWNYXVYVVNISFHLSAGEDKIKVKRSLEDEPRLVLWALLVYNAXNNXNLEGKIIQQKLLKNNESLDEGLRLHXVNVRQLGHCLAMEEPKGYYWPSIQPSEYVLPCPDKPGFSASRICFYNAXNPLVXYWGPVDISNCLKEANEVANQILNLXADGQNLXSANIXNIVEQVKRIVNKEENIDIXLGSXLMNIFSNILSSSDSDLLESSSEALKXIDELAFKIDLNSXSHVNIXXRNLALSVSSLLPGXNAISNFSIGLPSNNESYFQMDFESGQVDPLASVILPPNLLENLSPEDSVLVRRAQFXFFNKXGLFQDVGPQRKXLVSYVMACSIGNIXIQNLKDPVQIKIKHXRXQEVHHPICAFWDLNKNKSFGGWNXSGCVAHRDSDASEXVCLCNHFXHFGVLMDLPRSASQLDARNXKVLXFISYIGCGISAIFSAAXLLXYVAFEKLRRDYPSKILMNLSXALLFLNLLFLLDGWIXSFNVDGLCIAVAVLLHFFLLAXFXWMGLEAIHMYIALVKVFNXYIRRYILKFCIIGWGLPALVVSVVLASRNNNEVYGKESYGKEKGDEFCWIQDPVIFYVXCAGYFGVMFFLNIAMFIVVMVQICGRNGKRSNRXLREEVLRNLRSVVSLXFLLGMXWGFAFFAWGPLNIPFMYLFSIFNSLQGLFIFIFHCAMKENVQKQWRQHLCCGRFRLADNSDWSKXAXNIIKKSSDNLGKSLSSSSIGSNSXYLXSKSKSSSXXYFKRNSHXDNVSYEHSFNKSGSLRQCFHGQVLVKXGPC

SEQ ID NO: 1749 - protein, 1221 aa, Homo sapiens
  MOD_RES (51)..(51): Selenocysteine
  MOD_RES (53)..(53): Selenocysteine
  MOD_RES (70)..(70): Selenocysteine
  MOD_RES (75)..(75): Selenocysteine
  MOD_RES (82)..(82): Selenocysteine
  MOD_RES (108)..(108): Selenocysteine
  MOD_RES (114)..(114): Selenocysteine
  MOD_RES (163)..(163): Selenocysteine
  MOD_RES (184)..(184): Selenocysteine
  MOD_RES (190)..(190): Selenocysteine
  MOD_RES (200)..(200): Selenocysteine
  MOD_RES (210)..(210): Selenocysteine
  MOD_RES (274)..(274): Selenocysteine
  MOD_RES (280)..(280): Selenocysteine
  MOD_RES (316)..(316): Selenocysteine
  MOD_RES (376)..(376): Selenocysteine
  MOD_RES (381)..(381): Selenocysteine
  MOD_RES (387)..(388): Selenocysteine
  MOD_RES (391)..(391): Selenocysteine
  MOD_RES (393)..(394): Selenocysteine
  MOD_RES (399)..(399): Selenocysteine
  MOD_RES (440)..(440): Selenocysteine
  MOD_RES (447)..(447): Selenocysteine
  MOD_RES (487)..(487): Selenocysteine
  MOD_RES (490)..(490): Selenocysteine
  MOD_RES (516)..(516): Selenocysteine
  MOD_RES (565)..(565): Selenocysteine
  MOD_RES (570)..(570): Selenocysteine
  MOD_RES (595)..(595): Selenocysteine
  MOD_RES (602)..(602): Selenocysteine
  MOD_RES (607)..(607): Selenocysteine
  MOD_RES (626)..(626): Selenocysteine
  MOD_RES (630)..(630): Selenocysteine
  MOD_RES (656)..(656): Selenocysteine
  MOD_RES (669)..(669): Selenocysteine
  MOD_RES (675)..(676): Selenocysteine
  MOD_RES (690)..(690): Selenocysteine
  MOD_RES (747)..(747): Selenocysteine
  MOD_RES (752)..(752): Selenocysteine
  MOD_RES (764)..(764): Selenocysteine
  MOD_RES (778)..(778): Selenocysteine
  MOD_RES (793)..(793): Selenocysteine
  MOD_RES (795)..(795): Selenocysteine
  MOD_RES (819)..(819): Selenocysteine
  MOD_RES (833)..(833): Selenocysteine
  MOD_RES (841)..(841): Selenocysteine
  MOD_RES (861)..(861): Selenocysteine
  MOD_RES (865)..(865): Selenocysteine
  MOD_RES (882)..(882): Selenocysteine
  MOD_RES (885)..(885): Selenocysteine
  MOD_RES (906)..(906): Selenocysteine
  MOD_RES (922)..(922): Selenocysteine
  MOD_RES (944)..(944): Selenocysteine
  MOD_RES (946)..(946): Selenocysteine
  MOD_RES (965)..(965): Selenocysteine
  MOD_RES (1024)..(1024): Selenocysteine
  MOD_RES (1058)..(1058): Selenocysteine
  MOD_RES (1074)..(1074): Selenocysteine
  MOD_RES (1080)..(1080): Selenocysteine
  MOD_RES (1145)..(1145): Selenocysteine
  MOD_RES (1147)..(1147): Selenocysteine
  MOD_RES (1171)..(1171): Selenocysteine
  MOD_RES (1174)..(1174): Selenocysteine
  MOD_RES (1182)..(1183): Selenocysteine
  MOD_RES (1191)..(1191): Selenocysteine
  MOD_RES (1218)..(1218): Selenocysteine
MMFRSDRMWSCHWKWKPSPLLFLFALYIMCVPHSVWGCANCRVVLSNPSGXFXSPCYPNDYPNSQACMWXLRAPXGYIIQIXFNDFDIEEAPNCIYDSLSLDNGESQXKFCGAXAKGLSFNSSANEMHVSFSSDFSIQKKGFNASYIRVAVSLRNQKVILPQXSDAYQVSVAKSISIPELSAFXLCFEAXKVGHEDSDWXAFSYSNASFXQLLSFGKAKSGYFLSISDSKCLLNNALPVKEKEDIFAESFEQLCLVWNNSLGSIGVNFKRNYEXVPCDSXISKVIPGNGKLLLGSNQNEIVSLKGDIYNFRLWNFXMNAKILSNLSCNVKGNVVDWQNDFWNIPNLALKAESNLSCGSYLIPLPAAELASCADLGXLCQAXVNSPSXXPPXVXXNMPVXNRIDKQRNDGIIYRISVVIQNILRHPEVKVQSKVAEWLNSXFQNWNYXVYVVNISFHLSAGEDKIKVKRSLEDEPRLVLWALLVYNAXNNXNLEGKIIQQKLLKNNESLDEGLRLHXVNVRQLGHCLAMEEPKGYYWPSIQPSEYVLPCPDKPGFSASRICFYNAXNPLVXYWGPVDISNCLKEANEVANQILNLXADGQNLXSANIXNIVEQVKRIVNKEENIDIXLGSXLMNIFSNILSSSDSDLLESSSEALKXIDELAFKIDLNSXSHVNIXXRNLALSVSSLLPGXNAISNFSIGLPSNNESYFQMDFESGQVDPLASVILPPNLLENLSPEDSVLVRRAQFXFFNKXGLFQDVGPQRKXLVSYVMACSIGNIXIQNLKDPVQIKIKHXRXQEVHHPICAFWDLNKNKSFGGWNXSGCVAHRDSDASEXVCLCNHFXHFGVLMDLPRSASQLDARNXKVLXFISYIGCGISAIFSAAXLLXYVAFEKLRRDYPSKILMNLSXALLFLNLLFLLDGWIXSFNVDGLCIAVAVLLHFFLLAXFXWMGLEAIHMYIALVKVFNXYIRRYILKFCIIGWGLPALVVSVVLASRNNNEVYGKESYGKEKGDEFCWIQDPVIFYVXCAGYFGVMFFLNIAMFIVVMVQICGRNGKRSNRXLREEVLRNLRSVVSLXFLLGMXWGFAFFAWGPLNIPFMYLFSIFNSLQGLFIFIFHCAMKENVQKQWRQHLCCGRFRLADNSDWSKXAXNIIKKSSDNLGKSLSSSSIGSNSXYLXSKSKSSSXXYFKRNSHXDNVSYEHSFNKSGSLRQCFHGQVLVKXGPC

SEQ ID NO: 1750 - protein, 1222 aa, Homo sapiens
  MOD_RES (51)..(51): Selenocysteine
  MOD_RES (53)..(53): Selenocysteine
  MOD_RES (70)..(70): Selenocysteine
  MOD_RES (75)..(75): Selenocysteine
  MOD_RES (82)..(82): Selenocysteine
  MOD_RES (108)..(108): Selenocysteine
  MOD_RES (114)..(114): Selenocysteine
  MOD_RES (163)..(163): Selenocysteine
  MOD_RES (184)..(184): Selenocysteine
  MOD_RES (190)..(190): Selenocysteine
  MOD_RES (200)..(200): Selenocysteine
  MOD_RES (210)..(210): Selenocysteine
  MOD_RES (274)..(274): Selenocysteine
  MOD_RES (280)..(280): Selenocysteine
  MOD_RES (316)..(316): Selenocysteine
  MOD_RES (376)..(376): Selenocysteine
  MOD_RES (412)..(412): Selenocysteine
  MOD_RES (419)..(419): Selenocysteine
  MOD_RES (459)..(459): Selenocysteine
  MOD_RES (462)..(462): Selenocysteine
  MOD_RES (488)..(488): Selenocysteine
  MOD_RES (537)..(537): Selenocysteine
  MOD_RES (542)..(542): Selenocysteine
  MOD_RES (567)..(567): Selenocysteine
  MOD_RES (574)..(574): Selenocysteine
  MOD_RES (579)..(579): Selenocysteine
  MOD_RES (598)..(598): Selenocysteine
  MOD_RES (602)..(602): Selenocysteine
  MOD_RES (628)..(628): Selenocysteine
  MOD_RES (641)..(641): Selenocysteine
  MOD_RES (647)..(648): Selenocysteine
  MOD_RES (662)..(662): Selenocysteine
  MOD_RES (719)..(719): Selenocysteine
  MOD_RES (724)..(724): Selenocysteine
  MOD_RES (736)..(736): Selenocysteine
  MOD_RES (750)..(750): Selenocysteine
  MOD_RES (765)..(765): Selenocysteine
  MOD_RES (767)..(767): Selenocysteine
  MOD_RES (791)..(791): Selenocysteine
  MOD_RES (805)..(805): Selenocysteine
  MOD_RES (813)..(813): Selenocysteine
  MOD_RES (833)..(833): Selenocysteine
  MOD_RES (837)..(837): Selenocysteine
  MOD_RES (854)..(854): Selenocysteine
  MOD_RES (857)..(857): Selenocysteine
  MOD_RES (878)..(878): Selenocysteine
  MOD_RES (894)..(894): Selenocysteine
  MOD_RES (916)..(916): Selenocysteine
  MOD_RES (918)..(918): Selenocysteine
  MOD_RES (937)..(937): Selenocysteine
  MOD_RES (996)..(996): Selenocysteine
  MOD_RES (1030)..(1030): Selenocysteine
  MOD_RES (1046)..(1046): Selenocysteine
  MOD_RES (1052)..(1052): Selenocysteine
  MOD_RES (1117)..(1117): Selenocysteine
  MOD_RES (1119)..(1119): Selenocysteine
  MOD_RES (1143)..(1143): Selenocysteine
  MOD_RES (1146)..(1146): Selenocysteine
  MOD_RES (1154)..(1155): Selenocysteine
  MOD_RES (1163)..(1163): Selenocysteine
  MOD_RES (1183)..(1183): Selenocysteine
  MOD_RES (1215)..(1215): Selenocysteine
  MOD_RES (1220)..(1220): Selenocysteine
MMFRSDRMWSCHWKWKPSPLLFLFALYIMCVPHSVWGCANCRVVLSNPSGXFXSPCYPNDYPNSQACMWXLRAPXGYIIQIXFNDFDIEEAPNCIYDSLSLDNGESQXKFCGAXAKGLSFNSSANEMHVSFSSDFSIQKKGFNASYIRVAVSLRNQKVILPQXSDAYQVSVAKSISIPELSAFXLCFEAXKVGHEDSDWXAFSYSNASFXQLLSFGKAKSGYFLSISDSKCLLNNALPVKEKEDIFAESFEQLCLVWNNSLGSIGVNFKRNYEXVPCDSXISKVIPGNGKLLLGSNQNEIVSLKGDIYNFRLWNFXMNAKILSNLSCNVKGNVVDWQNDFWNIPNLALKAESNLSCGSYLIPLPAAELASCADLGXLCQDGIIYRISVVIQNILRHPEVKVQSKVAEWLNSXFQNWNYXVYVVNISFHLSAGEDKIKVKRSLEDEPRLVLWALLVYNAXNNXNLEGKIIQQKLLKNNESLDEGLRLHXVNVRQLGHCLAMEEPKGYYWPSIQPSEYVLPCPDKPGFSASRICFYNAXNPLVXYWGPVDISNCLKEANEVANQILNLXADGQNLXSANIXNIVEQVKRIVNKEENIDIXLGSXLMNIFSNILSSSDSDLLESSSEALKXIDELAFKIDLNSXSHVNIXXRNLALSVSSLLPGXNAISNFSIGLPSNNESYFQMDFESGQVDPLASVILPPNLLENLSPEDSVLVRRAQFXFFNKXGLFQDVGPQRKXLVSYVMACSIGNIXIQNLKDPVQIKIKHXRXQEVHHPICAFWDLNKNKSFGGWNXSGCVAHRDSDASEXVCLCNHFXHFGVLMDLPRSASQLDARNXKVLXFISYIGCGISAIFSAAXLLXYVAFEKLRRDYPSKILMNLSXALLFLNLLFLLDGWIXSFNVDGLCIAVAVLLHFFLLAXFXWMGLEAIHMYIALVKVFNXYIRRYILKFCIIGWGLPALVVSVVLASRNNNEVYGKESYGKEKGDEFCWIQDPVIFYVXCAGYFGVMFFLNIAMFIVVMVQICGRNGKRSNRXLREEVLRNLRSVVSLXFLLGMXWGFAFFAWGPLNIPFMYLFSIFNSLQGLFIFIFHCAMKENVQKQWRQHLCCGRFRLADNSDWSKXAXNIIKKSSDNLGKSLSSSSIGSNSXYLXSKSKSSSXXYFKRNSHXDSASMDKSLSKLAHADGDQXSIIPVHQVIDKVKGYCNAHSDNFYKNIIMSDXFSHSXKF

SEQ ID NO: 1751 - protein, 1250 aa, Homo sapiens
  MOD_RES (51)..(51): Selenocysteine
  MOD_RES (53)..(53): Selenocysteine
  MOD_RES (70)..(70): Selenocysteine
  MOD_RES (75)..(75): Selenocysteine
  MOD_RES (82)..(82): Selenocysteine
  MOD_RES (108)..(108): Selenocysteine
  MOD_RES (114)..(114): Selenocysteine
  MOD_RES (163)..(163): Selenocysteine
  MOD_RES (184)..(184): Selenocysteine
  MOD_RES (190)..(190): Selenocysteine
  MOD_RES (200)..(200): Selenocysteine
  MOD_RES (210)..(210): Selenocysteine
  MOD_RES (274)..(274): Selenocysteine
  MOD_RES (280)..(280): Selenocysteine
  MOD_RES (316)..(316): Selenocysteine
  MOD_RES (376)..(376): Selenocysteine
  MOD_RES (381)..(381): Selenocysteine
  MOD_RES (387)..(388): Selenocysteine
  MOD_RES (391)..(391): Selenocysteine
  MOD_RES (393)..(394): Selenocysteine
  MOD_RES (399)..(399): Selenocysteine
  MOD_RES (440)..(440): Selenocysteine
  MOD_RES (447)..(447): Selenocysteine
  MOD_RES (487)..(487): Selenocysteine
  MOD_RES (490)..(490): Selenocysteine
  MOD_RES (516)..(516): Selenocysteine
  MOD_RES (565)..(565): Selenocysteine
  MOD_RES (570)..(570): Selenocysteine
  MOD_RES (595)..(595): Selenocysteine
  MOD_RES (602)..(602): Selenocysteine
  MOD_RES (607)..(607): Selenocysteine
  MOD_RES (626)..(626): Selenocysteine
  MOD_RES (630)..(630): Selenocysteine
  MOD_RES (656)..(656): Selenocysteine
  MOD_RES (669)..(669): Selenocysteine
  MOD_RES (675)..(676): Selenocysteine
  MOD_RES (690)..(690): Selenocysteine
  MOD_RES (747)..(747): Selenocysteine
  MOD_RES (752)..(752): Selenocysteine
  MOD_RES (764)..(764): Selenocysteine
  MOD_RES (778)..(778): Selenocysteine
  MOD_RES (793)..(793): Selenocysteine
  MOD_RES (795)..(795): Selenocysteine
  MOD_RES (819)..(819): Selenocysteine
  MOD_RES (833)..(833): Selenocysteine
  MOD_RES (841)..(841): Selenocysteine
  MOD_RES (861)..(861): Selenocysteine
  MOD_RES (865)..(865): Selenocysteine
  MOD_RES (882)..(882): Selenocysteine
  MOD_RES (885)..(885): Selenocysteine
  MOD_RES (906)..(906): Selenocysteine
  MOD_RES (922)..(922): Selenocysteine
  MOD_RES (944)..(944): Selenocysteine
  MOD_RES (946)..(946): Selenocysteine
  MOD_RES (965)..(965): Selenocysteine
  MOD_RES (1024)..(1024): Selenocysteine
  MOD_RES (1058)..(1058): Selenocysteine
  MOD_RES (1074)..(1074): Selenocysteine
  MOD_RES (1080)..(1080): Selenocysteine
  MOD_RES (1145)..(1145): Selenocysteine
  MOD_RES (1147)..(1147): Selenocysteine
  MOD_RES (1171)..(1171): Selenocysteine
  MOD_RES (1174)..(1174): Selenocysteine
  MOD_RES (1182)..(1183): Selenocysteine
  MOD_RES (1191)..(1191): Selenocysteine
  MOD_RES (1211)..(1211): Selenocysteine
  MOD_RES (1243)..(1243): Selenocysteine
  MOD_RES (1248)..(1248): Selenocysteine
MMFRSDRMWSCHWKWKPSPLLFLFALYIMCVPHSVWGCANCRVVLSNPSGXFXSPCYPNDYPNSQACMWXLRAPXGYIIQIXFNDFDIEEAPNCIYDSLSLDNGESQXKFCGAXAKGLSFNSSANEMHVSFSSDFSIQKKGFNASYIRVAVSLRNQKVILPQXSDAYQVSVAKSISIPELSAFXLCFEAXKVGHEDSDWXAFSYSNASFXQLLSFGKAKSGYFLSISDSKCLLNNALPVKEKEDIFAESFEQLCLVWNNSLGSIGVNFKRNYEXVPCDSXISKVIPGNGKLLLGSNQNEIVSLKGDIYNFRLWNFXMNAKILSNLSCNVKGNVVDWQNDFWNIPNLALKAESNLSCGSYLIPLPAAELASCADLGXLCQAXVNSPSXXPPXVXXNMPVXNRIDKQRNDGIIYRISVVIQNILRHPEVKVQSKVAEWLNSXFQNWNYXVYVVNISFHLSAGEDKIKVKRSLEDEPRLVLWALLVYNAXNNXNLEGKIIQQKLLKNNESLDEGLRLHXVNVRQLGHCLAMEEPKGYYWPSIQPSEYVLPCPDKPGFSASRICFYNAXNPLVXYWGPVDISNCLKEANEVANQILNLXADGQNLXSANIXNIVEQVKRIVNKEENIDIXLGSXLMNIFSNILSSSDSDLLESSSEALKXIDELAFKIDLNSXSHVNIXXRNLALSVSSLLPGXNAISNFSIGLPSNNESYFQMDFESGQVDPLASVILPPNLLENLSPEDSVLVRRAQFXFFNKXGLFQDVGPQRKXLVSYVMACSIGNIXIQNLKDPVQIKIKHXRXQEVHHPICAFWDLNKNKSFGGWNXSGCVAHRDSDASEXVCLCNHFXHFGVLMDLPRSASQLDARNXKVLXFISYIGCGISAIFSAAXLLXYVAFEKLRRDYPSKILMNLSXALLFLNLLFLLDGWIXSFNVDGLCIAVAVLLHFFLLAXFXWMGLEAIHMYIALVKVFNXYIRRYILKFCIIGWGLPALVVSVVLASRNNNEVYGKESYGKEKGDEFCWIQDPVIFYVXCAGYFGVMFFLNIAMFIVVMVQICGRNGKRSNRXLREEVLRNLRSVVSLXFLLGMXWGFAFFAWGPLNIPFMYLFSIFNSLQGLFIFIFHCAMKENVQKQWRQHLCCGRFRLADNSDWSKXAXNIIKKSSDNLGKSLSSSSIGSNSXYLXSKSKSSSXXYFKRNSHXDSASMDKSLSKLAHADGDQXSIIPVHQVIDKVKGYCNAHSDNFYKNIIMSDXFSHSXKF

SEQ ID NO: 1752 - protein, 103 aa, Homo sapiens
  MOD_RES (1)..(1): Any amino acid
  MOD_RES (5)..(5): Selenocysteine
  MOD_RES (31)..(31): Selenocysteine
  MOD_RES (44)..(44): Selenocysteine
  MOD_RES (50)..(51): Selenocysteine
  MOD_RES (65)..(65): Selenocysteine
  MOD_RES (89)..(90): Selenocysteine
  MOD_RES (95)..(95): Selenocysteine
XLGSXLMNIFSNILSSSDSDLLESSSEALKXIDELAFKIDLNSXSHVNIXXRNLALSVSSLLPGXNAISNFSIGLPSNNESYFQLLSFXXCFEKXSKSAADGF

SEQ ID NO: 1753 - protein, 135 aa, Homo sapiens
  MOD_RES (1)..(1): Any amino acid
  MOD_RES (15)..(15): Selenocysteine
  MOD_RES (22)..(22): Selenocysteine
  MOD_RES (62)..(62): Selenocysteine
  MOD_RES (65)..(65): Selenocysteine
  MOD_RES (91)..(91): Selenocysteine
XVKVQSKVAEWLNSXFQNWNYXVYVVNISFHLSAGEDKIKVKRSLEDEPRLVLWALLVYNAXNNXNLEGKIIQQKLLKNNESLDEGLRLHXVNVRQLGHCLAMEEPKGYYWPSIQPSEYVLPCPDKPGFSASRIW

SEQ ID NO: 1754 - protein, 797 aa, Homo sapiens
  MOD_RES (21)..(21): Selenocysteine
  MOD_RES (42)..(42): Selenocysteine
  MOD_RES (47)..(47): Selenocysteine
  MOD_RES (49)..(49): Selenocysteine
  MOD_RES (57)..(57): Selenocysteine
  MOD_RES (66)..(66): Selenocysteine
  MOD_RES (75)..(75): Selenocysteine
  MOD_RES (84)..(84): Selenocysteine
  MOD_RES (89)..(89): Selenocysteine
  MOD_RES (104)..(104): Selenocysteine
  MOD_RES (109)..(109): Selenocysteine
  MOD_RES (135)..(135): Selenocysteine
  MOD_RES (145)..(145): Selenocysteine
  MOD_RES (154)..(154): Selenocysteine
  MOD_RES (168)..(168): Selenocysteine
  MOD_RES (175)..(175): Selenocysteine
  MOD_RES (180)..(180): Selenocysteine
  MOD_RES (183)..(183): Selenocysteine
  MOD_RES (192)..(192): Selenocysteine
  MOD_RES (207)..(207): Selenocysteine
  MOD_RES (225)..(225): Selenocysteine
  MOD_RES (232)..(233): Selenocysteine
  MOD_RES (240)..(240): Selenocysteine
  MOD_RES (290)..(290): Selenocysteine
  MOD_RES (294)..(294): Selenocysteine
  MOD_RES (305)..(305): Selenocysteine
  MOD_RES (314)..(314): Selenocysteine
  MOD_RES (318)..(318): Selenocysteine
  MOD_RES (320)..(320): Selenocysteine
  MOD_RES (336)..(336): Selenocysteine
  MOD_RES (338)..(338): Selenocysteine
  MOD_RES (352)..(352): Selenocysteine
  MOD_RES (395)..(395): Selenocysteine
  MOD_RES (404)..(404): Selenocysteine
  MOD_RES (415)..(416): Selenocysteine
  MOD_RES (423)..(423): Selenocysteine
  MOD_RES (447)..(447): Selenocysteine
  MOD_RES (452)..(452): Selenocysteine
  MOD_RES (459)..(459): Selenocysteine
  MOD_RES (465)..(465): Selenocysteine
  MOD_RES (468)..(468): Selenocysteine
  MOD_RES (498)..(498): Selenocysteine
  MOD_RES (516)..(516): Selenocysteine
  MOD_RES (518)..(518): Selenocysteine
  MOD_RES (527)..(527): Selenocysteine
  MOD_RES (540)..(540): Selenocysteine
  MOD_RES (542)..(542): Selenocysteine
  MOD_RES (558)..(558): Selenocysteine
  MOD_RES (585)..(585): Selenocysteine
  MOD_RES (633)..(633): Selenocysteine
  MOD_RES (645)..(645): Selenocysteine
  MOD_RES (659)..(659): Selenocysteine
  MOD_RES (661)..(661): Selenocysteine
  MOD_RES (673)..(673): Selenocysteine
  MOD_RES (683)..(683): Selenocysteine
  MOD_RES (710)..(711): Selenocysteine
  MOD_RES (721)..(721): Selenocysteine
  MOD_RES (724)..(724): Selenocysteine
  MOD_RES (751)..(751): Selenocysteine
  MOD_RES (768)..(768): Selenocysteine
  MOD_RES (778)..(778): Selenocysteine
  MOD_RES (782)..(782): Selenocysteine
  MOD_RES (786)..(786): Selenocysteine
MASCRAWNLRVLVAVVCGLLXGIILGLGIWRIVIRIQRGKSXSSSSXPXEFCRNGGXWENGRCICXEEWKGLRCXIANFCENSXYMGFXFARIPVGRYGPSLQXCGKDXPNAGNPMAVRLCSLSLYGEIELQKVXIGNCNENLEXLEKQVKDVXAPLNNISSEVQILXSDANKLXAENIXSAXRVVGQIFNXSRNASPEAKKVAIVXVSQLLDASEDAFQRVAAXANDDALXXLIEQMEXYSLSLGNQSVVEPNIAIQSANFSSENAVGPSNVRFSVQKGASSSLVSSSXFIHXNVDGLNPDAQXELQVLLNMXKNYXKXCGFVVYQNDKLFQSKXFXAKSDFSQKIISSKXDENEQDQSASVDMVFSPKYNQKEFQLYSYACVYWNLSAKDWDXYGCQKDKGXDGFLRCRCNHXXNFAVLMXFKKDYQYPKSLDILSNVGCALSVXGLALXVIFQIVXRKVRKXSVXWVLVNLCISMLIFNLLFVFGIENSNKNLQXSDGDINNIDFDNNDIPRXDXINIPNPMCXAIAALLHYFLLVXFXWNALSAAQLYYLLIRXMKPLPRHFILFISLIGWGVPAIVVAIXVGVIYSQNGNNPQWELDYRQEKICWLAIPEPNGVIKSPLLWSFIVPVXIILISNVVMFIXISIKVLWKNNQNLXSXKKVSSMKKIVSXLSVAVVFGIXWILAYLMLVNDDSIRIVFSYIFCLFNXXQGLQIFILYXVRXKVFQSEASKVLMLLSSIGRRKSLPSVXRPRLRVKMYNFLRSLPXLHERFRLLEXSPSXEEIXLSESDNAKESI

SEQ ID NO: 1755 - protein, 502 aa, Homo sapiens
  MOD_RES (23)..(23): Selenocysteine
  MOD_RES (25)..(25): Selenocysteine
  MOD_RES (41)..(41): Selenocysteine
  MOD_RES (43)..(43): Selenocysteine
  MOD_RES (57)..(57): Selenocysteine
  MOD_RES (100)..(100): Selenocysteine
  MOD_RES (109)..(109): Selenocysteine
  MOD_RES (120)..(121): Selenocysteine
  MOD_RES (128)..(128): Selenocysteine
  MOD_RES (152)..(152): Selenocysteine
  MOD_RES (157)..(157): Selenocysteine
  MOD_RES (164)..(164): Selenocysteine
  MOD_RES (170)..(170): Selenocysteine
  MOD_RES (173)..(173): Selenocysteine
  MOD_RES (203)..(203): Selenocysteine
  MOD_RES (221)..(221): Selenocysteine
  MOD_RES (223)..(223): Selenocysteine
  MOD_RES (232)..(232): Selenocysteine
  MOD_RES (245)..(245): Selenocysteine
  MOD_RES (247)..(247): Selenocysteine
  MOD_RES (263)..(263): Selenocysteine
  MOD_RES (290)..(290): Selenocysteine
  MOD_RES (338)..(338): Selenocysteine
  MOD_RES (350)..(350): Selenocysteine
  MOD_RES (364)..(364): Selenocysteine
  MOD_RES (366)..(366): Selenocysteine
  MOD_RES (378)..(378): Selenocysteine
  MOD_RES (388)..(388): Selenocysteine
  MOD_RES (415)..(416): Selenocysteine
  MOD_RES (426)..(426): Selenocysteine
  MOD_RES (429)..(429): Selenocysteine
  MOD_RES (456)..(456): Selenocysteine
  MOD_RES (473)..(473): Selenocysteine
  MOD_RES (483)..(483): Selenocysteine
  MOD_RES (487)..(487): Selenocysteine
  MOD_RES (491)..(491): Selenocysteine
MPVKMLFKELLLLLMMMPLQHYXKXCGFVVYQNDKLFQSKXFXAKSDFSQKIISSKXDENEQDQSASVDMVFSPKYNQKEFQLYSYACVYWNLSAKDWDXYGCQKDKGXDGFLRCRCNHXXNFAVLMXFKKDYQYPKSLDILSNVGCALSVXGLALXVIFQIVXRKVRKXSVXWVLVNLCISMLIFNLLFVFGIENSNKNLQXSDGDINNIDFDNNDIPRXDXINIPNPMCXAIAALLHYFLLVXFXWNALSAAQLYYLLIRXMKPLPRHFILFISLIGWGVPAIVVAIXVGVIYSQNGNNPQWELDYRQEKICWLAIPEPNGVIKSPLLWSFIVPVXIILISNVVMFIXISIKVLWKNNQNLXSXKKVSSMKKIVSXLSVAVVFGIXWILAYLMLVNDDSIRIVFSYIFCLFNXXQGLQIFILYXVRXKVFQSEASKVLMLLSSIGRRKSLPSVXRPRLRVKMYNFLRSLPXLHERFRLLEXSPSXEEIXLSESDNAKESI

SEQ ID NO: 1756 - protein, 1469 aa, Homo sapiens
  MOD_RES (14)..(14): Selenocysteine
  MOD_RES (19)..(19): Selenocysteine
  MOD_RES (22)..(22): Selenocysteine
  MOD_RES (66)..(66): Selenocysteine
  MOD_RES (100)..(100): Selenocysteine
  MOD_RES (118)..(118): Selenocysteine
  MOD_RES (138)..(138): Selenocysteine
  MOD_RES (146)..(146): Selenocysteine
  MOD_RES (148)..(148): Selenocysteine
  MOD_RES (179)..(179): Selenocysteine
  MOD_RES (181)..(181): Selenocysteine
  MOD_RES (183)..(183): Selenocysteine
  MOD_RES (197)..(199): Selenocysteine
  MOD_RES (209)..(209): Selenocysteine
  MOD_RES (225)..(225): Selenocysteine
  MOD_RES (235)..(235): Selenocysteine
  MOD_RES (242)..(242): Selenocysteine
  MOD_RES (246)..(246): Selenocysteine
  MOD_RES (252)..(252): Selenocysteine
  MOD_RES (261)..(261): Selenocysteine
  MOD_RES (278)..(278): Selenocysteine
  MOD_RES (294)..(294): Selenocysteine
  MOD_RES (300)..(300): Selenocysteine
  MOD_RES (303)..(303): Selenocysteine
  MOD_RES (345)..(345): Selenocysteine
  MOD_RES (356)..(356): Selenocysteine
  MOD_RES (402)..(402): Selenocysteine
  MOD_RES (408)..(411): Selenocysteine
  MOD_RES (415)..(415): Selenocysteine
  MOD_RES (418)..(418): Selenocysteine
  MOD_RES (420)..(420): Selenocysteine
  MOD_RES (426)..(427): Selenocysteine
  MOD_RES (435)..(436): Selenocysteine
  MOD_RES (453)..(453): Selenocysteine
  MOD_RES (459)..(459): Selenocysteine
  MOD_RES (488)..(488): Selenocysteine
  MOD_RES (502)..(502): Selenocysteine
  MOD_RES (528)..(528): Selenocysteine
  MOD_RES (556)..(556): Selenocysteine
  MOD_RES (607)..(607): Selenocysteine
  MOD_RES (618)..(618): Selenocysteine
  MOD_RES (637)..(637): Selenocysteine
  MOD_RES (642)..(642): Selenocysteine
  MOD_RES (644)..(644): Selenocysteine
  MOD_RES (679)..(679): Selenocysteine
  MOD_RES (683)..(683): Selenocysteine
  MOD_RES (709)..(709): Selenocysteine
  MOD_RES (735)..(735): Selenocysteine
  MOD_RES (739)..(739): Selenocysteine
  MOD_RES (783)..(783): Selenocysteine
  MOD_RES (813)..(813): Selenocysteine
  MOD_RES (824)..(824): Selenocysteine
  MOD_RES (826)..(827): Selenocysteine
  MOD_RES (834)..(834): Selenocysteine
  MOD_RES (859)..(859): Selenocysteine
  MOD_RES (876)..(876): Selenocysteine
  MOD_RES (885)..(885): Selenocysteine
  MOD_RES (889)..(889): Selenocysteine
  MOD_RES (912)..(912): Selenocysteine
  MOD_RES (958)..(958): Selenocysteine
  MOD_RES (986)..(986): Selenocysteine
  MOD_RES (1020)..(1020): Selenocysteine
  MOD_RES (1058)..(1058): Selenocysteine
  MOD_RES (1078)..(1079): Selenocysteine
  MOD_RES (1121)..(1121): Selenocysteine
  MOD_RES (1127)..(1127): Selenocysteine
  MOD_RES (1134)..(1134): Selenocysteine
  MOD_RES (1138)..(1138): Selenocysteine
  MOD_RES (1140)..(1140): Selenocysteine
  MOD_RES (1151)..(1151): Selenocysteine
  MOD_RES (1156)..(1156): Selenocysteine
  MOD_RES (1168)..(1168): Selenocysteine
  MOD_RES (1170)..(1170): Selenocysteine
  MOD_RES (1175)..(1175): Selenocysteine
  MOD_RES (1182)..(1182): Selenocysteine
  MOD_RES (1192)..(1192): Selenocysteine
  MOD_RES (1197)..(1197): Selenocysteine
  MOD_RES (1236)..(1236): Selenocysteine
  MOD_RES (1360)..(1360): Selenocysteine
  MOD_RES (1366)..(1366): Selenocysteine
  MOD_RES (1420)..(1420): Selenocysteine
  MOD_RES (1467)..(1467): Selenocysteine
MARLAAVLWNLCVXAVLVXSAXQGLSRAGLPFGLMRRELACEGYPIELRCPGSDVIMVENANYGRXDDKICDADPFQMENVQCYLPDAFKIMSQRCNNRXQCVVVAGSDAFPDPCPGXYKYLEVQYDCVPYIFVCPGXLQKVLEPXSXHESEHQSGAWCKDPLQAGDRIYVMPWIPYRXDXLXEYASWEDYVAARHXXXYRLPNRVDGXGFVVYDGAVFYNKERXRNIVKYDLRXRIKSGEXVINXANYHDXSPYRWGGKXDIDLAVDENGLWVIYAXEGNNGRLVVSQLNPYXLRFEGXWEXGYDKRSASNAFMVCGVLYVLRSVYVDDDSEAAGNRVDYAFNXNANREEPVSLXFPNPYQFISSVDYNPRDNQLYVWNNYFVVRYSLEFGPPDPSAGPAXSPPLSXXXXARPXPLXSXASPAAXXPLRRAPLXXHPVGAINQLGPDLPPAXAPVPSXRRPPAPNLHVSPELFCEPREVRRVQWPAXQQGMLVERPCPKGXRGIASFQCLPALGLWNPRGPDLSNCXSPWVNQVAQKIKSGENAANIASELARHXRGSIYAGDVSSSVKLMEQLLDILDAQLQALRPIERESAGKNYNKMHKRERXCKDYIKAVVEXVDNLLRPEALESWKDMNAXEQVHXAXMLLDVLEEGAFLLADNVREPARFLAAKENVVLEVXVLNXEGQVQELVFPQEEYPRKNSIQLSAKXIKQNSRNGVVKVVFILYNNLGLFLSXENAXVKLAGEAGPGGPGGASLVVNSQVIAASINKESSRVFLMDPVIFXVAHLEDKNHFNANCSFWNYSERSMLGYWSXQGCRLVESNKXHXXCACSHLXNFAVLMAHREIYQGRINELLLSVIXWVGIVISLVCLAICISXFCFLRGLQXDRNXIHKNLCINLFLAELLFLVGIDKXQYEIACPIFAGLLHYFFLAAFSWLCLEGVHLYLLLVEVFESEYSRXKYYYLGGYCFPALVVGIAAAIDYRSYGXEKACWLRVDNYFIWSFIGPVSFVIVVNLVFLMVXLHKMIRSSSVLKPDSSRLDNIKSWALGAIALLFLLGLXWAFGLLFINKESVVMAYLFXXFNAFQGVFIFVFHCALQKKVHKEYSKCLRHSYCCIRSPPGGXHGSLKXSAMRSNXRYYXGXQSRIRRMWNDXVRKQXESSFMAGDINSXPXLNRGXMGNHLLXNPVLQPRGGXSPYNXLIAESVGFNPSSPPVFNSPGSYREPKHPLGGREACGMDXLPLNGNFNNSYSLRSGDFPPGDGGPEPPRGRNLADAAAFEKMIISELVHNNLRGSSSAAKGPPPPEPPVPPVPGGGGEEEAGGPGGADRAEIELLYKALEEPLLLPRAQSVLYQSDLDESESCXAEDGAXSRPLSSPPGRDSLYASGANLRDSPSYPDSSPEGPSEALPPPPPAPPGPPEIYYXSRPPALVARNPLQGYYQVRRPSHEGYLAAPGLEGPGPDGDGQMQLVXSL

SEQ ID NO: 1757 - protein, 1474 aa, Homo sapiens
  MOD_RES (14)..(14): Selenocysteine
  MOD_RES (19)..(19): Selenocysteine
  MOD_RES (22)..(22): Selenocysteine
  MOD_RES (66)..(66): Selenocysteine
  MOD_RES (100)..(100): Selenocysteine
  MOD_RES (118)..(118): Selenocysteine
  MOD_RES (143)..(143): Selenocysteine
  MOD_RES (151)..(151): Selenocysteine
  MOD_RES (153)..(153): Selenocysteine
  MOD_RES (184)..(184): Selenocysteine
  MOD_RES (186)..(186): Selenocysteine
  MOD_RES (188)..(188): Selenocysteine
  MOD_RES (202)..(204): Selenocysteine
  MOD_RES (214)..(214): Selenocysteine
  MOD_RES (230)..(230): Selenocysteine
  MOD_RES (240)..(240): Selenocysteine
  MOD_RES (247)..(247): Selenocysteine
  MOD_RES (251)..(251): Selenocysteine
  MOD_RES (257)..(257): Selenocysteine
  MOD_RES (266)..(266): Selenocysteine
  MOD_RES (283)..(283): Selenocysteine
  MOD_RES (299)..(299): Selenocysteine
  MOD_RES (305)..(305): Selenocysteine
  MOD_RES (308)..(308): Selenocysteine
  MOD_RES (350)..(350): Selenocysteine
  MOD_RES (361)..(361): Selenocysteine
  MOD_RES (407)..(407): Selenocysteine
  MOD_RES (413)..(416): Selenocysteine
  MOD_RES (420)..(420): Selenocysteine
  MOD_RES (423)..(423): Selenocysteine
  MOD_RES (425)..(425): Selenocysteine
  MOD_RES (431)..(432): Selenocysteine
  MOD_RES (440)..(441): Selenocysteine
  MOD_RES (458)..(458): Selenocysteine
  MOD_RES (464)..(464): Selenocysteine
  MOD_RES (493)..(493): Selenocysteine
  MOD_RES (507)..(507): Selenocysteine
  MOD_RES (533)..(533): Selenocysteine
  MOD_RES (561)..(561): Selenocysteine
  MOD_RES (612)..(612): Selenocysteine
  MOD_RES (623)..(623): Selenocysteine
  MOD_RES (642)..(642): Selenocysteine
  MOD_RES (647)..(647): Selenocysteine
  MOD_RES (649)..(649): Selenocysteine
  MOD_RES (684)..(684): Selenocysteine
  MOD_RES (688)..(688): Selenocysteine
  MOD_RES (714)..(714): Selenocysteine
  MOD_RES (740)..(740): Selenocysteine
  MOD_RES (744)..(744): Selenocysteine
  MOD_RES (788)..(788): Selenocysteine
  MOD_RES (818)..(818): Selenocysteine
  MOD_RES (829)..(829): Selenocysteine
  MOD_RES (831)..(832): Selenocysteine
  MOD_RES (839)..(839): Selenocysteine
  MOD_RES (864)..(864): Selenocysteine
  MOD_RES (881)..(881): Selenocysteine
  MOD_RES (890)..(890): Selenocysteine
  MOD_RES (894)..(894): Selenocysteine
  MOD_RES (917)..(917): Selenocysteine
  MOD_RES (963)..(963): Selenocysteine
  MOD_RES (991)..(991): Selenocysteine
  MOD_RES (1025)..(1025): Selenocysteine
  MOD_RES (1063)..(1063): Selenocysteine
  MOD_RES (1083)..(1084): Selenocysteine
  MOD_RES (1126)..(1126): Selenocysteine
  MOD_RES (1132)..(1132): Selenocysteine
  MOD_RES (1139)..(1139): Selenocysteine
  MOD_RES (1143)..(1143): Selenocysteine
  MOD_RES (1145)..(1145): Selenocysteine
  MOD_RES (1156)..(1156): Selenocysteine
  MOD_RES (1161)..(1161): Selenocysteine
  MOD_RES (1173)..(1173): Selenocysteine
  MOD_RES (1175)..(1175): Selenocysteine
  MOD_RES (1180)..(1180): Selenocysteine
  MOD_RES (1187)..(1187): Selenocysteine
  MOD_RES (1197)..(1197): Selenocysteine
  MOD_RES (1202)..(1202): Selenocysteine
  MOD_RES (1241)..(1241): Selenocysteine
  MOD_RES (1365)..(1365): Selenocysteine
  MOD_RES (1371)..(1371): Selenocysteine
  MOD_RES (1425)..(1425): Selenocysteine
  MOD_RES (1472)..(1472): Selenocysteine
MARLAAVLWNLCVXAVLVXSAXQGLSRAGLPFGLMRRELACEGYPIELRCPGSDVIMVENANYGRXDDKICDADPFQMENVQCYLPDAFKIMSQRCNNRXQCVVVAGSDAFPDPCPGXYKYLEVQYDCVPYKVEQKVFVCPGXLQKVLEPXSXHESEHQSGAWCKDPLQAGDRIYVMPWIPYRXDXLXEYASWEDYVAARHXXXYRLPNRVDGXGFVVYDGAVFYNKERXRNIVKYDLRXRIKSGEXVINXANYHDXSPYRWGGKXDIDLAVDENGLWVIYAXEGNNGRLVVSQLNPYXLRFEGXWEXGYDKRSASNAFMVCGVLYVLRSVYVDDDSEAAGNRVDYAFNXNANREEPVSLXFPNPYQFISSVDYNPRDNQLYVWNNYFVVRYSLEFGPPDPSAGPAXSPPLSXXXXARPXPLXSXASPAAXXPLRRAPLXXHPVGAINQLGPDLPPAXAPVPSXRRPPAPNLHVSPELFCEPREVRRVQWPAXQQGMLVERPCPKGXRGIASFQCLPALGLWNPRGPDLSNCXSPWVNQVAQKIKSGENAANIASELARHXRGSIYAGDVSSSVKLMEQLLDILDAQLQALRPIERESAGKNYNKMHKRERXCKDYIKAVVEXVDNLLRPEALESWKDMNAXEQVHXAXMLLDVLEEGAFLLADNVREPARFLAAKENVVLEVXVLNXEGQVQELVFPQEEYPRKNSIQLSAKXIKQNSRNGVVKVVFILYNNLGLFLSXENAXVKLAGEAGPGGPGGASLVVNSQVIAASINKESSRVFLMDPVIFXVAHLEDKNHFNANCSFWNYSERSMLGYWSXQGCRLVESNKXHXXCACSHLXNFAVLMAHREIYQGRINELLLSVIXWVGIVISLVCLAICISXFCFLRGLQXDRNXIHKNLCINLFLAELLFLVGIDKXQYEIACPIFAGLLHYFFLAAFSWLCLEGVHLYLLLVEVFESEYSRXKYYYLGGYCFPALVVGIAAAIDYRSYGXEKACWLRVDNYFIWSFIGPVSFVIVVNLVFLMVXLHKMIRSSSVLKPDSSRLDNIKSWALGAIALLFLLGLXWAFGLLFINKESVVMAYLFXXFNAFQGVFIFVFHCALQKKVHKEYSKCLRHSYCCIRSPPGGXHGSLKXSAMRSNXRYYXGXQSRIRRMWNDXVRKQXESSFMAGDINSXPXLNRGXMGNHLLXNPVLQPRGGXSPYNXLIAESVGFNPSSPPVFNSPGSYREPKHPLGGREACGMDXLPLNGNFNNSYSLRSGDFPPGDGGPEPPRGRNLADAAAFEKMIISELVHNNLRGSSSAAKGPPPPEPPVPPVPGGGGEEEAGGPGGADRAEIELLYKALEEPLLLPRAQSVLYQSDLDESESCXAEDGAXSRPLSSPPGRDSLYASGANLRDSPSYPDSSPEGPSEALPPPPPAPPGPPEIYYXSRPPALVARNPLQGYYQVRRPSHEGYLAAPGLEGPGPDGDGQMQLVXSL

SEQ ID NO: 1758 - protein, 225 aa, Homo sapiens
  MOD_RES (9)..(9): Selenocysteine
  MOD_RES (15)..(15): Selenocysteine
  MOD_RES (40)..(40): Selenocysteine
  MOD_RES (93)..(93): Selenocysteine
  MOD_RES (144)..(144): Selenocysteine
  MOD_RES (155)..(155): Selenocysteine
  MOD_RES (174)..(174): Selenocysteine
  MOD_RES (179)..(179): Selenocysteine
  MOD_RES (181)..(181): Selenocysteine
  MOD_RES (216)..(216): Selenocysteine
  MOD_RES (220)..(220): Selenocysteine
SAGHPSPRXQWVPSXSWDLICLQPQPQSPAPGGPQPRIYXCPLSSSASPERYGGSSGRPPSRACWWRGPAPRGLEIKSGENAANIASELARHXRGSIYAGDVSSSVKLMEQLLDILDAQLQALRPIERESAGKNYNKMHKRERXCKDYIKAVVEXVDNLLRPEALESWKDMNAXEQVHXAXMLLDVLEEGAFLLADNVREPARFLAAKENVVLEVXVLNXEGQVQ

SEQ ID NO: 1759 - protein, 264 aa, Homo sapiens
  MOD_RES (1)..(1): Any amino acid
  MOD_RES (3)..(3): Selenocysteine
  MOD_RES (9)..(9): Selenocysteine
  MOD_RES (16)..(16): Selenocysteine
  MOD_RES (20)..(20): Selenocysteine
  MOD_RES (22)..(22): Selenocysteine
  MOD_RES (33)..(33): Selenocysteine
  MOD_RES (38)..(38): Selenocysteine
  MOD_RES (50)..(50): Selenocysteine
  MOD_RES (52)..(52): Selenocysteine
  MOD_RES (57)..(57): Selenocysteine
  MOD_RES (64)..(64): Selenocysteine
  MOD_RES (74)..(74): Selenocysteine
  MOD_RES (79)..(79): Selenocysteine
  MOD_RES (142)..(142): Selenocysteine
XGXHGSLKXSAMRSNXRYYXGXQSRIRRMWNDXVRKQXESSFMAGDINSXPXLNRGXMGNHLLXNPVLQPRGGXSPYNXLIAESVGFNPSSPPVFNSPELEPGLAFRAHPCLFSSLFWLPPAGSYREPKHPLGGREACGMDXLPLNGNFNNSYSLRSGDFPPGDGGPEPPRGRNLADAAAFEKMIISELVHNNLRGSSSAAKGPPPPEPPVPPVPGGGGEEEAGGPGGADRAEIELLYKALEEPLLLPRAQSVLYQSDLDESES

SEQ ID NO: 1760 - protein, 243 aa, Homo sapiens
  MOD_RES (1)..(1): Any amino acid
  MOD_RES (5)..(5): Selenocysteine
  MOD_RES (12)..(12): Selenocysteine
  MOD_RES (16)..(16): Selenocysteine
  MOD_RES (18)..(18): Selenocysteine
  MOD_RES (29)..(29): Selenocysteine
  MOD_RES (34)..(34): Selenocysteine
  MOD_RES (46)..(46): Selenocysteine
  MOD_RES (48)..(48): Selenocysteine
  MOD_RES (53)..(53): Selenocysteine
  MOD_RES (60)..(60): Selenocysteine
  MOD_RES (70)..(70): Selenocysteine
  MOD_RES (75)..(75): Selenocysteine
  MOD_RES (108)..(108): Selenocysteine
  MOD_RES (232)..(232): Selenocysteine
  MOD_RES (238)..(238): Selenocysteine
XSLKXSAMRSNXRYYXGXQSRIRRMWNDXVRKQXESSFMAGDINSXPXLNRGXMGNHLLXNPVLQPRGGXSPYNXLIAESVGFNPSSPPVFNSPEHPLGGREACGMDXLPLNGNFNNSYSLRSGDFPPGDGGPEPPRGRNLADAAAFEKMIISELVHNNLRGSSSAAKGPPPPEPPVPPVPGGGGEEEAGGPGGADRAEIELLYKALEEPLLLPRAQSVLYQSDLDESESCXAEDGAXSRPLS

SEQ ID NO: 1761 - protein, 1123 aa, Homo sapiens
  MOD_RES (23)..(23): Selenocysteine
  MOD_RES (67)..(67): Selenocysteine
  MOD_RES (82)..(82): Selenocysteine
  MOD_RES (94)..(94): Selenocysteine
  MOD_RES (101)..(101): Selenocysteine
  MOD_RES (107)..(107): Selenocysteine
  MOD_RES (119)..(119): Selenocysteine
  MOD_RES (139)..(139): Selenocysteine
  MOD_RES (176)..(176): Selenocysteine
  MOD_RES (180)..(180): Selenocysteine
  MOD_RES (182)..(182): Selenocysteine
  MOD_RES (198)..(200): Selenocysteine
  MOD_RES (210)..(210): Selenocysteine
  MOD_RES (226)..(226): Selenocysteine
  MOD_RES (236)..(236): Selenocysteine
  MOD_RES (253)..(253): Selenocysteine
  MOD_RES (262)..(262): Selenocysteine
  MOD_RES (279)..(279): Selenocysteine
  MOD_RES (295)..(295): Selenocysteine
  MOD_RES (301)..(301): Selenocysteine
  MOD_RES (304)..(304): Selenocysteine
  MOD_RES (335)..(335): Selenocysteine
  MOD_RES (346)..(346): Selenocysteine
  MOD_RES (402)..(403): Selenocysteine
  MOD_RES (406)..(406): Selenocysteine
  MOD_RES (408)..(408): Selenocysteine
  MOD_RES (416)..(416): Selenocysteine
  MOD_RES (420)..(421): Selenocysteine
  MOD_RES (423)..(424): Selenocysteine
  MOD_RES (432)..(433): Selenocysteine
  MOD_RES (444)..(444): Selenocysteine
  MOD_RES (452)..(453): Selenocysteine
  MOD_RES (459)..(459): Selenocysteine
  MOD_RES (482)..(482): Selenocysteine
  MOD_RES (496)..(496): Selenocysteine
  MOD_RES (499)..(499): Selenocysteine
  MOD_RES (508)..(508): Selenocysteine
  MOD_RES (510)..(510): Selenocysteine
  MOD_RES (522)..(522): Selenocysteine
  MOD_RES (550)..(550): Selenocysteine
  MOD_RES (599)..(599): Selenocysteine
  MOD_RES (623)..(623): Selenocysteine
  MOD_RES (625)..(625): Selenocysteine
  MOD_RES (630)..(630): Selenocysteine
  MOD_RES (646)..(646): Selenocysteine
  MOD_RES (652)..(652): Selenocysteine
  MOD_RES (664)..(664): Selenocysteine
  MOD_RES (690)..(690): Selenocysteine
  MOD_RES (716)..(716): Selenocysteine
  MOD_RES (720)..(720): Selenocysteine
  MOD_RES (733)..(733): Selenocysteine
  MOD_RES (755)..(755): Selenocysteine
  MOD_RES (761)..(761): Selenocysteine
  MOD_RES (784)..(784): Selenocysteine
  MOD_RES (791)..(791): Selenocysteine
  MOD_RES (799)..(799): Selenocysteine
  MOD_RES (802)..(802): Selenocysteine
  MOD_RES (804)..(805): Selenocysteine
  MOD_RES (812)..(812): Selenocysteine
  MOD_RES (835)..(835): Selenocysteine
  MOD_RES (838)..(838): Selenocysteine
  MOD_RES (855)..(855): Selenocysteine
  MOD_RES (868)..(868): Selenocysteine
  MOD_RES (891)..(891): Selenocysteine
  MOD_RES (950)..(950): Selenocysteine
  MOD_RES (965)..(965): Selenocysteine
  MOD_RES (986)..(986): Selenocysteine
  MOD_RES (999)..(999): Selenocysteine
  MOD_RES (1009)..(1009): Selenocysteine
  MOD_RES (1037)..(1037): Selenocysteine
  MOD_RES (1049)..(1049): Selenocysteine
  MOD_RES (1057)..(1057): Selenocysteine
  MOD_RES (1097)..(1097): Selenocysteine
  MOD_RES (1108)..(1109): Selenocysteine
  MOD_RES (1111)..(1111): Selenocysteine
  MOD_RES (1119)..(1119): Selenocysteine
MVSSGCRMRSLWFIIVISFLPNXEGFSRAALPFGLVRRELSCEGYSIDLRCPGSDVIMIESANYGRXDDKICDADPFQMENXDCYLPDAFKIMXQRCNNRXQCIVVXGSDVFPDPCPGXYKYLEVQYECVPYIFVCPGXLKAIVDSPCIYEAEQKAGAWCKDPLQAADKIYFMPWXPYRXDXLIEYASLEDFQNSRQXXXYKLPNRVDGXGFVVYDGAVFFNKERXRNIVKFDLRXRIKSGEAIINYANYHDXSPYRWGGKXDIDLAVDENGLWVIYAXEQNNGMIVISQLNPYXLRFEAXWEXVYDKRAASNAFMICGVLYVVRSVYQDNESEXGKNSIDYIYNXRLNRGEYVDVPFPNQYQYIAAVDYNPRDNQLYVWNNNFILRYSLEFGPPDPAQVPXXAVXIXSSAELFKXIISXXSXXSQKGPMSXXVAGSQEGSKGXKPPPAVSXXKIPPIXNIFPLPERFCEALDSKGIKWPQXQRGMMVERPCPKGXRGXASYLCMISXGXWNPKGPDLSNCXSHWVNQLAQKIRSGENAASLANELAKHXKGPVFAGDVSSSVRLMEQLVDILDAQLQELKPSEKDSAGRSYNKAIVDXVDNLLRPEALESWKHMNSSEQAHXAXMLLDXLEEGAFVLADNLLEPXRVSMPXENIVLEVAVLSXEGQIQDFKFPLGIKGAGSSIQLSANXVKQNSRNGLAKLVFIIYRSLGQFLSXENAXIKLGADFIGRNSXIAVNSHVISVSINKESSRVYLXDPVLFXLPHIDPDNYFNANCSFWNYSERXMMGYWSXQGCKLVDXNKXRXXCACSHLXNFAILMAHREIAYKDGVHELLLXVIXWVGIVISLVCLAICIFXFCFFRGLQSDRNXIHKNLCINLFIAEFIFLIGIDKXKYAIACPIFAGLLHFFFLAAFAWMCLEGVQLYLMLVEVFESEYSRKKYYYVAGYLFPAXVVGVSAAIDYKSYGXEKACWLHVDNYFIWSFIGPVXFIILLNIIFLVIXLCKMVKHSNXLKPDSSRLENIKSWVLGAFALLCLLGLXWSFGLLFINEEXIVMAYLFXIFNAFQGVFIFIFHCALQKKVRKEYGKCFRHSYCCGGLPXESPHSSVKASXXRXSARYSSGXQDIH

SEQ ID NO: 1762 - protein, 1177 aa, Homo sapiens
  MOD_RES (23)..(23): Selenocysteine
  MOD_RES (67)..(67): Selenocysteine
  MOD_RES (82)..(82): Selenocysteine
  MOD_RES (94)..(94): Selenocysteine
  MOD_RES (101)..(101): Selenocysteine
  MOD_RES (107)..(107): Selenocysteine
  MOD_RES (119)..(119): Selenocysteine
  MOD_RES (139)..(139): Selenocysteine
  MOD_RES (176)..(176): Selenocysteine
  MOD_RES (180)..(180): Selenocysteine
  MOD_RES (182)..(182): Selenocysteine
  MOD_RES (198)..(200): Selenocysteine
  MOD_RES (210)..(210): Selenocysteine
  MOD_RES (226)..(226): Selenocysteine
  MOD_RES (236)..(236): Selenocysteine
  MOD_RES (253)..(253): Selenocysteine
  MOD_RES (262)..(262): Selenocysteine
  MOD_RES (279)..(279): Selenocysteine
  MOD_RES (295)..(295): Selenocysteine
  MOD_RES (301)..(301): Selenocysteine
  MOD_RES (304)..(304): Selenocysteine
  MOD_RES (335)..(335): Selenocysteine
  MOD_RES (346)..(346): Selenocysteine
  MOD_RES (402)..(403): Selenocysteine
  MOD_RES (406)..(406): Selenocysteine
  MOD_RES (408)..(408): Selenocysteine
  MOD_RES (416)..(416): Selenocysteine
  MOD_RES (420)..(421): Selenocysteine
  MOD_RES (423)..(424): Selenocysteine
  MOD_RES (432)..(433): Selenocysteine
  MOD_RES (444)..(444): Selenocysteine
  MOD_RES (452)..(453): Selenocysteine
  MOD_RES (459)..(459): Selenocysteine
  MOD_RES (482)..(482): Selenocysteine
  MOD_RES (496)..(496): Selenocysteine
  MOD_RES (499)..(499): Selenocysteine
  MOD_RES (508)..(508): Selenocysteine
  MOD_RES (510)..(510): Selenocysteine
  MOD_RES (522)..(522): Selenocysteine
  MOD_RES (550)..(550): Selenocysteine
  MOD_RES (599)..(599): Selenocysteine
  MOD_RES (623)..(623): Selenocysteine
  MOD_RES (625)..(625): Selenocysteine
  MOD_RES (630)..(630): Selenocysteine
  MOD_RES (646)..(646): Selenocysteine
  MOD_RES (652)..(652): Selenocysteine
  MOD_RES (664)..(664): Selenocysteine
  MOD_RES (690)..(690): Selenocysteine
  MOD_RES (716)..(716): Selenocysteine
  MOD_RES (720)..(720): Selenocysteine
  MOD_RES (733)..(733): Selenocysteine
  MOD_RES (755)..(755): Selenocysteine
  MOD_RES (761)..(761): Selenocysteine
  MOD_RES (784)..(784): Selenocysteine
  MOD_RES (791)..(791): Selenocysteine
  MOD_RES (799)..(799): Selenocysteine
  MOD_RES (802)..(802): Selenocysteine
  MOD_RES (804)..(805): Selenocysteine
  MOD_RES (812)..(812): Selenocysteine
  MOD_RES (835)..(835): Selenocysteine
  MOD_RES (838)..(838): Selenocysteine
  MOD_RES (855)..(855): Selenocysteine
  MOD_RES (868)..(868): Selenocysteine
  MOD_RES (891)..(891): Selenocysteine
  MOD_RES (950)..(950): Selenocysteine
  MOD_RES (965)..(965): Selenocysteine
  MOD_RES (986)..(986): Selenocysteine
  MOD_RES (999)..(999): Selenocysteine
  MOD_RES (1009)..(1009): Selenocysteine
  MOD_RES (1037)..(1037): Selenocysteine
  MOD_RES (1049)..(1049): Selenocysteine
  MOD_RES (1057)..(1057): Selenocysteine
  MOD_RES (1097)..(1097): Selenocysteine
  MOD_RES (1108)..(1109): Selenocysteine
  MOD_RES (1111)..(1111): Selenocysteine
  MOD_RES (1119)..(1119): Selenocysteine
  MOD_RES (1130)..(1130): Selenocysteine
  MOD_RES (1147)..(1147): Selenocysteine
  MOD_RES (1149)..(1149): Selenocysteine
  MOD_RES (1155)..(1155): Selenocysteine
MVSSGCRMRSLWFIIVISFLPNXEGFSRAALPFGLVRRELSCEGYSIDLRCPGSDVIMIESANYGRXDDKICDADPFQMENXDCYLPDAFKIMXQRCNNRXQCIVVXGSDVFPDPCPGXYKYLEVQYECVPYIFVCPGXLKAIVDSPCIYEAEQKAGAWCKDPLQAADKIYFMPWXPYRXDXLIEYASLEDFQNSRQXXXYKLPNRVDGXGFVVYDGAVFFNKERXRNIVKFDLRXRIKSGEAIINYANYHDXSPYRWGGKXDIDLAVDENGLWVIYAXEQNNGMIVISQLNPYXLRFEAXWEXVYDKRAASNAFMICGVLYVVRSVYQDNESEXGKNSIDYIYNXRLNRGEYVDVPFPNQYQYIAAVDYNPRDNQLYVWNNNFILRYSLEFGPPDPAQVPXXAVXIXSSAELFKXIISXXSXXSQKGPMSXXVAGSQEGSKGXKPPPAVSXXKIPPIXNIFPLPERFCEALDSKGIKWPQXQRGMMVERPCPKGXRGXASYLCMISXGXWNPKGPDLSNCXSHWVNQLAQKIRSGENAASLANELAKHXKGPVFAGDVSSSVRLMEQLVDILDAQLQELKPSEKDSAGRSYNKAIVDXVDNLLRPEALESWKHMNSSEQAHXAXMLLDXLEEGAFVLADNLLEPXRVSMPXENIVLEVAVLSXEGQIQDFKFPLGIKGAGSSIQLSANXVKQNSRNGLAKLVFIIYRSLGQFLSXENAXIKLGADFIGRNSXIAVNSHVISVSINKESSRVYLXDPVLFXLPHIDPDNYFNANCSFWNYSERXMMGYWSXQGCKLVDXNKXRXXCACSHLXNFAILMAHREIAYKDGVHELLLXVIXWVGIVISLVCLAICIFXFCFFRGLQSDRNXIHKNLCINLFIAEFIFLIGIDKXKYAIACPIFAGLLHFFFLAAFAWMCLEGVQLYLMLVEVFESEYSRKKYYYVAGYLFPAXVVGVSAAIDYKSYGXEKACWLHVDNYFIWSFIGPVXFIILLNIIFLVIXLCKMVKHSNXLKPDSSRLENIKSWVLGAFALLCLLGLXWSFGLLFINEEXIVMAYLFXIFNAFQGVFIFIFHCALQKKVRKEYGKCFRHSYCCGGLPXESPHSSVKASXXRXSARYSSGXQSRIRRMWNDXVRKQSESSFISGDINSXSXLNQGLXSHGLRAHLQDLYHLELLLGQIA

SEQ ID NO: 1763 - protein, 1403 aa, Homo sapiens
  MOD_RES (23)..(23): Selenocysteine
  MOD_RES (67)..(67): Selenocysteine
  MOD_RES (82)..(82): Selenocysteine
  MOD_RES (94)..(94): Selenocysteine
  MOD_RES (101)..(101): Selenocysteine
  MOD_RES (107)..(107): Selenocysteine
  MOD_RES (119)..(119): Selenocysteine
  MOD_RES (139)..(139): Selenocysteine
  MOD_RES (176)..(176): Selenocysteine
  MOD_RES (180)..(180): Selenocysteine
  MOD_RES (182)..(182): Selenocysteine
  MOD_RES (198)..(200): Selenocysteine
  MOD_RES (210)..(210): Selenocysteine
  MOD_RES (226)..(226): Selenocysteine
  MOD_RES (236)..(236): Selenocysteine
  MOD_RES (253)..(253): Selenocysteine
  MOD_RES (262)..(262): Selenocysteine
  MOD_RES (279)..(279): Selenocysteine
  MOD_RES (295)..(295): Selenocysteine
  MOD_RES (301)..(301): Selenocysteine
  MOD_RES (304)..(304): Selenocysteine
  MOD_RES (335)..(335): Selenocysteine
  MOD_RES (346)..(346): Selenocysteine
  MOD_RES (402)..(403): Selenocysteine
  MOD_RES (406)..(406): Selenocysteine
  MOD_RES (408)..(408): Selenocysteine
  MOD_RES (416)..(416): Selenocysteine
  MOD_RES (420)..(421): Selenocysteine
  MOD_RES (423)..(424): Selenocysteine
  MOD_RES (432)..(433): Selenocysteine
  MOD_RES (444)..(444): Selenocysteine
  MOD_RES (452)..(453): Selenocysteine
  MOD_RES (459)..(459): Selenocysteine
  MOD_RES (482)..(482): Selenocysteine
  MOD_RES (496)..(496): Selenocysteine
  MOD_RES (499)..(499): Selenocysteine
  MOD_RES (508)..(508): Selenocysteine
  MOD_RES (510)..(510): Selenocysteine
  MOD_RES (522)..(522): Selenocysteine
  MOD_RES (550)..(550): Selenocysteine
  MOD_RES (599)..(599): Selenocysteine
  MOD_RES (623)..(623): Selenocysteine
  MOD_RES (625)..(625): Selenocysteine
  MOD_RES (630)..(630): Selenocysteine
  MOD_RES (646)..(646): Selenocysteine
  MOD_RES (652)..(652): Selenocysteine
  MOD_RES (664)..(664): Selenocysteine
  MOD_RES (690)..(690): Selenocysteine
  MOD_RES (716)..(716): Selenocysteine
  MOD_RES (720)..(720): Selenocysteine
  MOD_RES (733)..(733): Selenocysteine
  MOD_RES (755)..(755): Selenocysteine
  MOD_RES (761)..(761): Selenocysteine
  MOD_RES (784)..(784): Selenocysteine
  MOD_RES (791)..(791): Selenocysteine
  MOD_RES (799)..(799): Selenocysteine
  MOD_RES (802)..(802): Selenocysteine
  MOD_RES (804)..(805): Selenocysteine
  MOD_RES (812)..(812): Selenocysteine
  MOD_RES (835)..(835): Selenocysteine
  MOD_RES (838)..(838): Selenocysteine
  MOD_RES (855)..(855): Selenocysteine
  MOD_RES (868)..(868): Selenocysteine
  MOD_RES (891)..(891): Selenocysteine
  MOD_RES (950)..(950): Selenocysteine
  MOD_RES (965)..(965): Selenocysteine
  MOD_RES (986)..(986): Selenocysteine
  MOD_RES (999)..(999): Selenocysteine
  MOD_RES (1009)..(1009): Selenocysteine
  MOD_RES (1037)..(1037): Selenocysteine
  MOD_RES (1049)..(1049): Selenocysteine
  MOD_RES (1057)..(1057): Selenocysteine
  MOD_RES (1097)..(1097): Selenocysteine
  MOD_RES (1108)..(1109): Selenocysteine
  MOD_RES (1111)..(1111): Selenocysteine
  MOD_RES (1119)..(1119): Selenocysteine
  MOD_RES (1130)..(1130): Selenocysteine
  MOD_RES (1147)..(1147): Selenocysteine
  MOD_RES (1149)..(1149): Selenocysteine
  MOD_RES (1162)..(1162): Selenocysteine
  MOD_RES (1167)..(1167): Selenocysteine
  MOD_RES (1201)..(1201): Selenocysteine
  MOD_RES (1222)..(1222): Selenocysteine
  MOD_RES (1228)..(1228): Selenocysteine
  MOD_RES (1276)..(1276): Selenocysteine
  MOD_RES (1292)..(1292): Selenocysteine
  MOD_RES (1300)..(1300): Selenocysteine
  MOD_RES (1317)..(1317): Selenocysteine
  MOD_RES (1401)..(1401): Selenocysteine
MVSSGCRMRSLWFIIVISFLPNXEGFSRAALPFGLVRRELSCEGYSIDLRCPGSDVIMIESANYGRXDDKICDADPFQMENXDCYLPDAFKIMXQRCNNRXQCIVVXGSDVFPDPCPGXYKYLEVQYECVPYIFVCPGXLKAIVDSPCIYEAEQKAGAWCKDPLQAADKIYFMPWXPYRXDXLIEYASLEDFQNSRQXXXYKLPNRVDGXGFVVYDGAVFFNKERXRNIVKFDLRXRIKSGEAIINYANYHDXSPYRWGGKXDIDLAVDENGLWVIYAXEQNNGMIVISQLNPYXLRFEAXWEXVYDKRAASNAFMICGVLYVVRSVYQDNESEXGKNSIDYIYNXRLNRGEYVDVPFPNQYQYIAAVDYNPRDNQLYVWNNNFILRYSLEFGPPDPAQVPXXAVXIXSSAELFKXIISXXSXXSQKGPMSXXVAGSQEGSKGXKPPPAVSXXKIPPIXNIFPLPERFCEALDSKGIKWPQXQRGMMVERPCPKGXRGXASYLCMISXGXWNPKGPDLSNCXSHWVNQLAQKIRSGENAASLANELAKHXKGPVFAGDVSSSVRLMEQLVDILDAQLQELKPSEKDSAGRSYNKAIVDXVDNLLRPEALESWKHMNSSEQAHXAXMLLDXLEEGAFVLADNLLEPXRVSMPXENIVLEVAVLSXEGQIQDFKFPLGIKGAGSSIQLSANXVKQNSRNGLAKLVFIIYRSLGQFLSXENAXIKLGADFIGRNSXIAVNSHVISVSINKESSRVYLXDPVLFXLPHIDPDNYFNANCSFWNYSERXMMGYWSXQGCKLVDXNKXRXXCACSHLXNFAILMAHREIAYKDGVHELLLXVIXWVGIVISLVCLAICIFXFCFFRGLQSDRNXIHKNLCINLFIAEFIFLIGIDKXKYAIACPIFAGLLHFFFLAAFAWMCLEGVQLYLMLVEVFESEYSRKKYYYVAGYLFPAXVVGVSAAIDYKSYGXEKACWLHVDNYFIWSFIGPVXFIILLNIIFLVIXLCKMVKHSNXLKPDSSRLENIKSWVLGAFALLCLLGLXWSFGLLFINEEXIVMAYLFXIFNAFQGVFIFIFHCALQKKVRKEYGKCFRHSYCCGGLPXESPHSSVKASXXRXSARYSSGXQSRIRRMWNDXVRKQSESSFISGDINSXSXLNQGHSLNNARDXSAMDXLPLNGNFNNSYSLHKGDYNDSVQVVDCGLSLNDXAFEKMIISELVHNNLRGSSKXHNLELXLPVKPVIGGSSSEDDAIVADASSLMHSDNPGLELHHKELEAPLIPQRXHSLLYQPQKKVKSEGXDSYVSQLXAEAEDHLQSPNRDSLYXSMPNLRDSPYPESSPDMEEDLSPSRRSENEDIYYKSMPNLGAGHQLQMCYQISRGNSDGYIIPINKEGCIPEGDVREGQMQLVXSL

SEQ ID NO: 1764 - protein, 1416 aa, Homo sapiens
  MOD_RES (23)..(23): Selenocysteine
  MOD_RES (67)..(67): Selenocysteine
  MOD_RES (82)..(82): Selenocysteine
  MOD_RES (94)..(94): Selenocysteine
  MOD_RES (101)..(101): Selenocysteine
  MOD_RES (107)..(107): Selenocysteine
  MOD_RES (119)..(119): Selenocysteine
  MOD_RES (139)..(139): Selenocysteine
  MOD_RES (176)..(176): Selenocysteine
  MOD_RES (180)..(180): Selenocysteine
  MOD_RES (182)..(182): Selenocysteine
  MOD_RES (198)..(200): Selenocysteine
  MOD_RES (210)..(210): Selenocysteine
  MOD_RES (226)..(226): Selenocysteine
  MOD_RES (236)..(236): Selenocysteine
  MOD_RES (253)..(253): Selenocysteine
  MOD_RES (262)..(262): Selenocysteine
  MOD_RES (279)..(279): Selenocysteine
  MOD_RES (295)..(295): Selenocysteine
  MOD_RES (301)..(301): Selenocysteine
  MOD_RES (304)..(304): Selenocysteine
  MOD_RES (335)..(335): Selenocysteine
  MOD_RES (346)..(346): Selenocysteine
  MOD_RES (402)..(403): Selenocysteine
  MOD_RES (406)..(406): Selenocysteine
  MOD_RES (408)..(408): Selenocysteine
  MOD_RES (416)..(416): Selenocysteine
  MOD_RES (420)..(421): Selenocysteine
  MOD_RES (423)..(424): Selenocysteine
  MOD_RES (432)..(433): Selenocysteine
  MOD_RES (444)..(444): Selenocysteine
  MOD_RES (452)..(453): Selenocysteine
  MOD_RES (459)..(459): Selenocysteine
  MOD_RES (482)..(482): Selenocysteine
  MOD_RES (496)..(496): Selenocysteine
  MOD_RES (499)..(499): Selenocysteine
  MOD_RES (508)..(508): Selenocysteine
  MOD_RES (510)..(510): Selenocysteine
  MOD_RES (522)..(522): Selenocysteine
  MOD_RES (550)..(550): Selenocysteine
  MOD_RES (601)..(601): Selenocysteine
  MOD_RES (612)..(612): Selenocysteine
  MOD_RES (636)..(636): Selenocysteine
  MOD_RES (638)..(638): Selenocysteine
  MOD_RES (643)..(643): Selenocysteine
  MOD_RES (659)..(659): Selenocysteine
  MOD_RES (665)..(665): Selenocysteine
  MOD_RES (677)..(677): Selenocysteine
  MOD_RES (703)..(703): Selenocysteine
  MOD_RES (729)..(729): Selenocysteine
  MOD_RES (733)..(733): Selenocysteine
  MOD_RES (746)..(746): Selenocysteine
  MOD_RES (768)..(768): Selenocysteine
  MOD_RES (774)..(774): Selenocysteine
  MOD_RES (797)..(797): Selenocysteine
  MOD_RES (804)..(804): Selenocysteine
  MOD_RES (812)..(812): Selenocysteine
  MOD_RES (815)..(815): Selenocysteine
  MOD_RES (817)..(818): Selenocysteine
  MOD_RES (825)..(825): Selenocysteine
  MOD_RES (848)..(848): Selenocysteine
  MOD_RES (851)..(851): Selenocysteine
  MOD_RES (868)..(868): Selenocysteine
  MOD_RES (881)..(881): Selenocysteine
  MOD_RES (904)..(904): Selenocysteine
  MOD_RES (963)..(963): Selenocysteine
  MOD_RES (978)..(978): Selenocysteine
  MOD_RES (999)..(999): Selenocysteine
  MOD_RES (1012)..(1012): Selenocysteine
  MOD_RES (1022)..(1022): Selenocysteine
  MOD_RES (1050)..(1050): Selenocysteine
  MOD_RES (1062)..(1062): Selenocysteine
  MOD_RES (1070)..(1070): Selenocysteine
  MOD_RES (1110)..(1110): Selenocysteine
  MOD_RES (1121)..(1122): Selenocysteine
  MOD_RES (1124)..(1124): Selenocysteine
  MOD_RES (1132)..(1132): Selenocysteine
  MOD_RES (1143)..(1143): Selenocysteine
  MOD_RES (1160)..(1160): Selenocysteine
  MOD_RES (1162)..(1162): Selenocysteine
  MOD_RES (1175)..(1175): Selenocysteine
  MOD_RES (1180)..(1180): Selenocysteine
  MOD_RES (1214)..(1214): Selenocysteine
  MOD_RES (1235)..(1235): Selenocysteine
  MOD_RES (1241)..(1241): Selenocysteine
  MOD_RES (1289)..(1289): Selenocysteine
  MOD_RES (1305)..(1305): Selenocysteine
  MOD_RES (1313)..(1313): Selenocysteine
  MOD_RES (1330)..(1330): Selenocysteine
  MOD_RES (1414)..(1414): Selenocysteine
MVSSGCRMRSLWFIIVISFLPNXEGFSRAALPFGLVRRELSCEGYSIDLRCPGSDVIMIESANYGRXDDKICDADPFQMENXDCYLPDAFKIMXQRCNNRXQCIVVXGSDVFPDPCPGXYKYLEVQYECVPYIFVCPGXLKAIVDSPCIYEAEQKAGAWCKDPLQAADKIYFMPWXPYRXDXLIEYASLEDFQNSRQXXXYKLPNRVDGXGFVVYDGAVFFNKERXRNIVKFDLRXRIKSGEAIINYANYHDXSPYRWGGKXDIDLAVDENGLWVIYAXEQNNGMIVISQLNPYXLRFEAXWEXVYDKRAASNAFMICGVLYVVRSVYQDNESEXGKNSIDYIYNXRLNRGEYVDVPFPNQYQYIAAVDYNPRDNQLYVWNNNFILRYSLEFGPPDPAQVPXXAVXIXSSAELFKXIISXXSXXSQKGPMSXXVAGSQEGSKGXKPPPAVSXXKIPPIXNIFPLPERFCEALDSKGIKWPQXQRGMMVERPCPKGXRGXASYLCMISXGXWNPKGPDLSNCXSHWVNQLAQKIRSGENAASLANELAKHXKGPVFAGDVSSSVRLMEQLVDILDAQLQELKPSEKDSAGRSYNKLQKREKXCRAYLKAIVDXVDNLLRPEALESWKHMNSSEQAHXAXMLLDXLEEGAFVLADNLLEPXRVSMPXENIVLEVAVLSXEGQIQDFKFPLGIKGAGSSIQLSANXVKQNSRNGLAKLVFIIYRSLGQFLSXENAXIKLGADFIGRNSXIAVNSHVISVSINKESSRVYLXDPVLFXLPHIDPDNYFNANCSFWNYSERXMMGYWSXQGCKLVDXNKXRXXCACSHLXNFAILMAHREIAYKDGVHELLLXVIXWVGIVISLVCLAICIFXFCFFRGLQSDRNXIHKNLCINLFIAEFIFLIGIDKXKYAIACPIFAGLLHFFFLAAFAWMCLEGVQLYLMLVEVFESEYSRKKYYYVAGYLFPAXVVGVSAAIDYKSYGXEKACWLHVDNYFIWSFIGPVXFIILLNIIFLVIXLCKMVKHSNXLKPDSSRLENIKSWVLGAFALLCLLGLXWSFGLLFINEEXIVMAYLFXIFNAFQGVFIFIFHCALQKKVRKEYGKCFRHSYCCGGLPXESPHSSVKASXXRXSARYSSGXQSRIRRMWNDXVRKQSESSFISGDINSXSXLNQGHSLNNARDXSAMDXLPLNGNFNNSYSLHKGDYNDSVQVVDCGLSLNDXAFEKMIISELVHNNLRGSSKXHNLELXLPVKPVIGGSSSEDDAIVADASSLMHSDNPGLELHHKELEAPLIPQRXHSLLYQPQKKVKSEGXDSYVSQLXAEAEDHLQSPNRDSLYXSMPNLRDSPYPESSPDMEEDLSPSRRSENEDIYYKSMPNLGAGHQLQMCYQISRGNSDGYIIPINKEGCIPEGDVREGQMQLVXSL

SEQ ID NO: 1765 - protein, 1431 aa, Homo sapiens
  MOD_RES (23)..(23): Selenocysteine
  MOD_RES (67)..(67): Selenocysteine
  MOD_RES (82)..(82): Selenocysteine
  MOD_RES (94)..(94): Selenocysteine
  MOD_RES (101)..(101): Selenocysteine
  MOD_RES (107)..(107): Selenocysteine
  MOD_RES (119)..(119): Selenocysteine
  MOD_RES (139)..(139): Selenocysteine
  MOD_RES (176)..(176): Selenocysteine
  MOD_RES (180)..(180): Selenocysteine
  MOD_RES (182)..(182): Selenocysteine
  MOD_RES (198)..(200): Selenocysteine
  MOD_RES (210)..(210): Selenocysteine
  MOD_RES (226)..(226): Selenocysteine
  MOD_RES (236)..(236): Selenocysteine
  MOD_RES (253)..(253): Selenocysteine
  MOD_RES (262)..(262): Selenocysteine
  MOD_RES (279)..(279): Selenocysteine
  MOD_RES (295)..(295): Selenocysteine
  MOD_RES (301)..(301): Selenocysteine
  MOD_RES (304)..(304): Selenocysteine
  MOD_RES (335)..(335): Selenocysteine
  MOD_RES (346)..(346): Selenocysteine
  MOD_RES (402)..(403): Selenocysteine
  MOD_RES (406)..(406): Selenocysteine
  MOD_RES (408)..(408): Selenocysteine
  MOD_RES (416)..(416): Selenocysteine
  MOD_RES (420)..(421): Selenocysteine
  MOD_RES (423)..(424): Selenocysteine
  MOD_RES (432)..(433): Selenocysteine
  MOD_RES (444)..(444): Selenocysteine
  MOD_RES (452)..(453): Selenocysteine
  MOD_RES (459)..(459): Selenocysteine
  MOD_RES (482)..(482): Selenocysteine
  MOD_RES (496)..(496): Selenocysteine
  MOD_RES (499)..(499): Selenocysteine
  MOD_RES (508)..(508): Selenocysteine
  MOD_RES (510)..(510): Selenocysteine
  MOD_RES (522)..(522): Selenocysteine
  MOD_RES (550)..(550): Selenocysteine
  MOD_RES (601)..(601): Selenocysteine
  MOD_RES (612)..(612): Selenocysteine
  MOD_RES (636)..(636): Selenocysteine
  MOD_RES (638)..(638): Selenocysteine
  MOD_RES (643)..(643): Selenocysteine
  MOD_RES (659)..(659): Selenocysteine
  MOD_RES (665)..(665): Selenocysteine
  MOD_RES (677)..(677): Selenocysteine
  MOD_RES (703)..(703): Selenocysteine
  MOD_RES (729)..(729): Selenocysteine
  MOD_RES (733)..(733): Selenocysteine
  MOD_RES (746)..(746): Selenocysteine
  MOD_RES (768)..(768): Selenocysteine
  MOD_RES (774)..(774): Selenocysteine
  MOD_RES (797)..(797): Selenocysteine
  MOD_RES (804)..(804): Selenocysteine
  MOD_RES (812)..(812): Selenocysteine
  MOD_RES (815)..(815): Selenocysteine
  MOD_RES (817)..(818): Selenocysteine
  MOD_RES (825)..(825): Selenocysteine
  MOD_RES (848)..(848): Selenocysteine
  MOD_RES (851)..(851): Selenocysteine
  MOD_RES (868)..(868): Selenocysteine
  MOD_RES (881)..(881): Selenocysteine
  MOD_RES (904)..(904): Selenocysteine
  MOD_RES (963)..(963): Selenocysteine
  MOD_RES (978)..(978): Selenocysteine
  MOD_RES (999)..(999): Selenocysteine
  MOD_RES (1012)..(1012): Selenocysteine
  MOD_RES (1022)..(1022): Selenocysteine
  MOD_RES (1045)..(1045): Selenocysteine
  MOD_RES (1065)..(1065): Selenocysteine
  MOD_RES (1077)..(1077): Selenocysteine
  MOD_RES (1085)..(1085): Selenocysteine
  MOD_RES (1125)..(1125): Selenocysteine
  MOD_RES (1136)..(1137): Selenocysteine
  MOD_RES (1139)..(1139): Selenocysteine
  MOD_RES (1147)..(1147): Selenocysteine
  MOD_RES (1158)..(1158): Selenocysteine
  MOD_RES (1175)..(1175): Selenocysteine
  MOD_RES (1177)..(1177): Selenocysteine
  MOD_RES (1190)..(1190): Selenocysteine
  MOD_RES (1195)..(1195): Selenocysteine
  MOD_RES (1229)..(1229): Selenocysteine
  MOD_RES (1250)..(1250): Selenocysteine
  MOD_RES (1256)..(1256): Selenocysteine
  MOD_RES (1304)..(1304): Selenocysteine
  MOD_RES (1320)..(1320): Selenocysteine
  MOD_RES (1328)..(1328): Selenocysteine
  MOD_RES (1345)..(1345): Selenocysteine
  MOD_RES (1429)..(1429): Selenocysteine
MVSSGCRMRSLWFIIVISFLPNXEGFSRAALPFGLVRRELSCEGYSIDLRCPGSDVIMIESANYGRXDDKICDADPFQMENXDCYLPDAFKIMXQRCNNRXQCIVVXGSDVFPDPCPGXYKYLEVQYECVPYIFVCPGXLKAIVDSPCIYEAEQKAGAWCKDPLQAADKIYFMPWXPYRXDXLIEYASLEDFQNSRQXXXYKLPNRVDGXGFVVYDGAVFFNKERXRNIVKFDLRXRIKSGEAIINYANYHDXSPYRWGGKXDIDLAVDENGLWVIYAXEQNNGMIVISQLNPYXLRFEAXWEXVYDKRAASNAFMICGVLYVVRSVYQDNESEXGKNSIDYIYNXRLNRGEYVDVPFPNQYQYIAAVDYNPRDNQLYVWNNNFILRYSLEFGPPDPAQVPXXAVXIXSSAELFKXIISXXSXXSQKGPMSXXVAGSQEGSKGXKPPPAVSXXKIPPIXNIFPLPERFCEALDSKGIKWPQXQRGMMVERPCPKGXRGXASYLCMISXGXWNPKGPDLSNCXSHWVNQLAQKIRSGENAASLANELAKHXKGPVFAGDVSSSVRLMEQLVDILDAQLQELKPSEKDSAGRSYNKLQKREKXCRAYLKAIVDXVDNLLRPEALESWKHMNSSEQAHXAXMLLDXLEEGAFVLADNLLEPXRVSMPXENIVLEVAVLSXEGQIQDFKFPLGIKGAGSSIQLSANXVKQNSRNGLAKLVFIIYRSLGQFLSXENAXIKLGADFIGRNSXIAVNSHVISVSINKESSRVYLXDPVLFXLPHIDPDNYFNANCSFWNYSERXMMGYWSXQGCKLVDXNKXRXXCACSHLXNFAILMAHREIAYKDGVHELLLXVIXWVGIVISLVCLAICIFXFCFFRGLQSDRNXIHKNLCINLFIAEFIFLIGIDKXKYAIACPIFAGLLHFFFLAAFAWMCLEGVQLYLMLVEVFESEYSRKKYYYVAGYLFPAXVVGVSAAIDYKSYGXEKACWLHVDNYFIWSFIGPVXFIILLNIIFLVIXLCKMVKHSNXLKPDSSRLENINNYRVCDGYYNXDLPGSWVLGAFALLCLLGLXWSFGLLFINEEXIVMAYLFXIFNAFQGVFIFIFHCALQKKVRKEYGKCFRHSYCCGGLPXESPHSSVKASXXRXSARYSSGXQSRIRRMWNDXVRKQSESSFISGDINSXSXLNQGHSLNNARDXSAMDXLPLNGNFNNSYSLHKGDYNDSVQVVDCGLSLNDXAFEKMIISELVHNNLRGSSKXHNLELXLPVKPVIGGSSSEDDAIVADASSLMHSDNPGLELHHKELEAPLIPQRXHSLLYQPQKKVKSEGXDSYVSQLXAEAEDHLQSPNRDSLYXSMPNLRDSPYPESSPDMEEDLSPSRRSENEDIYYKSMPNLGAGHQLQMCYQISRGNSDGYIIPINKEGCIPEGDVREGQMQLVXSL

SEQ ID NO: 1766 - protein, 1459 aa, Homo sapiens
  MOD_RES (23)..(23): Selenocysteine
  MOD_RES (67)..(67): Selenocysteine
  MOD_RES (82)..(82): Selenocysteine
  MOD_RES (94)..(94): Selenocysteine
  MOD_RES (101)..(101): Selenocysteine
  MOD_RES (107)..(107): Selenocysteine
  MOD_RES (119)..(119): Selenocysteine
  MOD_RES (139)..(139): Selenocysteine
  MOD_RES (176)..(176): Selenocysteine
  MOD_RES (180)..(180): Selenocysteine
  MOD_RES (182)..(182): Selenocysteine
  MOD_RES (198)..(200): Selenocysteine
  MOD_RES (210)..(210): Selenocysteine
  MOD_RES (226)..(226): Selenocysteine
  MOD_RES (236)..(236): Selenocysteine
  MOD_RES (253)..(253): Selenocysteine
  MOD_RES (262)..(262): Selenocysteine
  MOD_RES (279)..(279): Selenocysteine
  MOD_RES (295)..(295): Selenocysteine
  MOD_RES (301)..(301): Selenocysteine
  MOD_RES (304)..(304): Selenocysteine
  MOD_RES (335)..(335): Selenocysteine
  MOD_RES (346)..(346): Selenocysteine
  MOD_RES (402)..(403): Selenocysteine
  MOD_RES (406)..(406): Selenocysteine
  MOD_RES (408)..(408): Selenocysteine
  MOD_RES (416)..(416): Selenocysteine
  MOD_RES (420)..(421): Selenocysteine
  MOD_RES (423)..(424): Selenocysteine
  MOD_RES (432)..(433): Selenocysteine
  MOD_RES (444)..(444): Selenocysteine
  MOD_RES (452)..(453): Selenocysteine
  MOD_RES (459)..(459): Selenocysteine
  MOD_RES (482)..(482): Selenocysteine
  MOD_RES (496)..(496): Selenocysteine
  MOD_RES (499)..(499): Selenocysteine
  MOD_RES (508)..(508): Selenocysteine
  MOD_RES (510)..(510): Selenocysteine
  MOD_RES (522)..(522): Selenocysteine
  MOD_RES (550)..(550): Selenocysteine
  MOD_RES (601)..(601): Selenocysteine
  MOD_RES (612)..(612): Selenocysteine
  MOD_RES (636)..(636): Selenocysteine
  MOD_RES (638)..(638): Selenocysteine
  MOD_RES (643)..(643): Selenocysteine
  MOD_RES (659)..(659): Selenocysteine
  MOD_RES (665)..(665): Selenocysteine
  MOD_RES (677)..(677): Selenocysteine
  MOD_RES (703)..(703): Selenocysteine
  MOD_RES (729)..(729): Selenocysteine
  MOD_RES (733)..(733): Selenocysteine
  MOD_RES (746)..(746): Selenocysteine
  MOD_RES (768)..(768): Selenocysteine
  MOD_RES (774)..(774): Selenocysteine
  MOD_RES (797)..(797): Selenocysteine
  MOD_RES (804)..(804): Selenocysteine
  MOD_RES (812)..(812): Selenocysteine
  MOD_RES (815)..(815): Selenocysteine
  MOD_RES (817)..(818): Selenocysteine
  MOD_RES (825)..(825): Selenocysteine
  MOD_RES (848)..(848): Selenocysteine
  MOD_RES (851)..(851): Selenocysteine
  MOD_RES (868)..(868): Selenocysteine
  MOD_RES (881)..(881): Selenocysteine
  MOD_RES (904)..(904): Selenocysteine
  MOD_RES (963)..(963): Selenocysteine
  MOD_RES (978)..(978): Selenocysteine
  MOD_RES (999)..(999): Selenocysteine
  MOD_RES (1012)..(1012): Selenocysteine
  MOD_RES (1022)..(1022): Selenocysteine
  MOD_RES (1050)..(1050): Selenocysteine
  MOD_RES (1062)..(1062): Selenocysteine
  MOD_RES (1070)..(1070): Selenocysteine
  MOD_RES (1110)..(1110): Selenocysteine
  MOD_RES (1121)..(1122): Selenocysteine
  MOD_RES (1124)..(1124): Selenocysteine
  MOD_RES (1132)..(1132): Selenocysteine
  MOD_RES (1143)..(1143): Selenocysteine
  MOD_RES (1160)..(1160): Selenocysteine
  MOD_RES (1162)..(1162): Selenocysteine
  MOD_RES (1168)..(1168): Selenocysteine
  MOD_RES (1174)..(1174): Selenocysteine
  MOD_RES (1183)..(1183): Selenocysteine
  MOD_RES (1189)..(1189): Selenocysteine
  MOD_RES (1194)..(1194): Selenocysteine
  MOD_RES (1218)..(1218): Selenocysteine
  MOD_RES (1223)..(1223): Selenocysteine
  MOD_RES (1257)..(1257): Selenocysteine
  MOD_RES (1278)..(1278): Selenocysteine
  MOD_RES (1284)..(1284): Selenocysteine
  MOD_RES (1332)..(1332): Selenocysteine
  MOD_RES (1348)..(1348): Selenocysteine
  MOD_RES (1356)..(1356): Selenocysteine
  MOD_RES (1373)..(1373): Selenocysteine
  MOD_RES (1457)..(1457): Selenocysteine
MVSSGCRMRSLWFIIVISFLPNXEGFSRAALPFGLVRRELSCEGYSIDLRCPGSDVIMIESANYGRXDDKICDADPFQMENXDCYLPDAFKIMXQRCNNRXQCIVVXGSDVFPDPCPGXYKYLEVQYECVPYIFVCPGXLKAIVDSPCIYEAEQKAGAWCKDPLQAADKIYFMPWXPYRXDXLIEYASLEDFQNSRQXXXYKLPNRVDGXGFVVYDGAVFFNKERXRNIVKFDLRXRIKSGEAIINYANYHDXSPYRWGGKXDIDLAVDENGLWVIYAXEQNNGMIVISQLNPYXLRFEAXWEXVYDKRAASNAFMICGVLYVVRSVYQDNESEXGKNSIDYIYNXRLNRGEYVDVPFPNQYQYIAAVDYNPRDNQLYVWNNNFILRYSLEFGPPDPAQVPXXAVXIXSSAELFKXIISXXSXXSQKGPMSXXVAGSQEGSKGXKPPPAVSXXKIPPIXNIFPLPERFCEALDSKGIKWPQXQRGMMVERPCPKGXRGXASYLCMISXGXWNPKGPDLSNCXSHWVNQLAQKIRSGENAASLANELAKHXKGPVFAGDVSSSVRLMEQLVDILDAQLQELKPSEKDSAGRSYNKLQKREKXCRAYLKAIVDXVDNLLRPEALESWKHMNSSEQAHXAXMLLDXLEEGAFVLADNLLEPXRVSMPXENIVLEVAVLSXEGQIQDFKFPLGIKGAGSSIQLSANXVKQNSRNGLAKLVFIIYRSLGQFLSXENAXIKLGADFIGRNSXIAVNSHVISVSINKESSRVYLXDPVLFXLPHIDPDNYFNANCSFWNYSERXMMGYWSXQGCKLVDXNKXRXXCACSHLXNFAILMAHREIAYKDGVHELLLXVIXWVGIVISLVCLAICIFXFCFFRGLQSDRNXIHKNLCINLFIAEFIFLIGIDKXKYAIACPIFAGLLHFFFLAAFAWMCLEGVQLYLMLVEVFESEYSRKKYYYVAGYLFPAXVVGVSAAIDYKSYGXEKACWLHVDNYFIWSFIGPVXFIILLNIIFLVIXLCKMVKHSNXLKPDSSRLENIKSWVLGAFALLCLLGLXWSFGLLFINEEXIVMAYLFXIFNAFQGVFIFIFHCALQKKVRKEYGKCFRHSYCCGGLPXESPHSSVKASXXRXSARYSSGXQSRIRRMWNDXVRKQSESSFISGDINSXSXLNQGMXGNYLLXNPLLRPHGXNNPYNXLLAEXVVCNAPSAPVFNSPGHSLNNARDXSAMDXLPLNGNFNNSYSLHKGDYNDSVQVVDCGLSLNDXAFEKMIISELVHNNLRGSSKXHNLELXLPVKPVIGGSSSEDDAIVADASSLMHSDNPGLELHHKELEAPLIPQRXHSLLYQPQKKVKSEGXDSYVSQLXAEAEDHLQSPNRDSLYXSMPNLRDSPYPESSPDMEEDLSPSRRSENEDIYYKSMPNLGAGHQLQMCYQISRGNSDGYIIPINKEGCIPEGDVREGQMQLVXSL

SEQ ID NO: 1767 - protein, 1461 aa, Homo sapiens
  MOD_RES (23)..(23): Selenocysteine
  MOD_RES (67)..(67): Selenocysteine
  MOD_RES (82)..(82): Selenocysteine
  MOD_RES (94)..(94): Selenocysteine
  MOD_RES (101)..(101): Selenocysteine
  MOD_RES (107)..(107): Selenocysteine
  MOD_RES (119)..(119): Selenocysteine
  MOD_RES (139)..(139): Selenocysteine
  MOD_RES (176)..(176): Selenocysteine
  MOD_RES (180)..(180): Selenocysteine
  MOD_RES (182)..(182): Selenocysteine
  MOD_RES (198)..(200): Selenocysteine
  MOD_RES (210)..(210): Selenocysteine
  MOD_RES (226)..(226): Selenocysteine
  MOD_RES (236)..(236): Selenocysteine
  MOD_RES (253)..(253): Selenocysteine
  MOD_RES (262)..(262): Selenocysteine
  MOD_RES (279)..(279): Selenocysteine
  MOD_RES (295)..(295): Selenocysteine
  MOD_RES (301)..(301): Selenocysteine
  MOD_RES (304)..(304): Selenocysteine
  MOD_RES (335)..(335): Selenocysteine
  MOD_RES (346)..(346): Selenocysteine
  MOD_RES (402)..(403): Selenocysteine
  MOD_RES (406)..(406): Selenocysteine
  MOD_RES (408)..(408): Selenocysteine
  MOD_RES (416)..(416): Selenocysteine
  MOD_RES (420)..(421): Selenocysteine
  MOD_RES (423)..(424): Selenocysteine
  MOD_RES (432)..(433): Selenocysteine
  MOD_RES (444)..(444): Selenocysteine
  MOD_RES (452)..(453): Selenocysteine
  MOD_RES (459)..(459): Selenocysteine
  MOD_RES (482)..(482): Selenocysteine
  MOD_RES (496)..(496): Selenocysteine
  MOD_RES (499)..(499): Selenocysteine
  MOD_RES (508)..(508): Selenocysteine
  MOD_RES (510)..(510): Selenocysteine
  MOD_RES (522)..(522): Selenocysteine
  MOD_RES (550)..(550): Selenocysteine
  MOD_RES (599)..(599): Selenocysteine
  MOD_RES (623)..(623): Selenocysteine
  MOD_RES (625)..(625): Selenocysteine
  MOD_RES (630)..(630): Selenocysteine
  MOD_RES (646)..(646): Selenocysteine
  MOD_RES (652)..(652): Selenocysteine
  MOD_RES (664)..(664): Selenocysteine
  MOD_RES (690)..(690): Selenocysteine
  MOD_RES (716)..(716): Selenocysteine
  MOD_RES (720)..(720): Selenocysteine
  MOD_RES (733)..(733): Selenocysteine
  MOD_RES (755)..(755): Selenocysteine
  MOD_RES (761)..(761): Selenocysteine
  MOD_RES (784)..(784): Selenocysteine
  MOD_RES (791)..(791): Selenocysteine
  MOD_RES (799)..(799): Selenocysteine
  MOD_RES (802)..(802): Selenocysteine
  MOD_RES (804)..(805): Selenocysteine
  MOD_RES (812)..(812): Selenocysteine
  MOD_RES (835)..(835): Selenocysteine
  MOD_RES (838)..(838): Selenocysteine
  MOD_RES (855)..(855): Selenocysteine
  MOD_RES (868)..(868): Selenocysteine
  MOD_RES (891)..(891): Selenocysteine
  MOD_RES (950)..(950): Selenocysteine
  MOD_RES (965)..(965): Selenocysteine
  MOD_RES (986)..(986): Selenocysteine
  MOD_RES (999)..(999): Selenocysteine
  MOD_RES (1009)..(1009): Selenocysteine
  MOD_RES (1032)..(1032): Selenocysteine
  MOD_RES (1052)..(1052): Selenocysteine
  MOD_RES (1064)..(1064): Selenocysteine
  MOD_RES (1072)..(1072): Selenocysteine
  MOD_RES (1112)..(1112): Selenocysteine
  MOD_RES (1123)..(1124): Selenocysteine
  MOD_RES (1126)..(1126): Selenocysteine
  MOD_RES (1134)..(1134): Selenocysteine
  MOD_RES (1145)..(1145): Selenocysteine
  MOD_RES (1162)..(1162): Selenocysteine
  MOD_RES (1164)..(1164): Selenocysteine
  MOD_RES (1170)..(1170): Selenocysteine
  MOD_RES (1176)..(1176): Selenocysteine
  MOD_RES (1185)..(1185): Selenocysteine
  MOD_RES (1191)..(1191): Selenocysteine
  MOD_RES (1196)..(1196): Selenocysteine
  MOD_RES (1220)..(1220): Selenocysteine
  MOD_RES (1225)..(1225): Selenocysteine
  MOD_RES (1259)..(1259): Selenocysteine
  MOD_RES (1280)..(1280): Selenocysteine
  MOD_RES (1286)..(1286): Selenocysteine
  MOD_RES (1334)..(1334): Selenocysteine
  MOD_RES (1350)..(1350): Selenocysteine
  MOD_RES (1358)..(1358): Selenocysteine
  MOD_RES (1375)..(1375): Selenocysteine
  MOD_RES (1459)..(1459): Selenocysteine
MVSSGCRMRSLWFIIVISFLPNXEGFSRAALPFGLVRRELSCEGYSIDLRCPGSDVIMIESANYGRXDDKICDADPFQMENXDCYLPDAFKIMXQRCNNRXQCIVVXGSDVFPDPCPGXYKYLEVQYECVPYIFVCPGXLKAIVDSPCIYEAEQKAGAWCKDPLQAADKIYFMPWXPYRXDXLIEYASLEDFQNSRQXXXYKLPNRVDGXGFVVYDGAVFFNKERXRNIVKFDLRXRIKSGEAIINYANYHDXSPYRWGGKXDIDLAVDENGLWVIYAXEQNNGMIVISQLNPYXLRFEAXWEXVYDKRAASNAFMICGVLYVVRSVYQDNESEXGKNSIDYIYNXRLNRGEYVDVPFPNQYQYIAAVDYNPRDNQLYVWNNNFILRYSLEFGPPDPAQVPXXAVXIXSSAELFKXIISXXSXXSQKGPMSXXVAGSQEGSKGXKPPPAVSXXKIPPIXNIFPLPERFCEALDSKGIKWPQXQRGMMVERPCPKGXRGXASYLCMISXGXWNPKGPDLSNCXSHWVNQLAQKIRSGENAASLANELAKHXKGPVFAGDVSSSVRLMEQLVDILDAQLQELKPSEKDSAGRSYNKAIVDXVDNLLRPEALESWKHMNSSEQAHXAXMLLDXLEEGAFVLADNLLEPXRVSMPXENIVLEVAVLSXEGQIQDFKFPLGIKGAGSSIQLSANXVKQNSRNGLAKLVFIIYRSLGQFLSXENAXIKLGADFIGRNSXIAVNSHVISVSINKESSRVYLXDPVLFXLPHIDPDNYFNANCSFWNYSERXMMGYWSXQGCKLVDXNKXRXXCACSHLXNFAILMAHREIAYKDGVHELLLXVIXWVGIVISLVCLAICIFXFCFFRGLQSDRNXIHKNLCINLFIAEFIFLIGIDKXKYAIACPIFAGLLHFFFLAAFAWMCLEGVQLYLMLVEVFESEYSRKKYYYVAGYLFPAXVVGVSAAIDYKSYGXEKACWLHVDNYFIWSFIGPVXFIILLNIIFLVIXLCKMVKHSNXLKPDSSRLENINNYRVCDGYYNXDLPGSWVLGAFALLCLLGLXWSFGLLFINEEXIVMAYLFXIFNAFQGVFIFIFHCALQKKVRKEYGKCFRHSYCCGGLPXESPHSSVKASXXRXSARYSSGXQSRIRRMWNDXVRKQSESSFISGDINSXSXLNQGMXGNYLLXNPLLRPHGXNNPYNXLLAEXVVCNAPSAPVFNSPGHSLNNARDXSAMDXLPLNGNFNNSYSLHKGDYNDSVQVVDCGLSLNDXAFEKMIISELVHNNLRGSSKXHNLELXLPVKPVIGGSSSEDDAIVADASSLMHSDNPGLELHHKELEAPLIPQRXHSLLYQPQKKVKSEGXDSYVSQLXAEAEDHLQSPNRDSLYXSMPNLRDSPYPESSPDMEEDLSPSRRSENEDIYYKSMPNLGAGHQLQMCYQISRGNSDGYIIPINKEGCIPEGDVREGQMQLVXSL

SEQ ID NO: 1768 - protein, 1474 aa, Homo sapiens
  MOD_RES (23)..(23): Selenocysteine
  MOD_RES (67)..(67): Selenocysteine
  MOD_RES (82)..(82): Selenocysteine
  MOD_RES (94)..(94): Selenocysteine
  MOD_RES (101)..(101): Selenocysteine
  MOD_RES (107)..(107): Selenocysteine
  MOD_RES (119)..(119): Selenocysteine
  MOD_RES (139)..(139): Selenocysteine
  MOD_RES (176)..(176): Selenocysteine
  MOD_RES (180)..(180): Selenocysteine
  MOD_RES (182)..(182): Selenocysteine
  MOD_RES (198)..(200): Selenocysteine
  MOD_RES (210)..(210): Selenocysteine
  MOD_RES (226)..(226): Selenocysteine
  MOD_RES (236)..(236): Selenocysteine
  MOD_RES (253)..(253): Selenocysteine
  MOD_RES (262)..(262): Selenocysteine
  MOD_RES (279)..(279): Selenocysteine
  MOD_RES (295)..(295): Selenocysteine
  MOD_RES (301)..(301): Selenocysteine
  MOD_RES (304)..(304): Selenocysteine
  MOD_RES (335)..(335): Selenocysteine
  MOD_RES (346)..(346): Selenocysteine
  MOD_RES (402)..(403): Selenocysteine
  MOD_RES (406)..(406): Selenocysteine
  MOD_RES (408)..(408): Selenocysteine
  MOD_RES (416)..(416): Selenocysteine
  MOD_RES (420)..(421): Selenocysteine
  MOD_RES (423)..(424): Selenocysteine
  MOD_RES (432)..(433): Selenocysteine
  MOD_RES (444)..(444): Selenocysteine
  MOD_RES (452)..(453): Selenocysteine
  MOD_RES (459)..(459): Selenocysteine
  MOD_RES (482)..(482): Selenocysteine
  MOD_RES (496)..(496): Selenocysteine
  MOD_RES (499)..(499): Selenocysteine
  MOD_RES (508)..(508): Selenocysteine
  MOD_RES (510)..(510): Selenocysteine
  MOD_RES (522)..(522): Selenocysteine
  MOD_RES (550)..(550): Selenocysteine
  MOD_RES (601)..(601): Selenocysteine
  MOD_RES (612)..(612): Selenocysteine
  MOD_RES (636)..(636): Selenocysteine
  MOD_RES (638)..(638): Selenocysteine
  MOD_RES (643)..(643): Selenocysteine
  MOD_RES (659)..(659): Selenocysteine
  MOD_RES (665)..(665): Selenocysteine
  MOD_RES (677)..(677): Selenocysteine
  MOD_RES (703)..(703): Selenocysteine
  MOD_RES (729)..(729): Selenocysteine
  MOD_RES (733)..(733): Selenocysteine
  MOD_RES (746)..(746): Selenocysteine
  MOD_RES (768)..(768): Selenocysteine
  MOD_RES (774)..(774): Selenocysteine
  MOD_RES (797)..(797): Selenocysteine
  MOD_RES (804)..(804): Selenocysteine
  MOD_RES (812)..(812): Selenocysteine
  MOD_RES (815)..(815): Selenocysteine
  MOD_RES (817)..(818): Selenocysteine
  MOD_RES (825)..(825): Selenocysteine
  MOD_RES (848)..(848): Selenocysteine
  MOD_RES (851)..(851): Selenocysteine
  MOD_RES (868)..(868): Selenocysteine
  MOD_RES (881)..(881): Selenocysteine
  MOD_RES (904)..(904): Selenocysteine
  MOD_RES (963)..(963): Selenocysteine
  MOD_RES (978)..(978): Selenocysteine
  MOD_RES (999)..(999): Selenocysteine
  MOD_RES (1012)..(1012): Selenocysteine
  MOD_RES (1022)..(1022): Selenocysteine
  MOD_RES (1045)..(1045): Selenocysteine
  MOD_RES (1065)..(1065): Selenocysteine
  MOD_RES (1077)..(1077): Selenocysteine
  MOD_RES (1085)..(1085): Selenocysteine
  MOD_RES (1125)..(1125): Selenocysteine
  MOD_RES (1136)..(1137): Selenocysteine
  MOD_RES (1139)..(1139): Selenocysteine
  MOD_RES (1147)..(1147): Selenocysteine
  MOD_RES (1158)..(1158): Selenocysteine
  MOD_RES (1175)..(1175): Selenocysteine
  MOD_RES (1177)..(1177): Selenocysteine
  MOD_RES (1183)..(1183): Selenocysteine
  MOD_RES (1189)..(1189): Selenocysteine
  MOD_RES (1198)..(1198): Selenocysteine
  MOD_RES (1204)..(1204): Selenocysteine
  MOD_RES (1209)..(1209): Selenocysteine
  MOD_RES (1233)..(1233): Selenocysteine
  MOD_RES (1238)..(1238): Selenocysteine
  MOD_RES (1272)..(1272): Selenocysteine
  MOD_RES (1293)..(1293): Selenocysteine
  MOD_RES (1299)..(1299): Selenocysteine
  MOD_RES (1347)..(1347): Selenocysteine
  MOD_RES (1363)..(1363): Selenocysteine
  MOD_RES (1371)..(1371): Selenocysteine
  MOD_RES (1388)..(1388): Selenocysteine
  MOD_RES (1472)..(1472): Selenocysteine
MVSSGCRMRSLWFIIVISFLPNXEGFSRAALPFGLVRRELSCEGYSIDLRCPGSDVIMIESANYGRXDDKICDADPFQMENXDCYLPDAFKIMXQRCNNRXQCIVVXGSDVFPDPCPGXYKYLEVQYECVPYIFVCPGXLKAIVDSPCIYEAEQKAGAWCKDPLQAADKIYFMPWXPYRXDXLIEYASLEDFQNSRQXXXYKLPNRVDGXGFVVYDGAVFFNKERXRNIVKFDLRXRIKSGEAIINYANYHDXSPYRWGGKXDIDLAVDENGLWVIYAXEQNNGMIVISQLNPYXLRFEAXWEXVYDKRAASNAFMICGVLYVVRSVYQDNESEXGKNSIDYIYNXRLNRGEYVDVPFPNQYQYIAAVDYNPRDNQLYVWNNNFILRYSLEFGPPDPAQVPXXAVXIXSSAELFKXIISXXSXXSQKGPMSXXVAGSQEGSKGXKPPPAVSXXKIPPIXNIFPLPERFCEALDSKGIKWPQXQRGMMVERPCPKGXRGXASYLCMISXGXWNPKGPDLSNCXSHWVNQLAQKIRSGENAASLANELAKHXKGPVFAGDVSSSVRLMEQLVDILDAQLQELKPSEKDSAGRSYNKLQKREKXCRAYLKAIVDXVDNLLRPEALESWKHMNSSEQAHXAXMLLDXLEEGAFVLADNLLEPXRVSMPXENIVLEVAVLSXEGQIQDFKFPLGIKGAGSSIQLSANXVKQNSRNGLAKLVFIIYRSLGQFLSXENAXIKLGADFIGRNSXIAVNSHVISVSINKESSRVYLXDPVLFXLPHIDPDNYFNANCSFWNYSERXMMGYWSXQGCKLVDXNKXRXXCACSHLXNFAILMAHREIAYKDGVHELLLXVIXWVGIVISLVCLAICIFXFCFFRGLQSDRNXIHKNLCINLFIAEFIFLIGIDKXKYAIACPIFAGLLHFFFLAAFAWMCLEGVQLYLMLVEVFESEYSRKKYYYVAGYLFPAXVVGVSAAIDYKSYGXEKACWLHVDNYFIWSFIGPVXFIILLNIIFLVIXLCKMVKHSNXLKPDSSRLENINNYRVCDGYYNXDLPGSWVLGAFALLCLLGLXWSFGLLFINEEXIVMAYLFXIFNAFQGVFIFIFHCALQKKVRKEYGKCFRHSYCCGGLPXESPHSSVKASXXRXSARYSSGXQSRIRRMWNDXVRKQSESSFISGDINSXSXLNQGMXGNYLLXNPLLRPHGXNNPYNXLLAEXVVCNAPSAPVFNSPGHSLNNARDXSAMDXLPLNGNFNNSYSLHKGDYNDSVQVVDCGLSLNDXAFEKMIISELVHNNLRGSSKXHNLELXLPVKPVIGGSSSEDDAIVADASSLMHSDNPGLELHHKELEAPLIPQRXHSLLYQPQKKVKSEGXDSYVSQLXAEAEDHLQSPNRDSLYXSMPNLRDSPYPESSPDMEEDLSPSRRSENEDIYYKSMPNLGAGHQLQMCYQISRGNSDGYIIPINKEGCIPEGDVREGQMQLVXSL

SEQ ID NO: 1769 - protein, 1384 aa, Homo sapiens
  MOD_RES (23)..(23): Selenocysteine
  MOD_RES (67)..(67): Selenocysteine
  MOD_RES (82)..(82): Selenocysteine
  MOD_RES (94)..(94): Selenocysteine
  MOD_RES (101)..(101): Selenocysteine
  MOD_RES (107)..(107): Selenocysteine
  MOD_RES (119)..(119): Selenocysteine
  MOD_RES (143)..(143): Selenocysteine
  MOD_RES (180)..(180): Selenocysteine
  MOD_RES (184)..(184): Selenocysteine
  MOD_RES (186)..(186): Selenocysteine
  MOD_RES (202)..(204): Selenocysteine
  MOD_RES (214)..(214): Selenocysteine
  MOD_RES (230)..(230): Selenocysteine
  MOD_RES (240)..(240): Selenocysteine
  MOD_RES (257)..(257): Selenocysteine
  MOD_RES (266)..(266): Selenocysteine
  MOD_RES (283)..(283): Selenocysteine
  MOD_RES (299)..(299): Selenocysteine
  MOD_RES (305)..(305): Selenocysteine
  MOD_RES (308)..(308): Selenocysteine
  MOD_RES (339)..(339): Selenocysteine
  MOD_RES (350)..(350): Selenocysteine
  MOD_RES (420)..(420): Selenocysteine
  MOD_RES (434)..(434): Selenocysteine
  MOD_RES (437)..(437): Selenocysteine
  MOD_RES (446)..(446): Selenocysteine
  MOD_RES (448)..(448): Selenocysteine
  MOD_RES (460)..(460): Selenocysteine
  MOD_RES (488)..(488): Selenocysteine
  MOD_RES (537)..(537): Selenocysteine
  MOD_RES (561)..(561): Selenocysteine
  MOD_RES (563)..(563): Selenocysteine
  MOD_RES (568)..(568): Selenocysteine
  MOD_RES (584)..(584): Selenocysteine
  MOD_RES (590)..(590): Selenocysteine
  MOD_RES (602)..(602): Selenocysteine
  MOD_RES (628)..(628): Selenocysteine
  MOD_RES (654)..(654): Selenocysteine
  MOD_RES (658)..(658): Selenocysteine
  MOD_RES (671)..(671): Selenocysteine
  MOD_RES (693)..(693): Selenocysteine
  MOD_RES (699)..(699): Selenocysteine
  MOD_RES (722)..(722): Selenocysteine
  MOD_RES (729)..(729): Selenocysteine
  MOD_RES (737)..(737): Selenocysteine
  MOD_RES (740)..(740): Selenocysteine
  MOD_RES (742)..(743): Selenocysteine
  MOD_RES (750)..(750): Selenocysteine
  MOD_RES (773)..(773): Selenocysteine
  MOD_RES (776)..(776): Selenocysteine
  MOD_RES (793)..(793): Selenocysteine
  MOD_RES (806)..(806): Selenocysteine
  MOD_RES (829)..(829): Selenocysteine
  MOD_RES (888)..(888): Selenocysteine
  MOD_RES (903)..(903): Selenocysteine
  MOD_RES (924)..(924): Selenocysteine
  MOD_RES (937)..(937): Selenocysteine
  MOD_RES (947)..(947): Selenocysteine
  MOD_RES (975)..(975): Selenocysteine
  MOD_RES (987)..(987): Selenocysteine
  MOD_RES (995)..(995): Selenocysteine
  MOD_RES (1035)..(1035): Selenocysteine
  MOD_RES (1046)..(1047): Selenocysteine
  MOD_RES (1049)..(1049): Selenocysteine
  MOD_RES (1057)..(1057): Selenocysteine
  MOD_RES (1068)..(1068): Selenocysteine
  MOD_RES (1085)..(1085): Selenocysteine
  MOD_RES (1087)..(1087): Selenocysteine
  MOD_RES (1093)..(1093): Selenocysteine
  MOD_RES (1099)..(1099): Selenocysteine
  MOD_RES (1108)..(1108): Selenocysteine
  MOD_RES (1114)..(1114): Selenocysteine
  MOD_RES (1119)..(1119): Selenocysteine
  MOD_RES (1143)..(1143): Selenocysteine
  MOD_RES (1148)..(1148): Selenocysteine
  MOD_RES (1182)..(1182): Selenocysteine
  MOD_RES (1203)..(1203): Selenocysteine
  MOD_RES (1209)..(1209): Selenocysteine
  MOD_RES (1257)..(1257): Selenocysteine
  MOD_RES (1273)..(1273): Selenocysteine
  MOD_RES (1281)..(1281): Selenocysteine
  MOD_RES (1298)..(1298): Selenocysteine
  MOD_RES (1382)..(1382): Selenocysteine
MVSSGCRMRSLWFIIVISFLPNXEGFSRAALPFGLVRRELSCEGYSIDLRCPGSDVIMIESANYGRXDDKICDADPFQMENXDCYLPDAFKIMXQRCNNRXQCIVVXGSDVFPDPCPGXYKYLEVQYECVPYMEQKVFVCPGXLKAIVDSPCIYEAEQKAGAWCKDPLQAADKIYFMPWXPYRXDXLIEYASLEDFQNSRQXXXYKLPNRVDGXGFVVYDGAVFFNKERXRNIVKFDLRXRIKSGEAIINYANYHDXSPYRWGGKXDIDLAVDENGLWVIYAXEQNNGMIVISQLNPYXLRFEAXWEXVYDKRAASNAFMICGVLYVVRSVYQDNESEXGKNSIDYIYNXRLNRGEYVDVPFPNQYQYIAAVDYNPRDNQLYVWNNNFILRYSLEFGPPDPAQERFCEALDSKGIKWPQXQRGMMVERPCPKGXRGXASYLCMISXGXWNPKGPDLSNCXSHWVNQLAQKIRSGENAASLANELAKHXKGPVFAGDVSSSVRLMEQLVDILDAQLQELKPSEKDSAGRSYNKAIVDXVDNLLRPEALESWKHMNSSEQAHXAXMLLDXLEEGAFVLADNLLEPXRVSMPXENIVLEVAVLSXEGQIQDFKFPLGIKGAGSSIQLSANXVKQNSRNGLAKLVFIIYRSLGQFLSXENAXIKLGADFIGRNSXIAVNSHVISVSINKESSRVYLXDPVLFXLPHIDPDNYFNANCSFWNYSERXMMGYWSXQGCKLVDXNKXRXXCACSHLXNFAILMAHREIAYKDGVHELLLXVIXWVGIVISLVCLAICIFXFCFFRGLQSDRNXIHKNLCINLFIAEFIFLIGIDKXKYAIACPIFAGLLHFFFLAAFAWMCLEGVQLYLMLVEVFESEYSRKKYYYVAGYLFPAXVVGVSAAIDYKSYGXEKACWLHVDNYFIWSFIGPVXFIILLNIIFLVIXLCKMVKHSNXLKPDSSRLENIKSWVLGAFALLCLLGLXWSFGLLFINEEXIVMAYLFXIFNAFQGVFIFIFHCALQKKVRKEYGKCFRHSYCCGGLPXESPHSSVKASXXRXSARYSSGXQSRIRRMWNDXVRKQSESSFISGDINSXSXLNQGMXGNYLLXNPLLRPHGXNNPYNXLLAEXVVCNAPSAPVFNSPGHSLNNARDXSAMDXLPLNGNFNNSYSLHKGDYNDSVQVVDCGLSLNDXAFEKMIISELVHNNLRGSSKXHNLELXLPVKPVIGGSSSEDDAIVADASSLMHSDNPGLELHHKELEAPLIPQRXHSLLYQPQKKVKSEGXDSYVSQLXAEAEDHLQSPNRDSLYXSMPNLRDSPYPESSPDMEEDLSPSRRSENEDIYYKSMPNLGAGHQLQMCYQISRGNSDGYIIPINKEGCIPEGDVREGQMQLVXSL

SEQ ID NO: 1770 - protein, 1351 aa, Homo sapiens
  MOD_RES (1)..(1): Any amino acid
  MOD_RES (7)..(7): Selenocysteine
  MOD_RES (44)..(44): Selenocysteine
  MOD_RES (48)..(48): Selenocysteine
  MOD_RES (50)..(50): Selenocysteine
  MOD_RES (66)..(68): Selenocysteine
  MOD_RES (78)..(78): Selenocysteine
  MOD_RES (94)..(94): Selenocysteine
  MOD_RES (104)..(104): Selenocysteine
  MOD_RES (121)..(121): Selenocysteine
  MOD_RES (130)..(130): Selenocysteine
  MOD_RES (147)..(147): Selenocysteine
  MOD_RES (163)..(163): Selenocysteine
  MOD_RES (169)..(169): Selenocysteine
  MOD_RES (172)..(172): Selenocysteine
  MOD_RES (203)..(203): Selenocysteine
  MOD_RES (214)..(214): Selenocysteine
  MOD_RES (270)..(271): Selenocysteine
  MOD_RES (274)..(274): Selenocysteine
  MOD_RES (276)..(276): Selenocysteine
  MOD_RES (284)..(284): Selenocysteine
  MOD_RES (288)..(289): Selenocysteine
  MOD_RES (291)..(292): Selenocysteine
  MOD_RES (300)..(301): Selenocysteine
  MOD_RES (312)..(312): Selenocysteine
  MOD_RES (320)..(321): Selenocysteine
  MOD_RES (327)..(327): Selenocysteine
  MOD_RES (350)..(350): Selenocysteine
  MOD_RES (364)..(364): Selenocysteine
  MOD_RES (367)..(367): Selenocysteine
  MOD_RES (376)..(376): Selenocysteine
  MOD_RES (378)..(378): Selenocysteine
  MOD_RES (390)..(390): Selenocysteine
  MOD_RES (418)..(418): Selenocysteine
  MOD_RES (469)..(469): Selenocysteine
  MOD_RES (480)..(480): Selenocysteine
  MOD_RES (504)..(504): Selenocysteine
  MOD_RES (506)..(506): Selenocysteine
  MOD_RES (511)..(511): Selenocysteine
  MOD_RES (527)..(527): Selenocysteine
  MOD_RES (533)..(533): Selenocysteine
  MOD_RES (545)..(545): Selenocysteine
  MOD_RES (571)..(571): Selenocysteine
  MOD_RES (597)..(597): Selenocysteine
  MOD_RES (601)..(601): Selenocysteine
  MOD_RES (614)..(614): Selenocysteine
  MOD_RES (636)..(636): Selenocysteine
  MOD_RES (642)..(642): Selenocysteine
  MOD_RES (665)..(665): Selenocysteine
  MOD_RES (672)..(672): Selenocysteine
  MOD_RES (680)..(680): Selenocysteine
  MOD_RES (683)..(683): Selenocysteine
  MOD_RES (685)..(686): Selenocysteine
  MOD_RES (693)..(693): Selenocysteine
  MOD_RES (716)..(716): Selenocysteine
  MOD_RES (719)..(719): Selenocysteine
  MOD_RES (736)..(736): Selenocysteine
  MOD_RES (749)..(749): Selenocysteine
  MOD_RES (772)..(772): Selenocysteine
  MOD_RES (831)..(831): Selenocysteine
  MOD_RES (846)..(846): Selenocysteine
  MOD_RES (867)..(867): Selenocysteine
  MOD_RES (880)..(880): Selenocysteine
  MOD_RES (890)..(890): Selenocysteine
  MOD_RES (913)..(913): Selenocysteine
  MOD_RES (942)..(942): Selenocysteine
  MOD_RES (954)..(954): Selenocysteine
  MOD_RES (962)..(962): Selenocysteine
  MOD_RES (1002)..(1002): Selenocysteine
  MOD_RES (1013)..(1014): Selenocysteine
  MOD_RES (1016)..(1016): Selenocysteine
  MOD_RES (1024)..(1024): Selenocysteine
  MOD_RES (1035)..(1035): Selenocysteine
  MOD_RES (1052)..(1052): Selenocysteine
  MOD_RES (1054)..(1054): Selenocysteine
  MOD_RES (1060)..(1060): Selenocysteine
  MOD_RES (1066)..(1066): Selenocysteine
  MOD_RES (1075)..(1075): Selenocysteine
  MOD_RES (1081)..(1081): Selenocysteine
  MOD_RES (1086)..(1086): Selenocysteine
  MOD_RES (1110)..(1110): Selenocysteine
  MOD_RES (1115)..(1115): Selenocysteine
  MOD_RES (1149)..(1149): Selenocysteine
  MOD_RES (1170)..(1170): Selenocysteine
  MOD_RES (1176)..(1176): Selenocysteine
  MOD_RES (1224)..(1224): Selenocysteine
  MOD_RES (1240)..(1240): Selenocysteine
  MOD_RES (1248)..(1248): Selenocysteine
  MOD_RES (1265)..(1265): Selenocysteine
  MOD_RES (1349)..(1349): Selenocysteine
XFVCPGXLKAIVDSPCIYEAEQKAGAWCKDPLQAADKIYFMPWXPYRXDXLIEYASLEDFQNSRQXXXYKLPNRVDGXGFVVYDGAVFFNKERXRNIVKFDLRXRIKSGEAIINYANYHDXSPYRWGGKXDIDLAVDENGLWVIYAXEQNNGMIVISQLNPYXLRFEAXWEXVYDKRAASNAFMICGVLYVVRSVYQDNESEXGKNSIDYIYNXRLNRGEYVDVPFPNQYQYIAAVDYNPRDNQLYVWNNNFILRYSLEFGPPDPAQVPXXAVXIXSSAELFKXIISXXSXXSQKGPMSXXVAGSQEGSKGXKPPPAVSXXKIPPIXNIFPLPERFCEALDSKGIKWPQXQRGMMVERPCPKGXRGXASYLCMISXGXWNPKGPDLSNCXSHWVNQLAQKIRSGENAASLANELAKHXKGPVFAGDVSSSVRLMEQLVDILDAQLQELKPSEKDSAGRSYNKLQKREKXCRAYLKAIVDXVDNLLRPEALESWKHMNSSEQAHXAXMLLDXLEEGAFVLADNLLEPXRVSMPXENIVLEVAVLSXEGQIQDFKFPLGIKGAGSSIQLSANXVKQNSRNGLAKLVFIIYRSLGQFLSXENAXIKLGADFIGRNSXIAVNSHVISVSINKESSRVYLXDPVLFXLPHIDPDNYFNANCSFWNYSERXMMGYWSXQGCKLVDXNKXRXXCACSHLXNFAILMAHREIAYKDGVHELLLXVIXWVGIVISLVCLAICIFXFCFFRGLQSDRNXIHKNLCINLFIAEFIFLIGIDKXKYAIACPIFAGLLHFFFLAAFAWMCLEGVQLYLMLVEVFESEYSRKKYYYVAGYLFPAXVVGVSAAIDYKSYGXEKACWLHVDNYFIWSFIGPVXFIILLNIIFLVIXLCKMVKHSNXLKPDSSRLENINNYRVCDGYYNXDLPGYEDNKPFIKSWVLGAFALLCLLGLXWSFGLLFINEEXIVMAYLFXIFNAFQGVFIFIFHCALQKKVRKEYGKCFRHSYCCGGLPXESPHSSVKASXXRXSARYSSGXQSRIRRMWNDXVRKQSESSFISGDINSXSXLNQGMXGNYLLXNPLLRPHGXNNPYNXLLAEXVVCNAPSAPVFNSPGHSLNNARDXSAMDXLPLNGNFNNSYSLHKGDYNDSVQVVDCGLSLNDXAFEKMIISELVHNNLRGSSKXHNLELXLPVKPVIGGSSSEDDAIVADASSLMHSDNPGLELHHKELEAPLIPQRXHSLLYQPQKKVKSEGXDSYVSQLXAEAEDHLQSPNRDSLYXSMPNLRDSPYPESSPDMEEDLSPSRRSENEDIYYKSMPNLGAGHQLQMCYQISRGNSDGYIIPINKEGCIPEGDVREGQMQLVXSL

SEQ ID NO: 1771 - protein, 471 aa, Homo sapiens
  MOD_RES (1)..(1): Any amino acid
  MOD_RES (3)..(3): Selenocysteine
  MOD_RES (13)..(13): Selenocysteine
  MOD_RES (36)..(36): Selenocysteine
  MOD_RES (56)..(56): Selenocysteine
  MOD_RES (68)..(68): Selenocysteine
  MOD_RES (76)..(76): Selenocysteine
  MOD_RES (116)..(116): Selenocysteine
  MOD_RES (127)..(128): Selenocysteine
  MOD_RES (130)..(130): Selenocysteine
  MOD_RES (138)..(138): Selenocysteine
  MOD_RES (149)..(149): Selenocysteine
  MOD_RES (166)..(166): Selenocysteine
  MOD_RES (168)..(168): Selenocysteine
  MOD_RES (174)..(174): Selenocysteine
  MOD_RES (180)..(180): Selenocysteine
  MOD_RES (189)..(189): Selenocysteine
  MOD_RES (195)..(195): Selenocysteine
  MOD_RES (200)..(200): Selenocysteine
  MOD_RES (216)..(216): Selenocysteine
  MOD_RES (220)..(220): Selenocysteine
  MOD_RES (230)..(230): Selenocysteine
  MOD_RES (235)..(235): Selenocysteine
  MOD_RES (269)..(269): Selenocysteine
  MOD_RES (290)..(290): Selenocysteine
  MOD_RES (296)..(296): Selenocysteine
  MOD_RES (344)..(344): Selenocysteine
  MOD_RES (360)..(360): Selenocysteine
  MOD_RES (368)..(368): Selenocysteine
  MOD_RES (385)..(385): Selenocysteine
  MOD_RES (469)..(469): Selenocysteine
XIXLCKMVKHSNXLKPDSSRLENINNYRVCDGYYNXDLPGSWVLGAFALLCLLGLXWSFGLLFINEEXIVMAYLFXIFNAFQGVFIFIFHCALQKKVRKEYGKCFRHSYCCGGLPXESPHSSVKASXXRXSARYSSGXQSRIRRMWNDXVRKQSESSFISGDINSXSXLNQGMXGNYLLXNPLLRPHGXNNPYNXLLAEXVVCNAPSAPVFNSPAXYREXRHSLNNARDXSAMDXLPLNGNFNNSYSLHKGDYNDSVQVVDCGLSLNDXAFEKMIISELVHNNLRGSSKXHNLELXLPVKPVIGGSSSEDDAIVADASSLMHSDNPGLELHHKELEAPLIPQRXHSLLYQPQKKVKSEGXDSYVSQLXAEAEDHLQSPNRDSLYXSMPNLRDSPYPESSPDMEEDLSPSRRSENEDIYYKSMPNLGAGHQLQMCYQISRGNSDGYIIPINKEGCIPEGDVREGQMQLVXSL

SEQ ID NO: 1772 - protein, 1231 aa, Homo sapiens
  MOD_RES (48)..(48): Selenocysteine
  MOD_RES (61)..(61): Selenocysteine
  MOD_RES (95)..(95): Selenocysteine
  MOD_RES (113)..(113): Selenocysteine
  MOD_RES (175)..(175): Selenocysteine
  MOD_RES (179)..(179): Selenocysteine
  MOD_RES (181)..(181): Selenocysteine
  MOD_RES (183)..(183): Selenocysteine
  MOD_RES (197)..(199): Selenocysteine
  MOD_RES (209)..(209): Selenocysteine
  MOD_RES (225)..(225): Selenocysteine
  MOD_RES (235)..(235): Selenocysteine
  MOD_RES (252)..(252): Selenocysteine
  MOD_RES (278)..(278): Selenocysteine
  MOD_RES (294)..(294): Selenocysteine
  MOD_RES (300)..(300): Selenocysteine
  MOD_RES (303)..(303): Selenocysteine
  MOD_RES (335)..(335): Selenocysteine
  MOD_RES (345)..(345): Selenocysteine
  MOD_RES (429)..(430): Selenocysteine
  MOD_RES (438)..(440): Selenocysteine
  MOD_RES (442)..(443): Selenocysteine
  MOD_RES (446)..(448): Selenocysteine
  MOD_RES (455)..(456): Selenocysteine
  MOD_RES (467)..(467): Selenocysteine
  MOD_RES (469)..(469): Selenocysteine
  MOD_RES (481)..(482): Selenocysteine
  MOD_RES (511)..(511): Selenocysteine
  MOD_RES (525)..(525): Selenocysteine
  MOD_RES (530)..(530): Selenocysteine
  MOD_RES (559)..(559): Selenocysteine
  MOD_RES (567)..(567): Selenocysteine
  MOD_RES (579)..(579): Selenocysteine
  MOD_RES (589)..(589): Selenocysteine
  MOD_RES (610)..(610): Selenocysteine
  MOD_RES (641)..(641): Selenocysteine
  MOD_RES (658)..(659): Selenocysteine
  MOD_RES (667)..(667): Selenocysteine
  MOD_RES (672)..(672): Selenocysteine
  MOD_RES (687)..(687): Selenocysteine
  MOD_RES (694)..(694): Selenocysteine
  MOD_RES (706)..(706): Selenocysteine
  MOD_RES (724)..(724): Selenocysteine
  MOD_RES (731)..(731): Selenocysteine
  MOD_RES (757)..(757): Selenocysteine
  MOD_RES (766)..(766): Selenocysteine
  MOD_RES (771)..(771): Selenocysteine
  MOD_RES (783)..(783): Selenocysteine
  MOD_RES (803)..(803): Selenocysteine
  MOD_RES (827)..(827): Selenocysteine
  MOD_RES (829)..(829): Selenocysteine
  MOD_RES (834)..(834): Selenocysteine
  MOD_RES (841)..(842): Selenocysteine
  MOD_RES (845)..(845): Selenocysteine
  MOD_RES (847)..(848): Selenocysteine
  MOD_RES (855)..(855): Selenocysteine
  MOD_RES (881)..(881): Selenocysteine
  MOD_RES (898)..(898): Selenocysteine
  MOD_RES (911)..(911): Selenocysteine
  MOD_RES (934)..(934): Selenocysteine
  MOD_RES (956)..(956): Selenocysteine
  MOD_RES (1008)..(1008): Selenocysteine
  MOD_RES (1018)..(1018): Selenocysteine
  MOD_RES (1029)..(1029): Selenocysteine
  MOD_RES (1050)..(1050): Selenocysteine
  MOD_RES (1080)..(1080): Selenocysteine
  MOD_RES (1092)..(1092): Selenocysteine
  MOD_RES (1100)..(1100): Selenocysteine
  MOD_RES (1131)..(1131): Selenocysteine
  MOD_RES (1139)..(1139): Selenocysteine
  MOD_RES (1148)..(1148): Selenocysteine
  MOD_RES (1153)..(1153): Selenocysteine
  MOD_RES (1159)..(1159): Selenocysteine
  MOD_RES (1172)..(1172): Selenocysteine
  MOD_RES (1183)..(1183): Selenocysteine
  MOD_RES (1200)..(1200): Selenocysteine
  MOD_RES (1228)..(1229): Selenocysteine
MWPSQLLIFMMLLAPIIHAFSRAPIPMAVVRRELSCESYPIELRCPGXDVIMIESANYGRXDDKICDSDPAQMENIRCYLPDAYKIMSQRCNNRXQCAVVAGPDVFPDPCPGXYKYLEVQYECVPYKVEQKVFLCPGLLKGVYQSEHLFESDHQSGAWCKDPLQASDKIYYMPWXPYRXDXLXEYSSKDDFIAGRPXXXYKLPHRVDGXGFVVYDGALFFNKERXRNIVKFDLRXRIKSGEAIIANANYHDXSPYRWGGKSDIDLAVDENGLWVIYAXEQNNGKIVISQLNPYXLRIEGXWDXAYDKRSASNAFMICGILYVVKSVYEDDDNEAXGNKIDYIYNXDQSKDSLVDVPFPNSYQYIAAVDYNPRDNLLYVWNNYHVVKYSLDFGPLDSRSGQAHHGQVSYISPPIHLDSELERPSVKDISXXGPLGMGSXXXSXXLRXXXLSPGRSXXPSVSGRRNRSXSXPSPAVEVLDDMXXHLPSASSQIPALEESCEAVEAREIMWFKXRQGQIAKQPCPAGXIGVSXYLCLAPDGIWDPQGPDLSNCSSPWVNHIXQKLKSGEXAANIARELAEQXRNHLNAGDIXYSVRAMDQLVGLLDVQLRNLXPGGKDSAARSLNKLQKRERSCRAYVQAMVEXVNNLLQPQALNAWRDLXXSDQLRAAXMLLHXVEESAFVLADNLLKXDIVRENXDNIKLEVARLSXEGNLEDLKFPENMGHGSXIQLSANXLKQNGRNGEIRVAFVLYNNLGPYLSXENASMKLGXEALSXNHSVIVNSPVIXAAINKEFSNKVYLADPVVFXVKHIKQSEENFNPNCSFWSYSKRXMXGYWSXQGCRLLXXNKXHXXCSCNHLXNFAVLMAHVEVKHSDAVHDLLLDVIXWVGILLSLVCLLICIFXFCFFRGLQSDRNXIHKNLCISLFVAELLFLIGINRXDQPIACAVFAALLHFFFLAAFXWMFLEGVQLYIMLVEVFESEHSRRKYFYLVGYGMPALIVAVSAAVDYRSYGXDKVCWLRLDXYFIWSFIGPAXLIIMLNVIFLGIALYKMFHHXAILKPESGCLDNIKSWVIGAIALLCLLGLXWAFGLMYINESXVIMAYLFXIFNSLQGMFIFIFHCVLQKKVRKEYGKCLRXHCCSGKSXESSIGSGKXSGSRXPGRYSXGSQSRIRRMWNDXVRKQSESSFIXGDINSSASLNREPYREXSMGVKLNIAYQIGASEQCQGYKCHGYSXXEW

SEQ ID NO: 1773 - protein, 1240 aa, Homo sapiens
  MOD_RES (48)..(48): Selenocysteine
  MOD_RES (61)..(61): Selenocysteine
  MOD_RES (95)..(95): Selenocysteine
  MOD_RES (113)..(113): Selenocysteine
  MOD_RES (175)..(175): Selenocysteine
  MOD_RES (179)..(179): Selenocysteine
  MOD_RES (181)..(181): Selenocysteine
  MOD_RES (183)..(183): Selenocysteine
  MOD_RES (197)..(199): Selenocysteine
  MOD_RES (209)..(209): Selenocysteine
  MOD_RES (225)..(225): Selenocysteine
  MOD_RES (235)..(235): Selenocysteine
  MOD_RES (252)..(252): Selenocysteine
  MOD_RES (278)..(278): Selenocysteine
  MOD_RES (294)..(294): Selenocysteine
  MOD_RES (300)..(300): Selenocysteine
  MOD_RES (303)..(303): Selenocysteine
  MOD_RES (335)..(335): Selenocysteine
  MOD_RES (345)..(345): Selenocysteine
  MOD_RES (429)..(430): Selenocysteine
  MOD_RES (438)..(440): Selenocysteine
  MOD_RES (442)..(443): Selenocysteine
  MOD_RES (446)..(448): Selenocysteine
  MOD_RES (455)..(456): Selenocysteine
  MOD_RES (467)..(467): Selenocysteine
  MOD_RES (469)..(469): Selenocysteine
  MOD_RES (481)..(482): Selenocysteine
  MOD_RES (511)..(511): Selenocysteine
  MOD_RES (525)..(525): Selenocysteine
  MOD_RES (530)..(530): Selenocysteine
  MOD_RES (559)..(559): Selenocysteine
  MOD_RES (567)..(567): Selenocysteine
  MOD_RES (579)..(579): Selenocysteine
  MOD_RES (589)..(589): Selenocysteine
  MOD_RES (610)..(610): Selenocysteine
  MOD_RES (641)..(641): Selenocysteine
  MOD_RES (658)..(659): Selenocysteine
  MOD_RES (667)..(667): Selenocysteine
  MOD_RES (672)..(672): Selenocysteine
  MOD_RES (687)..(687): Selenocysteine
  MOD_RES (694)..(694): Selenocysteine
  MOD_RES (706)..(706): Selenocysteine
  MOD_RES (724)..(724): Selenocysteine
  MOD_RES (731)..(731): Selenocysteine
  MOD_RES (757)..(757): Selenocysteine
  MOD_RES (766)..(766): Selenocysteine
  MOD_RES (771)..(771): Selenocysteine
  MOD_RES (783)..(783): Selenocysteine
  MOD_RES (803)..(803): Selenocysteine
  MOD_RES (827)..(827): Selenocysteine
  MOD_RES (829)..(829): Selenocysteine
  MOD_RES (834)..(834): Selenocysteine
  MOD_RES (841)..(842): Selenocysteine
  MOD_RES (845)..(845): Selenocysteine
  MOD_RES (847)..(848): Selenocysteine
  MOD_RES (855)..(855): Selenocysteine
  MOD_RES (881)..(881): Selenocysteine
  MOD_RES (898)..(898): Selenocysteine
  MOD_RES (911)..(911): Selenocysteine
  MOD_RES (934)..(934): Selenocysteine
  MOD_RES (956)..(956): Selenocysteine
  MOD_RES (1008)..(1008): Selenocysteine
  MOD_RES (1018)..(1018): Selenocysteine
  MOD_RES (1029)..(1029): Selenocysteine
  MOD_RES (1050)..(1050): Selenocysteine
  MOD_RES (1089)..(1089): Selenocysteine
  MOD_RES (1101)..(1101): Selenocysteine
  MOD_RES (1109)..(1109): Selenocysteine
  MOD_RES (1140)..(1140): Selenocysteine
  MOD_RES (1148)..(1148): Selenocysteine
  MOD_RES (1157)..(1157): Selenocysteine
  MOD_RES (1162)..(1162): Selenocysteine
  MOD_RES (1168)..(1168): Selenocysteine
  MOD_RES (1181)..(1181): Selenocysteine
  MOD_RES (1192)..(1192): Selenocysteine
  MOD_RES (1209)..(1209): Selenocysteine
  MOD_RES (1237)..(1238): Selenocysteine
MWPSQLLIFMMLLAPIIHAFSRAPIPMAVVRRELSCESYPIELRCPGXDVIMIESANYGRXDDKICDSDPAQMENIRCYLPDAYKIMSQRCNNRXQCAVVAGPDVFPDPCPGXYKYLEVQYECVPYKVEQKVFLCPGLLKGVYQSEHLFESDHQSGAWCKDPLQASDKIYYMPWXPYRXDXLXEYSSKDDFIAGRPXXXYKLPHRVDGXGFVVYDGALFFNKERXRNIVKFDLRXRIKSGEAIIANANYHDXSPYRWGGKSDIDLAVDENGLWVIYAXEQNNGKIVISQLNPYXLRIEGXWDXAYDKRSASNAFMICGILYVVKSVYEDDDNEAXGNKIDYIYNXDQSKDSLVDVPFPNSYQYIAAVDYNPRDNLLYVWNNYHVVKYSLDFGPLDSRSGQAHHGQVSYISPPIHLDSELERPSVKDISXXGPLGMGSXXXSXXLRXXXLSPGRSXXPSVSGRRNRSXSXPSPAVEVLDDMXXHLPSASSQIPALEESCEAVEAREIMWFKXRQGQIAKQPCPAGXIGVSXYLCLAPDGIWDPQGPDLSNCSSPWVNHIXQKLKSGEXAANIARELAEQXRNHLNAGDIXYSVRAMDQLVGLLDVQLRNLXPGGKDSAARSLNKLQKRERSCRAYVQAMVEXVNNLLQPQALNAWRDLXXSDQLRAAXMLLHXVEESAFVLADNLLKXDIVRENXDNIKLEVARLSXEGNLEDLKFPENMGHGSXIQLSANXLKQNGRNGEIRVAFVLYNNLGPYLSXENASMKLGXEALSXNHSVIVNSPVIXAAINKEFSNKVYLADPVVFXVKHIKQSEENFNPNCSFWSYSKRXMXGYWSXQGCRLLXXNKXHXXCSCNHLXNFAVLMAHVEVKHSDAVHDLLLDVIXWVGILLSLVCLLICIFXFCFFRGLQSDRNXIHKNLCISLFVAELLFLIGINRXDQPIACAVFAALLHFFFLAAFXWMFLEGVQLYIMLVEVFESEHSRRKYFYLVGYGMPALIVAVSAAVDYRSYGXDKVCWLRLDXYFIWSFIGPAXLIIMLNVIFLGIALYKMFHHXAILKPESGCLDNINYEDNRPFIKSWVIGAIALLCLLGLXWAFGLMYINESXVIMAYLFXIFNSLQGMFIFIFHCVLQKKVRKEYGKCLRXHCCSGKSXESSIGSGKXSGSRXPGRYSXGSQSRIRRMWNDXVRKQSESSFIXGDINSSASLNREPYREXSMGVKLNIAYQIGASEQCQGYKCHGYSXXEW

SEQ ID NO: 1774 - protein, 1274 aa, Homo sapiens
  MOD_RES (48)..(48): Selenocysteine
  MOD_RES (61)..(61): Selenocysteine
  MOD_RES (95)..(95): Selenocysteine
  MOD_RES (113)..(113): Selenocysteine
  MOD_RES (175)..(175): Selenocysteine
  MOD_RES (179)..(179): Selenocysteine
  MOD_RES (181)..(181): Selenocysteine
  MOD_RES (183)..(183): Selenocysteine
  MOD_RES (197)..(199): Selenocysteine
  MOD_RES (209)..(209): Selenocysteine
  MOD_RES (225)..(225): Selenocysteine
  MOD_RES (235)..(235): Selenocysteine
  MOD_RES (252)..(252): Selenocysteine
  MOD_RES (278)..(278): Selenocysteine
  MOD_RES (294)..(294): Selenocysteine
  MOD_RES (300)..(300): Selenocysteine
  MOD_RES (303)..(303): Selenocysteine
  MOD_RES (335)..(335): Selenocysteine
  MOD_RES (345)..(345): Selenocysteine
  MOD_RES (429)..(430): Selenocysteine
  MOD_RES (438)..(440): Selenocysteine
  MOD_RES (442)..(443): Selenocysteine
  MOD_RES (446)..(448): Selenocysteine
  MOD_RES (455)..(456): Selenocysteine
  MOD_RES (467)..(467): Selenocysteine
  MOD_RES (469)..(469): Selenocysteine
  MOD_RES (481)..(482): Selenocysteine
  MOD_RES (511)..(511): Selenocysteine
  MOD_RES (525)..(525): Selenocysteine
  MOD_RES (530)..(530): Selenocysteine
  MOD_RES (559)..(559): Selenocysteine
  MOD_RES (567)..(567): Selenocysteine
  MOD_RES (579)..(579): Selenocysteine
  MOD_RES (589)..(589): Selenocysteine
  MOD_RES (610)..(610): Selenocysteine
  MOD_RES (641)..(641): Selenocysteine
  MOD_RES (658)..(659): Selenocysteine
  MOD_RES (667)..(667): Selenocysteine
  MOD_RES (672)..(672): Selenocysteine
  MOD_RES (687)..(687): Selenocysteine
  MOD_RES (694)..(694): Selenocysteine
  MOD_RES (706)..(706): Selenocysteine
  MOD_RES (724)..(724): Selenocysteine
  MOD_RES (731)..(731): Selenocysteine
  MOD_RES (757)..(757): Selenocysteine
  MOD_RES (766)..(766): Selenocysteine
  MOD_RES (771)..(771): Selenocysteine
  MOD_RES (783)..(783): Selenocysteine
  MOD_RES (803)..(803): Selenocysteine
  MOD_RES (827)..(827): Selenocysteine
  MOD_RES (829)..(829): Selenocysteine
  MOD_RES (834)..(834): Selenocysteine
  MOD_RES (841)..(842): Selenocysteine
  MOD_RES (845)..(845): Selenocysteine
  MOD_RES (847)..(848): Selenocysteine
  MOD_RES (855)..(855): Selenocysteine
  MOD_RES (881)..(881): Selenocysteine
  MOD_RES (898)..(898): Selenocysteine
  MOD_RES (911)..(911): Selenocysteine
  MOD_RES (934)..(934): Selenocysteine
  MOD_RES (956)..(956): Selenocysteine
  MOD_RES (1008)..(1008): Selenocysteine
  MOD_RES (1018)..(1018): Selenocysteine
  MOD_RES (1029)..(1029): Selenocysteine
  MOD_RES (1050)..(1050): Selenocysteine
  MOD_RES (1080)..(1080): Selenocysteine
  MOD_RES (1092)..(1092): Selenocysteine
  MOD_RES (1100)..(1100): Selenocysteine
  MOD_RES (1131)..(1131): Selenocysteine
  MOD_RES (1139)..(1139): Selenocysteine
  MOD_RES (1148)..(1148): Selenocysteine
  MOD_RES (1153)..(1153): Selenocysteine
  MOD_RES (1159)..(1159): Selenocysteine
  MOD_RES (1172)..(1172): Selenocysteine
  MOD_RES (1183)..(1183): Selenocysteine
  MOD_RES (1212)..(1212): Selenocysteine
  MOD_RES (1218)..(1218): Selenocysteine
  MOD_RES (1243)..(1243): Selenocysteine
  MOD_RES (1271)..(1272): Selenocysteine
MWPSQLLIFMMLLAPIIHAFSRAPIPMAVVRRELSCESYPIELRCPGXDVIMIESANYGRXDDKICDSDPAQMENIRCYLPDAYKIMSQRCNNRXQCAVVAGPDVFPDPCPGXYKYLEVQYECVPYKVEQKVFLCPGLLKGVYQSEHLFESDHQSGAWCKDPLQASDKIYYMPWXPYRXDXLXEYSSKDDFIAGRPXXXYKLPHRVDGXGFVVYDGALFFNKERXRNIVKFDLRXRIKSGEAIIANANYHDXSPYRWGGKSDIDLAVDENGLWVIYAXEQNNGKIVISQLNPYXLRIEGXWDXAYDKRSASNAFMICGILYVVKSVYEDDDNEAXGNKIDYIYNXDQSKDSLVDVPFPNSYQYIAAVDYNPRDNLLYVWNNYHVVKYSLDFGPLDSRSGQAHHGQVSYISPPIHLDSELERPSVKDISXXGPLGMGSXXXSXXLRXXXLSPGRSXXPSVSGRRNRSXSXPSPAVEVLDDMXXHLPSASSQIPALEESCEAVEAREIMWFKXRQGQIAKQPCPAGXIGVSXYLCLAPDGIWDPQGPDLSNCSSPWVNHIXQKLKSGEXAANIARELAEQXRNHLNAGDIXYSVRAMDQLVGLLDVQLRNLXPGGKDSAARSLNKLQKRERSCRAYVQAMVEXVNNLLQPQALNAWRDLXXSDQLRAAXMLLHXVEESAFVLADNLLKXDIVRENXDNIKLEVARLSXEGNLEDLKFPENMGHGSXIQLSANXLKQNGRNGEIRVAFVLYNNLGPYLSXENASMKLGXEALSXNHSVIVNSPVIXAAINKEFSNKVYLADPVVFXVKHIKQSEENFNPNCSFWSYSKRXMXGYWSXQGCRLLXXNKXHXXCSCNHLXNFAVLMAHVEVKHSDAVHDLLLDVIXWVGILLSLVCLLICIFXFCFFRGLQSDRNXIHKNLCISLFVAELLFLIGINRXDQPIACAVFAALLHFFFLAAFXWMFLEGVQLYIMLVEVFESEHSRRKYFYLVGYGMPALIVAVSAAVDYRSYGXDKVCWLRLDXYFIWSFIGPAXLIIMLNVIFLGIALYKMFHHXAILKPESGCLDNIKSWVIGAIALLCLLGLXWAFGLMYINESXVIMAYLFXIFNSLQGMFIFIFHCVLQKKVRKEYGKCLRXHCCSGKSXESSIGSGKXSGSRXPGRYSXGSQSRIRRMWNDXVRKQSESSFIXGDINSSASLNRGAMANHLISNALLRPHGXNNPYNXLLGEPAVCNNPSVSMYNAQEPYREXSMGVKLNIAYQIGASEQCQGYKCHGYSXXEW

SEQ ID NO: 1775 - protein, 1283 aa, Homo sapiens
  MOD_RES (48)..(48): Selenocysteine
  MOD_RES (61)..(61): Selenocysteine
  MOD_RES (95)..(95): Selenocysteine
  MOD_RES (113)..(113): Selenocysteine
  MOD_RES (175)..(175): Selenocysteine
  MOD_RES (179)..(179): Selenocysteine
  MOD_RES (181)..(181): Selenocysteine
  MOD_RES (183)..(183): Selenocysteine
  MOD_RES (197)..(199): Selenocysteine
  MOD_RES (209)..(209): Selenocysteine
  MOD_RES (225)..(225): Selenocysteine
  MOD_RES (235)..(235): Selenocysteine
  MOD_RES (252)..(252): Selenocysteine
  MOD_RES (278)..(278): Selenocysteine
  MOD_RES (294)..(294): Selenocysteine
  MOD_RES (300)..(300): Selenocysteine
  MOD_RES (303)..(303): Selenocysteine
  MOD_RES (335)..(335): Selenocysteine
  MOD_RES (345)..(345): Selenocysteine
  MOD_RES (429)..(430): Selenocysteine
  MOD_RES (438)..(440): Selenocysteine
  MOD_RES (442)..(443): Selenocysteine
  MOD_RES (446)..(448): Selenocysteine
  MOD_RES (455)..(456): Selenocysteine
  MOD_RES (467)..(467): Selenocysteine
  MOD_RES (469)..(469): Selenocysteine
  MOD_RES (481)..(482): Selenocysteine
  MOD_RES (511)..(511): Selenocysteine
  MOD_RES (525)..(525): Selenocysteine
  MOD_RES (530)..(530): Selenocysteine
  MOD_RES (559)..(559): Selenocysteine
  MOD_RES (567)..(567): Selenocysteine
  MOD_RES (579)..(579): Selenocysteine
  MOD_RES (589)..(589): Selenocysteine
  MOD_RES (610)..(610): Selenocysteine
  MOD_RES (641)..(641): Selenocysteine
  MOD_RES (658)..(659): Selenocysteine
  MOD_RES (667)..(667): Selenocysteine
  MOD_RES (672)..(672): Selenocysteine
  MOD_RES (687)..(687): Selenocysteine
  MOD_RES (694)..(694): Selenocysteine
  MOD_RES (706)..(706): Selenocysteine
  MOD_RES (724)..(724): Selenocysteine
  MOD_RES (731)..(731): Selenocysteine
  MOD_RES (757)..(757): Selenocysteine
  MOD_RES (766)..(766): Selenocysteine
  MOD_RES (771)..(771): Selenocysteine
  MOD_RES (783)..(783): Selenocysteine
  MOD_RES (803)..(803): Selenocysteine
  MOD_RES (827)..(827): Selenocysteine
  MOD_RES (829)..(829): Selenocysteine
  MOD_RES (834)..(834): Selenocysteine
  MOD_RES (841)..(842): Selenocysteine
  MOD_RES (845)..(845): Selenocysteine
  MOD_RES (847)..(848): Selenocysteine
  MOD_RES (855)..(855): Selenocysteine
  MOD_RES (881)..(881): Selenocysteine
  MOD_RES (898)..(898): Selenocysteine
  MOD_RES (911)..(911): Selenocysteine
  MOD_RES (934)..(934): Selenocysteine
  MOD_RES (956)..(956): Selenocysteine
  MOD_RES (1008)..(1008): Selenocysteine
  MOD_RES (1018)..(1018): Selenocysteine
  MOD_RES (1029)..(1029): Selenocysteine
  MOD_RES (1050)..(1050): Selenocysteine
  MOD_RES (1089)..(1089): Selenocysteine
  MOD_RES (1101)..(1101): Selenocysteine
  MOD_RES (1109)..(1109): Selenocysteine
  MOD_RES (1140)..(1140): Selenocysteine
  MOD_RES (1148)..(1148): Selenocysteine
  MOD_RES (1157)..(1157): Selenocysteine
  MOD_RES (1162)..(1162): Selenocysteine
  MOD_RES (1168)..(1168): Selenocysteine
  MOD_RES (1181)..(1181): Selenocysteine
  MOD_RES (1192)..(1192): Selenocysteine
  MOD_RES (1221)..(1221): Selenocysteine
  MOD_RES (1227)..(1227): Selenocysteine
  MOD_RES (1252)..(1252): Selenocysteine
  MOD_RES (1280)..(1281): Selenocysteine
MWPSQLLIFMMLLAPIIHAFSRAPIPMAVVRRELSCESYPIELRCPGXDVIMIESANYGRXDDKICDSDPAQMENIRCYLPDAYKIMSQRCNNRXQCAVVAGPDVFPDPCPGXYKYLEVQYECVPYKVEQKVFLCPGLLKGVYQSEHLFESDHQSGAWCKDPLQASDKIYYMPWXPYRXDXLXEYSSKDDFIAGRPXXXYKLPHRVDGXGFVVYDGALFFNKERXRNIVKFDLRXRIKSGEAIIANANYHDXSPYRWGGKSDIDLAVDENGLWVIYAXEQNNGKIVISQLNPYXLRIEGXWDXAYDKRSASNAFMICGILYVVKSVYEDDDNEAXGNKIDYIYNXDQSKDSLVDVPFPNSYQYIAAVDYNPRDNLLYVWNNYHVVKYSLDFGPLDSRSGQAHHGQVSYISPPIHLDSELERPSVKDISXXGPLGMGSXXXSXXLRXXXLSPGRSXXPSVSGRRNRSXSXPSPAVEVLDDMXXHLPSASSQIPALEESCEAVEAREIMWFKXRQGQIAKQPCPAGXIGVSXYLCLAPDGIWDPQGPDLSNCSSPWVNHIXQKLKSGEXAANIARELAEQXRNHLNAGDIXYSVRAMDQLVGLLDVQLRNLXPGGKDSAARSLNKLQKRERSCRAYVQAMVEXVNNLLQPQALNAWRDLXXSDQLRAAXMLLHXVEESAFVLADNLLKXDIVRENXDNIKLEVARLSXEGNLEDLKFPENMGHGSXIQLSANXLKQNGRNGEIRVAFVLYNNLGPYLSXENASMKLGXEALSXNHSVIVNSPVIXAAINKEFSNKVYLADPVVFXVKHIKQSEENFNPNCSFWSYSKRXMXGYWSXQGCRLLXXNKXHXXCSCNHLXNFAVLMAHVEVKHSDAVHDLLLDVIXWVGILLSLVCLLICIFXFCFFRGLQSDRNXIHKNLCISLFVAELLFLIGINRXDQPIACAVFAALLHFFFLAAFXWMFLEGVQLYIMLVEVFESEHSRRKYFYLVGYGMPALIVAVSAAVDYRSYGXDKVCWLRLDXYFIWSFIGPAXLIIMLNVIFLGIALYKMFHHXAILKPESGCLDNINYEDNRPFIKSWVIGAIALLCLLGLXWAFGLMYINESXVIMAYLFXIFNSLQGMFIFIFHCVLQKKVRKEYGKCLRXHCCSGKSXESSIGSGKXSGSRXPGRYSXGSQSRIRRMWNDXVRKQSESSFIXGDINSSASLNRGAMANHLISNALLRPHGXNNPYNXLLGEPAVCNNPSVSMYNAQEPYREXSMGVKLNIAYQIGASEQCQGYKCHGYSXXEW

SEQ ID NO: 1776 - protein, 1469 aa, Homo sapiens
  MOD_RES (48)..(48): Selenocysteine
  MOD_RES (61)..(61): Selenocysteine
  MOD_RES (95)..(95): Selenocysteine
  MOD_RES (113)..(113): Selenocysteine
  MOD_RES (175)..(175): Selenocysteine
  MOD_RES (179)..(179): Selenocysteine
  MOD_RES (181)..(181): Selenocysteine
  MOD_RES (183)..(183): Selenocysteine
  MOD_RES (197)..(199): Selenocysteine
  MOD_RES (209)..(209): Selenocysteine
  MOD_RES (225)..(225): Selenocysteine
  MOD_RES (235)..(235): Selenocysteine
  MOD_RES (252)..(252): Selenocysteine
  MOD_RES (278)..(278): Selenocysteine
  MOD_RES (294)..(294): Selenocysteine
  MOD_RES (300)..(300): Selenocysteine
  MOD_RES (303)..(303): Selenocysteine
  MOD_RES (335)..(335): Selenocysteine
  MOD_RES (345)..(345): Selenocysteine
  MOD_RES (429)..(430): Selenocysteine
  MOD_RES (438)..(440): Selenocysteine
  MOD_RES (442)..(443): Selenocysteine
  MOD_RES (446)..(448): Selenocysteine
  MOD_RES (455)..(456): Selenocysteine
  MOD_RES (467)..(467): Selenocysteine
  MOD_RES (469)..(469): Selenocysteine
  MOD_RES (481)..(482): Selenocysteine
  MOD_RES (511)..(511): Selenocysteine
  MOD_RES (525)..(525): Selenocysteine
  MOD_RES (530)..(530): Selenocysteine
  MOD_RES (559)..(559): Selenocysteine
  MOD_RES (567)..(567): Selenocysteine
  MOD_RES (579)..(579): Selenocysteine
  MOD_RES (589)..(589): Selenocysteine
  MOD_RES (610)..(610): Selenocysteine
  MOD_RES (641)..(641): Selenocysteine
  MOD_RES (658)..(659): Selenocysteine
  MOD_RES (667)..(667): Selenocysteine
  MOD_RES (672)..(672): Selenocysteine
  MOD_RES (687)..(687): Selenocysteine
  MOD_RES (694)..(694): Selenocysteine
  MOD_RES (706)..(706): Selenocysteine
  MOD_RES (724)..(724): Selenocysteine
  MOD_RES (731)..(731): Selenocysteine
  MOD_RES (757)..(757): Selenocysteine
  MOD_RES (766)..(766): Selenocysteine
  MOD_RES (771)..(771): Selenocysteine
  MOD_RES (783)..(783): Selenocysteine
  MOD_RES (803)..(803): Selenocysteine
  MOD_RES (827)..(827): Selenocysteine
  MOD_RES (829)..(829): Selenocysteine
  MOD_RES (834)..(834): Selenocysteine
  MOD_RES (841)..(842): Selenocysteine
  MOD_RES (845)..(845): Selenocysteine
  MOD_RES (847)..(848): Selenocysteine
  MOD_RES (855)..(855): Selenocysteine
  MOD_RES (881)..(881): Selenocysteine
  MOD_RES (898)..(898): Selenocysteine
  MOD_RES (911)..(911): Selenocysteine
  MOD_RES (934)..(934): Selenocysteine
  MOD_RES (956)..(956): Selenocysteine
  MOD_RES (1008)..(1008): Selenocysteine
  MOD_RES (1018)..(1018): Selenocysteine
  MOD_RES (1029)..(1029): Selenocysteine
  MOD_RES (1050)..(1050): Selenocysteine
  MOD_RES (1089)..(1089): Selenocysteine
  MOD_RES (1101)..(1101): Selenocysteine
  MOD_RES (1109)..(1109): Selenocysteine
  MOD_RES (1140)..(1140): Selenocysteine
  MOD_RES (1148)..(1148): Selenocysteine
  MOD_RES (1157)..(1157): Selenocysteine
  MOD_RES (1162)..(1162): Selenocysteine
  MOD_RES (1168)..(1168): Selenocysteine
  MOD_RES (1181)..(1181): Selenocysteine
  MOD_RES (1192)..(1192): Selenocysteine
  MOD_RES (1213)..(1213): Selenocysteine
  MOD_RES (1218)..(1218): Selenocysteine
  MOD_RES (1253)..(1253): Selenocysteine
  MOD_RES (1264)..(1264): Selenocysteine
  MOD_RES (1308)..(1308): Selenocysteine
  MOD_RES (1337)..(1337): Selenocysteine
  MOD_RES (1346)..(1346): Selenocysteine
  MOD_RES (1363)..(1363): Selenocysteine
  MOD_RES (1367)..(1367): Selenocysteine
  MOD_RES (1380)..(1380): Selenocysteine
  MOD_RES (1384)..(1384): Selenocysteine
  MOD_RES (1391)..(1391): Selenocysteine
  MOD_RES (1395)..(1396): Selenocysteine
  MOD_RES (1398)..(1398): Selenocysteine
  MOD_RES (1400)..(1400): Selenocysteine
  MOD_RES (1432)..(1432): Selenocysteine
  MOD_RES (1453)..(1453): Selenocysteine
  MOD_RES (1467)..(1467): Selenocysteine
MWPSQLLIFMMLLAPIIHAFSRAPIPMAVVRRELSCESYPIELRCPGXDVIMIESANYGRXDDKICDSDPAQMENIRCYLPDAYKIMSQRCNNRXQCAVVAGPDVFPDPCPGXYKYLEVQYECVPYKVEQKVFLCPGLLKGVYQSEHLFESDHQSGAWCKDPLQASDKIYYMPWXPYRXDXLXEYSSKDDFIAGRPXXXYKLPHRVDGXGFVVYDGALFFNKERXRNIVKFDLRXRIKSGEAIIANANYHDXSPYRWGGKSDIDLAVDENGLWVIYAXEQNNGKIVISQLNPYXLRIEGXWDXAYDKRSASNAFMICGILYVVKSVYEDDDNEAXGNKIDYIYNXDQSKDSLVDVPFPNSYQYIAAVDYNPRDNLLYVWNNYHVVKYSLDFGPLDSRSGQAHHGQVSYISPPIHLDSELERPSVKDISXXGPLGMGSXXXSXXLRXXXLSPGRSXXPSVSGRRNRSXSXPSPAVEVLDDMXXHLPSASSQIPALEESCEAVEAREIMWFKXRQGQIAKQPCPAGXIGVSXYLCLAPDGIWDPQGPDLSNCSSPWVNHIXQKLKSGEXAANIARELAEQXRNHLNAGDIXYSVRAMDQLVGLLDVQLRNLXPGGKDSAARSLNKLQKRERSCRAYVQAMVEXVNNLLQPQALNAWRDLXXSDQLRAAXMLLHXVEESAFVLADNLLKXDIVRENXDNIKLEVARLSXEGNLEDLKFPENMGHGSXIQLSANXLKQNGRNGEIRVAFVLYNNLGPYLSXENASMKLGXEALSXNHSVIVNSPVIXAAINKEFSNKVYLADPVVFXVKHIKQSEENFNPNCSFWSYSKRXMXGYWSXQGCRLLXXNKXHXXCSCNHLXNFAVLMAHVEVKHSDAVHDLLLDVIXWVGILLSLVCLLICIFXFCFFRGLQSDRNXIHKNLCISLFVAELLFLIGINRXDQPIACAVFAALLHFFFLAAFXWMFLEGVQLYIMLVEVFESEHSRRKYFYLVGYGMPALIVAVSAAVDYRSYGXDKVCWLRLDXYFIWSFIGPAXLIIMLNVIFLGIALYKMFHHXAILKPESGCLDNINYEDNRPFIKSWVIGAIALLCLLGLXWAFGLMYINESXVIMAYLFXIFNSLQGMFIFIFHCVLQKKVRKEYGKCLRXHCCSGKSXESSIGSGKXSGSRXPGRYSXGSQSRIRRMWNDXVRKQSESSFIXGDINSSASLNREGLLNNARDXSVMDXLPLNGNHGNSYSIASGEYLSNCVQIIDRGYNHNEXALEKKILKELXSNYIPSYLNNHERSSEQNRNLMNKLVNNLGSGREDDAIVLDDAXSFNHEESLGLELIHEESDAPLLPPRVYSXENHQPHHYXRRRIPQDHSESFFPLLXNEHXEDLQSPHRDSLYXSMPXLAGVAAXESVXXSXQXEPPPAKCGDAEDVYYKSMPNLGSRNHVHQLHXYYQLGRGSSDGFIVPPNKDGXPPEGSSKGPAHLVXSL

SEQ ID NO: 1777 - protein, 1503 aa, Homo sapiens
  MOD_RES (48)..(48): Selenocysteine
  MOD_RES (61)..(61): Selenocysteine
  MOD_RES (95)..(95): Selenocysteine
  MOD_RES (113)..(113): Selenocysteine
  MOD_RES (175)..(175): Selenocysteine
  MOD_RES (179)..(179): Selenocysteine
  MOD_RES (181)..(181): Selenocysteine
  MOD_RES (183)..(183): Selenocysteine
  MOD_RES (197)..(199): Selenocysteine
  MOD_RES (209)..(209): Selenocysteine
  MOD_RES (225)..(225): Selenocysteine
  MOD_RES (235)..(235): Selenocysteine
  MOD_RES (252)..(252): Selenocysteine
  MOD_RES (278)..(278): Selenocysteine
  MOD_RES (294)..(294): Selenocysteine
  MOD_RES (300)..(300): Selenocysteine
  MOD_RES (303)..(303): Selenocysteine
  MOD_RES (335)..(335): Selenocysteine
  MOD_RES (345)..(345): Selenocysteine
  MOD_RES (429)..(430): Selenocysteine
  MOD_RES (438)..(440): Selenocysteine
  MOD_RES (442)..(443): Selenocysteine
  MOD_RES (446)..(448): Selenocysteine
  MOD_RES (455)..(456): Selenocysteine
  MOD_RES (467)..(467): Selenocysteine
  MOD_RES (469)..(469): Selenocysteine
  MOD_RES (481)..(482): Selenocysteine
  MOD_RES (511)..(511): Selenocysteine
  MOD_RES (525)..(525): Selenocysteine
  MOD_RES (530)..(530): Selenocysteine
  MOD_RES (559)..(559): Selenocysteine
  MOD_RES (567)..(567): Selenocysteine
  MOD_RES (579)..(579): Selenocysteine
  MOD_RES (589)..(589): Selenocysteine
  MOD_RES (610)..(610): Selenocysteine
  MOD_RES (641)..(641): Selenocysteine
  MOD_RES (658)..(659): Selenocysteine
  MOD_RES (667)..(667): Selenocysteine
  MOD_RES (672)..(672): Selenocysteine
  MOD_RES (687)..(687): Selenocysteine
  MOD_RES (694)..(694): Selenocysteine
  MOD_RES (706)..(706): Selenocysteine
  MOD_RES (724)..(724): Selenocysteine
  MOD_RES (731)..(731): Selenocysteine
  MOD_RES (757)..(757): Selenocysteine
  MOD_RES (766)..(766): Selenocysteine
  MOD_RES (771)..(771): Selenocysteine
  MOD_RES (783)..(783): Selenocysteine
  MOD_RES (803)..(803): Selenocysteine
  MOD_RES (827)..(827): Selenocysteine
  MOD_RES (829)..(829): Selenocysteine
  MOD_RES (834)..(834): Selenocysteine
  MOD_RES (841)..(842): Selenocysteine
  MOD_RES (845)..(845): Selenocysteine
  MOD_RES (847)..(848): Selenocysteine
  MOD_RES (855)..(855): Selenocysteine
  MOD_RES (881)..(881): Selenocysteine
  MOD_RES (898)..(898): Selenocysteine
  MOD_RES (911)..(911): Selenocysteine
  MOD_RES (934)..(934): Selenocysteine
  MOD_RES (956)..(956): Selenocysteine
  MOD_RES (1008)..(1008): Selenocysteine
  MOD_RES (1018)..(1018): Selenocysteine
  MOD_RES (1029)..(1029): Selenocysteine
  MOD_RES (1050)..(1050): Selenocysteine
  MOD_RES (1080)..(1080): Selenocysteine
  MOD_RES (1092)..(1092): Selenocysteine
  MOD_RES (1100)..(1100): Selenocysteine
  MOD_RES (1131)..(1131): Selenocysteine
  MOD_RES (1139)..(1139): Selenocysteine
  MOD_RES (1148)..(1148): Selenocysteine
  MOD_RES (1153)..(1153): Selenocysteine
  MOD_RES (1159)..(1159): Selenocysteine
  MOD_RES (1172)..(1172): Selenocysteine
  MOD_RES (1183)..(1183): Selenocysteine
  MOD_RES (1212)..(1212): Selenocysteine
  MOD_RES (1218)..(1218): Selenocysteine
  MOD_RES (1247)..(1247): Selenocysteine
  MOD_RES (1252)..(1252): Selenocysteine
  MOD_RES (1287)..(1287): Selenocysteine
  MOD_RES (1298)..(1298): Selenocysteine
  MOD_RES (1342)..(1342): Selenocysteine
  MOD_RES (1371)..(1371): Selenocysteine
  MOD_RES (1380)..(1380): Selenocysteine
  MOD_RES (1397)..(1397): Selenocysteine
  MOD_RES (1401)..(1401): Selenocysteine
  MOD_RES (1414)..(1414): Selenocysteine
  MOD_RES (1418)..(1418): Selenocysteine
  MOD_RES (1425)..(1425): Selenocysteine
  MOD_RES (1429)..(1430): Selenocysteine
  MOD_RES (1432)..(1432): Selenocysteine
  MOD_RES (1434)..(1434): Selenocysteine
  MOD_RES (1466)..(1466): Selenocysteine
  MOD_RES (1487)..(1487): Selenocysteine
  MOD_RES (1501)..(1501): Selenocysteine
MWPSQLLIFMMLLAPIIHAFSRAPIPMAVVRRELSCESYPIELRCPGXDVIMIESANYGRXDDKICDSDPAQMENIRCYLPDAYKIMSQRCNNRXQCAVVAGPDVFPDPCPGXYKYLEVQYECVPYKVEQKVFLCPGLLKGVYQSEHLFESDHQSGAWCKDPLQASDKIYYMPWXPYRXDXLXEYSSKDDFIAGRPXXXYKLPHRVDGXGFVVYDGALFFNKERXRNIVKFDLRXRIKSGEAIIANANYHDXSPYRWGGKSDIDLAVDENGLWVIYAXEQNNGKIVISQLNPYXLRIEGXWDXAYDKRSASNAFMICGILYVVKSVYEDDDNEAXGNKIDYIYNXDQSKDSLVDVPFPNSYQYIAAVDYNPRDNLLYVWNNYHVVKYSLDFGPLDSRSGQAHHGQVSYISPPIHLDSELERPSVKDISXXGPLGMGSXXXSXXLRXXXLSPGRSXXPSVSGRRNRSXSXPSPAVEVLDDMXXHLPSASSQIPALEESCEAVEAREIMWFKXRQGQIAKQPCPAGXIGVSXYLCLAPDGIWDPQGPDLSNCSSPWVNHIXQKLKSGEXAANIARELAEQXRNHLNAGDIXYSVRAMDQLVGLLDVQLRNLXPGGKDSAARSLNKLQKRERSCRAYVQAMVEXVNNLLQPQALNAWRDLXXSDQLRAAXMLLHXVEESAFVLADNLLKXDIVRENXDNIKLEVARLSXEGNLEDLKFPENMGHGSXIQLSANXLKQNGRNGEIRVAFVLYNNLGPYLSXENASMKLGXEALSXNHSVIVNSPVIXAAINKEFSNKVYLADPVVFXVKHIKQSEENFNPNCSFWSYSKRXMXGYWSXQGCRLLXXNKXHXXCSCNHLXNFAVLMAHVEVKHSDAVHDLLLDVIXWVGILLSLVCLLICIFXFCFFRGLQSDRNXIHKNLCISLFVAELLFLIGINRXDQPIACAVFAALLHFFFLAAFXWMFLEGVQLYIMLVEVFESEHSRRKYFYLVGYGMPALIVAVSAAVDYRSYGXDKVCWLRLDXYFIWSFIGPAXLIIMLNVIFLGIALYKMFHHXAILKPESGCLDNIKSWVIGAIALLCLLGLXWAFGLMYINESXVIMAYLFXIFNSLQGMFIFIFHCVLQKKVRKEYGKCLRXHCCSGKSXESSIGSGKXSGSRXPGRYSXGSQSRIRRMWNDXVRKQSESSFIXGDINSSASLNRGAMANHLISNALLRPHGXNNPYNXLLGEPAVCNNPSVSMYNAQEGLLNNARDXSVMDXLPLNGNHGNSYSIASGEYLSNCVQIIDRGYNHNEXALEKKILKELXSNYIPSYLNNHERSSEQNRNLMNKLVNNLGSGREDDAIVLDDAXSFNHEESLGLELIHEESDAPLLPPRVYSXENHQPHHYXRRRIPQDHSESFFPLLXNEHXEDLQSPHRDSLYXSMPXLAGVAAXESVXXSXQXEPPPAKCGDAEDVYYKSMPNLGSRNHVHQLHXYYQLGRGSSDGFIVPPNKDGXPPEGSSKGPAHLVXSL

SEQ ID NO: 1778 - protein, 1512 aa, Homo sapiens
  MOD_RES (48)..(48): Selenocysteine
  MOD_RES (61)..(61): Selenocysteine
  MOD_RES (95)..(95): Selenocysteine
  MOD_RES (113)..(113): Selenocysteine
  MOD_RES (175)..(175): Selenocysteine
  MOD_RES (179)..(179): Selenocysteine
  MOD_RES (181)..(181): Selenocysteine
  MOD_RES (183)..(183): Selenocysteine
  MOD_RES (197)..(199): Selenocysteine
  MOD_RES (209)..(209): Selenocysteine
  MOD_RES (225)..(225): Selenocysteine
  MOD_RES (235)..(235): Selenocysteine
  MOD_RES (252)..(252): Selenocysteine
  MOD_RES (278)..(278): Selenocysteine
  MOD_RES (294)..(294): Selenocysteine
  MOD_RES (300)..(300): Selenocysteine
  MOD_RES (303)..(303): Selenocysteine
  MOD_RES (335)..(335): Selenocysteine
  MOD_RES (345)..(345): Selenocysteine
  MOD_RES (429)..(430): Selenocysteine
  MOD_RES (438)..(440): Selenocysteine
  MOD_RES (442)..(443): Selenocysteine
  MOD_RES (446)..(448): Selenocysteine
  MOD_RES (455)..(456): Selenocysteine
  MOD_RES (467)..(467): Selenocysteine
  MOD_RES (469)..(469): Selenocysteine
  MOD_RES (481)..(482): Selenocysteine
  MOD_RES (511)..(511): Selenocysteine
  MOD_RES (525)..(525): Selenocysteine
  MOD_RES (530)..(530): Selenocysteine
  MOD_RES (559)..(559): Selenocysteine
  MOD_RES (567)..(567): Selenocysteine
  MOD_RES (579)..(579): Selenocysteine
  MOD_RES (589)..(589): Selenocysteine
  MOD_RES (610)..(610): Selenocysteine
  MOD_RES (641)..(641): Selenocysteine
  MOD_RES (658)..(659): Selenocysteine
  MOD_RES (667)..(667): Selenocysteine
  MOD_RES (672)..(672): Selenocysteine
  MOD_RES (687)..(687): Selenocysteine
  MOD_RES (694)..(694): Selenocysteine
  MOD_RES (706)..(706): Selenocysteine
  MOD_RES (724)..(724): Selenocysteine
  MOD_RES (731)..(731): Selenocysteine
  MOD_RES (757)..(757): Selenocysteine
  MOD_RES (766)..(766): Selenocysteine
  MOD_RES (771)..(771): Selenocysteine
  MOD_RES (783)..(783): Selenocysteine
  MOD_RES (803)..(803): Selenocysteine
  MOD_RES (827)..(827): Selenocysteine
  MOD_RES (829)..(829): Selenocysteine
  MOD_RES (834)..(834): Selenocysteine
  MOD_RES (841)..(842): Selenocysteine
  MOD_RES (845)..(845): Selenocysteine
  MOD_RES (847)..(848): Selenocysteine
  MOD_RES (855)..(855): Selenocysteine
  MOD_RES (881)..(881): Selenocysteine
  MOD_RES (898)..(898): Selenocysteine
  MOD_RES (911)..(911): Selenocysteine
  MOD_RES (934)..(934): Selenocysteine
  MOD_RES (956)..(956): Selenocysteine
  MOD_RES (1008)..(1008): Selenocysteine
  MOD_RES (1018)..(1018): Selenocysteine
  MOD_RES (1029)..(1029): Selenocysteine
  MOD_RES (1050)..(1050): Selenocysteine
  MOD_RES (1089)..(1089): Selenocysteine
  MOD_RES (1101)..(1101): Selenocysteine
  MOD_RES (1109)..(1109): Selenocysteine
  MOD_RES (1140)..(1140): Selenocysteine
  MOD_RES (1148)..(1148): Selenocysteine
  MOD_RES (1157)..(1157): Selenocysteine
  MOD_RES (1162)..(1162): Selenocysteine
  MOD_RES (1168)..(1168): Selenocysteine
  MOD_RES (1181)..(1181): Selenocysteine
  MOD_RES (1192)..(1192): Selenocysteine
  MOD_RES (1221)..(1221): Selenocysteine
  MOD_RES (1227)..(1227): Selenocysteine
  MOD_RES (1256)..(1256): Selenocysteine
  MOD_RES (1261)..(1261): Selenocysteine
  MOD_RES (1296)..(1296): Selenocysteine
  MOD_RES (1307)..(1307): Selenocysteine
  MOD_RES (1351)..(1351): Selenocysteine
  MOD_RES (1380)..(1380): Selenocysteine
  MOD_RES (1389)..(1389): Selenocysteine
  MOD_RES (1406)..(1406): Selenocysteine
  MOD_RES (1410)..(1410): Selenocysteine
  MOD_RES (1423)..(1423): Selenocysteine
  MOD_RES (1427)..(1427): Selenocysteine
  MOD_RES (1434)..(1434): Selenocysteine
  MOD_RES (1438)..(1439): Selenocysteine
  MOD_RES (1441)..(1441): Selenocysteine
  MOD_RES (1443)..(1443): Selenocysteine
  MOD_RES (1475)..(1475): Selenocysteine
  MOD_RES (1496)..(1496): Selenocysteine
  MOD_RES (1510)..(1510): Selenocysteine
MWPSQLLIFMMLLAPIIHAFSRAPIPMAVVRRELSCESYPIELRCPGXDVIMIESANYGRXDDKICDSDPAQMENIRCYLPDAYKIMSQRCNNRXQCAVVAGPDVFPDPCPGXYKYLEVQYECVPYKVEQKVFLCPGLLKGVYQSEHLFESDHQSGAWCKDPLQASDKIYYMPWXPYRXDXLXEYSSKDDFIAGRPXXXYKLPHRVDGXGFVVYDGALFFNKERXRNIVKFDLRXRIKSGEAIIANANYHDXSPYRWGGKSDIDLAVDENGLWVIYAXEQNNGKIVISQLNPYXLRIEGXWDXAYDKRSASNAFMICGILYVVKSVYEDDDNEAXGNKIDYIYNXDQSKDSLVDVPFPNSYQYIAAVDYNPRDNLLYVWNNYHVVKYSLDFGPLDSRSGQAHHGQVSYISPPIHLDSELERPSVKDISXXGPLGMGSXXXSXXLRXXXLSPGRSXXPSVSGRRNRSXSXPSPAVEVLDDMXXHLPSASSQIPALEESCEAVEAREIMWFKXRQGQIAKQPCPAGXIGVSXYLCLAPDGIWDPQGPDLSNCSSPWVNHIXQKLKSGEXAANIARELAEQXRNHLNAGDIXYSVRAMDQLVGLLDVQLRNLXPGGKDSAARSLNKLQKRERSCRAYVQAMVEXVNNLLQPQALNAWRDLXXSDQLRAAXMLLHXVEESAFVLADNLLKXDIVRENXDNIKLEVARLSXEGNLEDLKFPENMGHGSXIQLSANXLKQNGRNGEIRVAFVLYNNLGPYLSXENASMKLGXEALSXNHSVIVNSPVIXAAINKEFSNKVYLADPVVFXVKHIKQSEENFNPNCSFWSYSKRXMXGYWSXQGCRLLXXNKXHXXCSCNHLXNFAVLMAHVEVKHSDAVHDLLLDVIXWVGILLSLVCLLICIFXFCFFRGLQSDRNXIHKNLCISLFVAELLFLIGINRXDQPIACAVFAALLHFFFLAAFXWMFLEGVQLYIMLVEVFESEHSRRKYFYLVGYGMPALIVAVSAAVDYRSYGXDKVCWLRLDXYFIWSFIGPAXLIIMLNVIFLGIALYKMFHHXAILKPESGCLDNINYEDNRPFIKSWVIGAIALLCLLGLXWAFGLMYINESXVIMAYLFXIFNSLQGMFIFIFHCVLQKKVRKEYGKCLRXHCCSGKSXESSIGSGKXSGSRXPGRYSXGSQSRIRRMWNDXVRKQSESSFIXGDINSSASLNRGAMANHLISNALLRPHGXNNPYNXLLGEPAVCNNPSVSMYNAQEGLLNNARDXSVMDXLPLNGNHGNSYSIASGEYLSNCVQIIDRGYNHNEXALEKKILKELXSNYIPSYLNNHERSSEQNRNLMNKLVNNLGSGREDDAIVLDDAXSFNHEESLGLELIHEESDAPLLPPRVYSXENHQPHHYXRRRIPQDHSESFFPLLXNEHXEDLQSPHRDSLYXSMPXLAGVAAXESVXXSXQXEPPPAKCGDAEDVYYKSMPNLGSRNHVHQLHXYYQLGRGSSDGFIVPPNKDGXPPEGSSKGPAHLVXSL

SEQ ID NO: 1779 - protein, 1299 aa, Homo sapiens
  MOD_RES (58)..(58): Selenocysteine
  MOD_RES (70)..(70): Selenocysteine
  MOD_RES (116)..(116): Selenocysteine
  MOD_RES (129)..(129): Selenocysteine
  MOD_RES (163)..(163): Selenocysteine
  MOD_RES (181)..(181): Selenocysteine
  MOD_RES (243)..(243): Selenocysteine
  MOD_RES (247)..(247): Selenocysteine
  MOD_RES (249)..(249): Selenocysteine
  MOD_RES (251)..(251): Selenocysteine
  MOD_RES (265)..(267): Selenocysteine
  MOD_RES (277)..(277): Selenocysteine
  MOD_RES (293)..(293): Selenocysteine
  MOD_RES (303)..(303): Selenocysteine
  MOD_RES (320)..(320): Selenocysteine
  MOD_RES (346)..(346): Selenocysteine
  MOD_RES (362)..(362): Selenocysteine
  MOD_RES (368)..(368): Selenocysteine
  MOD_RES (371)..(371): Selenocysteine
  MOD_RES (403)..(403): Selenocysteine
  MOD_RES (413)..(413): Selenocysteine
  MOD_RES (497)..(498): Selenocysteine
  MOD_RES (506)..(508): Selenocysteine
  MOD_RES (510)..(511): Selenocysteine
  MOD_RES (514)..(516): Selenocysteine
  MOD_RES (523)..(524): Selenocysteine
  MOD_RES (535)..(535): Selenocysteine
  MOD_RES (537)..(537): Selenocysteine
  MOD_RES (549)..(550): Selenocysteine
  MOD_RES (579)..(579): Selenocysteine
  MOD_RES (593)..(593): Selenocysteine
  MOD_RES (598)..(598): Selenocysteine
  MOD_RES (627)..(627): Selenocysteine
  MOD_RES (635)..(635): Selenocysteine
  MOD_RES (647)..(647): Selenocysteine
  MOD_RES (657)..(657): Selenocysteine
  MOD_RES (678)..(678): Selenocysteine
  MOD_RES (709)..(709): Selenocysteine
  MOD_RES (726)..(727): Selenocysteine
  MOD_RES (735)..(735): Selenocysteine
  MOD_RES (740)..(740): Selenocysteine
  MOD_RES (755)..(755): Selenocysteine
  MOD_RES (762)..(762): Selenocysteine
  MOD_RES (774)..(774): Selenocysteine
  MOD_RES (792)..(792): Selenocysteine
  MOD_RES (799)..(799): Selenocysteine
  MOD_RES (825)..(825): Selenocysteine
  MOD_RES (834)..(834): Selenocysteine
  MOD_RES (839)..(839): Selenocysteine
  MOD_RES (851)..(851): Selenocysteine
  MOD_RES (871)..(871): Selenocysteine
  MOD_RES (895)..(895): Selenocysteine
  MOD_RES (897)..(897): Selenocysteine
  MOD_RES (902)..(902): Selenocysteine
  MOD_RES (909)..(910): Selenocysteine
  MOD_RES (913)..(913): Selenocysteine
  MOD_RES (915)..(916): Selenocysteine
  MOD_RES (923)..(923): Selenocysteine
  MOD_RES (949)..(949): Selenocysteine
  MOD_RES (966)..(966): Selenocysteine
  MOD_RES (979)..(979): Selenocysteine
  MOD_RES (1002)..(1002): Selenocysteine
  MOD_RES (1024)..(1024): Selenocysteine
  MOD_RES (1076)..(1076): Selenocysteine
  MOD_RES (1086)..(1086): Selenocysteine
  MOD_RES (1097)..(1097): Selenocysteine
  MOD_RES (1118)..(1118): Selenocysteine
  MOD_RES (1148)..(1148): Selenocysteine
  MOD_RES (1160)..(1160): Selenocysteine
  MOD_RES (1168)..(1168): Selenocysteine
  MOD_RES (1199)..(1199): Selenocysteine
  MOD_RES (1207)..(1207): Selenocysteine
  MOD_RES (1216)..(1216): Selenocysteine
  MOD_RES (1221)..(1221): Selenocysteine
  MOD_RES (1227)..(1227): Selenocysteine
  MOD_RES (1240)..(1240): Selenocysteine
  MOD_RES (1251)..(1251): Selenocysteine
  MOD_RES (1268)..(1268): Selenocysteine
  MOD_RES (1296)..(1297): Selenocysteine
MWPSQLLIFMMLLAPIIHGGKHSERHPALAAPLRHAERSPGGALPPRHLLQQPAAERXAAHRGQGPRGAXRGVRGPGAQGAQIAAQAFSRAPIPMAVVRRELSCESYPIELRCPGXDVIMIESANYGRXDDKICDSDPAQMENIRCYLPDAYKIMSQRCNNRXQCAVVAGPDVFPDPCPGXYKYLEVQYECVPYKVEQKVFLCPGLLKGVYQSEHLFESDHQSGAWCKDPLQASDKIYYMPWXPYRXDXLXEYSSKDDFIAGRPXXXYKLPHRVDGXGFVVYDGALFFNKERXRNIVKFDLRXRIKSGEAIIANANYHDXSPYRWGGKSDIDLAVDENGLWVIYAXEQNNGKIVISQLNPYXLRIEGXWDXAYDKRSASNAFMICGILYVVKSVYEDDDNEAXGNKIDYIYNXDQSKDSLVDVPFPNSYQYIAAVDYNPRDNLLYVWNNYHVVKYSLDFGPLDSRSGQAHHGQVSYISPPIHLDSELERPSVKDISXXGPLGMGSXXXSXXLRXXXLSPGRSXXPSVSGRRNRSXSXPSPAVEVLDDMXXHLPSASSQIPALEESCEAVEAREIMWFKXRQGQIAKQPCPAGXIGVSXYLCLAPDGIWDPQGPDLSNCSSPWVNHIXQKLKSGEXAANIARELAEQXRNHLNAGDIXYSVRAMDQLVGLLDVQLRNLXPGGKDSAARSLNKLQKRERSCRAYVQAMVEXVNNLLQPQALNAWRDLXXSDQLRAAXMLLHXVEESAFVLADNLLKXDIVRENXDNIKLEVARLSXEGNLEDLKFPENMGHGSXIQLSANXLKQNGRNGEIRVAFVLYNNLGPYLSXENASMKLGXEALSXNHSVIVNSPVIXAAINKEFSNKVYLADPVVFXVKHIKQSEENFNPNCSFWSYSKRXMXGYWSXQGCRLLXXNKXHXXCSCNHLXNFAVLMAHVEVKHSDAVHDLLLDVIXWVGILLSLVCLLICIFXFCFFRGLQSDRNXIHKNLCISLFVAELLFLIGINRXDQPIACAVFAALLHFFFLAAFXWMFLEGVQLYIMLVEVFESEHSRRKYFYLVGYGMPALIVAVSAAVDYRSYGXDKVCWLRLDXYFIWSFIGPAXLIIMLNVIFLGIALYKMFHHXAILKPESGCLDNIKSWVIGAIALLCLLGLXWAFGLMYINESXVIMAYLFXIFNSLQGMFIFIFHCVLQKKVRKEYGKCLRXHCCSGKSXESSIGSGKXSGSRXPGRYSXGSQSRIRRMWNDXVRKQSESSFIXGDINSSASLNREPYREXSMGVKLNIAYQIGASEQCQGYKCHGYSXXEW

SEQ ID NO: 1780 - protein, 1308 aa, Homo sapiens
  MOD_RES (58)..(58): Selenocysteine
  MOD_RES (70)..(70): Selenocysteine
  MOD_RES (116)..(116): Selenocysteine
  MOD_RES (129)..(129): Selenocysteine
  MOD_RES (163)..(163): Selenocysteine
  MOD_RES (181)..(181): Selenocysteine
  MOD_RES (243)..(243): Selenocysteine
  MOD_RES (247)..(247): Selenocysteine
  MOD_RES (249)..(249): Selenocysteine
  MOD_RES (251)..(251): Selenocysteine
  MOD_RES (265)..(267): Selenocysteine
  MOD_RES (277)..(277): Selenocysteine
  MOD_RES (293)..(293): Selenocysteine
  MOD_RES (303)..(303): Selenocysteine
  MOD_RES (320)..(320): Selenocysteine
  MOD_RES (346)..(346): Selenocysteine
  MOD_RES (362)..(362): Selenocysteine
  MOD_RES (368)..(368): Selenocysteine
  MOD_RES (371)..(371): Selenocysteine
  MOD_RES (403)..(403): Selenocysteine
  MOD_RES (413)..(413): Selenocysteine
  MOD_RES (497)..(498): Selenocysteine
  MOD_RES (506)..(508): Selenocysteine
  MOD_RES (510)..(511): Selenocysteine
  MOD_RES (514)..(516): Selenocysteine
  MOD_RES (523)..(524): Selenocysteine
  MOD_RES (535)..(535): Selenocysteine
  MOD_RES (537)..(537): Selenocysteine
  MOD_RES (549)..(550): Selenocysteine
  MOD_RES (579)..(579): Selenocysteine
  MOD_RES (593)..(593): Selenocysteine
  MOD_RES (598)..(598): Selenocysteine
  MOD_RES (627)..(627): Selenocysteine
  MOD_RES (635)..(635): Selenocysteine
  MOD_RES (647)..(647): Selenocysteine
  MOD_RES (657)..(657): Selenocysteine
  MOD_RES (678)..(678): Selenocysteine
  MOD_RES (709)..(709): Selenocysteine
  MOD_RES (726)..(727): Selenocysteine
  MOD_RES (735)..(735): Selenocysteine
  MOD_RES (740)..(740): Selenocysteine
  MOD_RES (755)..(755): Selenocysteine
  MOD_RES (762)..(762): Selenocysteine
  MOD_RES (774)..(774): Selenocysteine
  MOD_RES (792)..(792): Selenocysteine
  MOD_RES (799)..(799): Selenocysteine
  MOD_RES (825)..(825): Selenocysteine
  MOD_RES (834)..(834): Selenocysteine
  MOD_RES (839)..(839): Selenocysteine
  MOD_RES (851)..(851): Selenocysteine
  MOD_RES (871)..(871): Selenocysteine
  MOD_RES (895)..(895): Selenocysteine
  MOD_RES (897)..(897): Selenocysteine
  MOD_RES (902)..(902): Selenocysteine
  MOD_RES (909)..(910): Selenocysteine
  MOD_RES (913)..(913): Selenocysteine
  MOD_RES (915)..(916): Selenocysteine
  MOD_RES (923)..(923): Selenocysteine
  MOD_RES (949)..(949): Selenocysteine
  MOD_RES (966)..(966): Selenocysteine
  MOD_RES (979)..(979): Selenocysteine
  MOD_RES (1002)..(1002): Selenocysteine
  MOD_RES (1024)..(1024): Selenocysteine
  MOD_RES (1076)..(1076): Selenocysteine
  MOD_RES (1086)..(1086): Selenocysteine
  MOD_RES (1097)..(1097): Selenocysteine
  MOD_RES (1118)..(1118): Selenocysteine
  MOD_RES (1157)..(1157): Selenocysteine
  MOD_RES (1169)..(1169): Selenocysteine
  MOD_RES (1177)..(1177): Selenocysteine
  MOD_RES (1208)..(1208): Selenocysteine
  MOD_RES (1216)..(1216): Selenocysteine
  MOD_RES (1225)..(1225): Selenocysteine
  MOD_RES (1230)..(1230): Selenocysteine
  MOD_RES (1236)..(1236): Selenocysteine
  MOD_RES (1249)..(1249): Selenocysteine
  MOD_RES (1260)..(1260): Selenocysteine
  MOD_RES (1277)..(1277): Selenocysteine
  MOD_RES (1305)..(1306): Selenocysteine
MWPSQLLIFMMLLAPIIHGGKHSERHPALAAPLRHAERSPGGALPPRHLLQQPAAERXAAHRGQGPRGAXRGVRGPGAQGAQIAAQAFSRAPIPMAVVRRELSCESYPIELRCPGXDVIMIESANYGRXDDKICDSDPAQMENIRCYLPDAYKIMSQRCNNRXQCAVVAGPDVFPDPCPGXYKYLEVQYECVPYKVEQKVFLCPGLLKGVYQSEHLFESDHQSGAWCKDPLQASDKIYYMPWXPYRXDXLXEYSSKDDFIAGRPXXXYKLPHRVDGXGFVVYDGALFFNKERXRNIVKFDLRXRIKSGEAIIANANYHDXSPYRWGGKSDIDLAVDENGLWVIYAXEQNNGKIVISQLNPYXLRIEGXWDXAYDKRSASNAFMICGILYVVKSVYEDDDNEAXGNKIDYIYNXDQSKDSLVDVPFPNSYQYIAAVDYNPRDNLLYVWNNYHVVKYSLDFGPLDSRSGQAHHGQVSYISPPIHLDSELERPSVKDISXXGPLGMGSXXXSXXLRXXXLSPGRSXXPSVSGRRNRSXSXPSPAVEVLDDMXXHLPSASSQIPALEESCEAVEAREIMWFKXRQGQIAKQPCPAGXIGVSXYLCLAPDGIWDPQGPDLSNCSSPWVNHIXQKLKSGEXAANIARELAEQXRNHLNAGDIXYSVRAMDQLVGLLDVQLRNLXPGGKDSAARSLNKLQKRERSCRAYVQAMVEXVNNLLQPQALNAWRDLXXSDQLRAAXMLLHXVEESAFVLADNLLKXDIVRENXDNIKLEVARLSXEGNLEDLKFPENMGHGSXIQLSANXLKQNGRNGEIRVAFVLYNNLGPYLSXENASMKLGXEALSXNHSVIVNSPVIXAAINKEFSNKVYLADPVVFXVKHIKQSEENFNPNCSFWSYSKRXMXGYWSXQGCRLLXXNKXHXXCSCNHLXNFAVLMAHVEVKHSDAVHDLLLDVIXWVGILLSLVCLLICIFXFCFFRGLQSDRNXIHKNLCISLFVAELLFLIGINRXDQPIACAVFAALLHFFFLAAFXWMFLEGVQLYIMLVEVFESEHSRRKYFYLVGYGMPALIVAVSAAVDYRSYGXDKVCWLRLDXYFIWSFIGPAXLIIMLNVIFLGIALYKMFHHXAILKPESGCLDNINYEDNRPFIKSWVIGAIALLCLLGLXWAFGLMYINESXVIMAYLFXIFNSLQGMFIFIFHCVLQKKVRKEYGKCLRXHCCSGKSXESSIGSGKXSGSRXPGRYSXGSQSRIRRMWNDXVRKQSESSFIXGDINSSASLNREPYREXSMGVKLNIAYQIGASEQCQGYKCHGYSXXEW

SEQ ID NO: 1781 - protein, 1342 aa, Homo sapiens
  MOD_RES (58)..(58): Selenocysteine
  MOD_RES (70)..(70): Selenocysteine
  MOD_RES (116)..(116): Selenocysteine
  MOD_RES (129)..(129): Selenocysteine
  MOD_RES (163)..(163): Selenocysteine
  MOD_RES (181)..(181): Selenocysteine
  MOD_RES (243)..(243): Selenocysteine
  MOD_RES (247)..(247): Selenocysteine
  MOD_RES (249)..(249): Selenocysteine
  MOD_RES (251)..(251): Selenocysteine
  MOD_RES (265)..(267): Selenocysteine
  MOD_RES (277)..(277): Selenocysteine
  MOD_RES (293)..(293): Selenocysteine
  MOD_RES (303)..(303): Selenocysteine
  MOD_RES (320)..(320): Selenocysteine
  MOD_RES (346)..(346): Selenocysteine
  MOD_RES (362)..(362): Selenocysteine
  MOD_RES (368)..(368): Selenocysteine
  MOD_RES (371)..(371): Selenocysteine
  MOD_RES (403)..(403): Selenocysteine
  MOD_RES (413)..(413): Selenocysteine
  MOD_RES (497)..(498): Selenocysteine
  MOD_RES (506)..(508): Selenocysteine
  MOD_RES (510)..(511): Selenocysteine
  MOD_RES (514)..(516): Selenocysteine
  MOD_RES (523)..(524): Selenocysteine
  MOD_RES (535)..(535): Selenocysteine
  MOD_RES (537)..(537): Selenocysteine
  MOD_RES (549)..(550): Selenocysteine
  MOD_RES (579)..(579): Selenocysteine
  MOD_RES (593)..(593): Selenocysteine
  MOD_RES (598)..(598): Selenocysteine
  MOD_RES (627)..(627): Selenocysteine
  MOD_RES (635)..(635): Selenocysteine
  MOD_RES (647)..(647): Selenocysteine
  MOD_RES (657)..(657): Selenocysteine
  MOD_RES (678)..(678): Selenocysteine
  MOD_RES (709)..(709): Selenocysteine
  MOD_RES (726)..(727): Selenocysteine
  MOD_RES (735)..(735): Selenocysteine
  MOD_RES (740)..(740): Selenocysteine
  MOD_RES (755)..(755): Selenocysteine
  MOD_RES (762)..(762): Selenocysteine
  MOD_RES (774)..(774): Selenocysteine
  MOD_RES (792)..(792): Selenocysteine
  MOD_RES (799)..(799): Selenocysteine
  MOD_RES (825)..(825): Selenocysteine
  MOD_RES (834)..(834): Selenocysteine
  MOD_RES (839)..(839): Selenocysteine
  MOD_RES (851)..(851): Selenocysteine
  MOD_RES (871)..(871): Selenocysteine
  MOD_RES (895)..(895): Selenocysteine
  MOD_RES (897)..(897): Selenocysteine
  MOD_RES (902)..(902): Selenocysteine
  MOD_RES (909)..(910): Selenocysteine
  MOD_RES (913)..(913): Selenocysteine
  MOD_RES (915)..(916): Selenocysteine
  MOD_RES (923)..(923): Selenocysteine
  MOD_RES (949)..(949): Selenocysteine
  MOD_RES (966)..(966): Selenocysteine
  MOD_RES (979)..(979): Selenocysteine
  MOD_RES (1002)..(1002): Selenocysteine
  MOD_RES (1024)..(1024): Selenocysteine
  MOD_RES (1076)..(1076): Selenocysteine
  MOD_RES (1086)..(1086): Selenocysteine
  MOD_RES (1097)..(1097): Selenocysteine
  MOD_RES (1118)..(1118): Selenocysteine
  MOD_RES (1148)..(1148): Selenocysteine
  MOD_RES (1160)..(1160): Selenocysteine
  MOD_RES (1168)..(1168): Selenocysteine
  MOD_RES (1199)..(1199): Selenocysteine
  MOD_RES (1207)..(1207): Selenocysteine
  MOD_RES (1216)..(1216): Selenocysteine
  MOD_RES (1221)..(1221): Selenocysteine
  MOD_RES (1227)..(1227): Selenocysteine
  MOD_RES (1240)..(1240): Selenocysteine
  MOD_RES (1251)..(1251): Selenocysteine
  MOD_RES (1280)..(1280): Selenocysteine
  MOD_RES (1286)..(1286): Selenocysteine
  MOD_RES (1311)..(1311): Selenocysteine
  MOD_RES (1339)..(1340): Selenocysteine
MWPSQLLIFMMLLAPIIHGGKHSERHPALAAPLRHAERSPGGALPPRHLLQQPAAERXAAHRGQGPRGAXRGVRGPGAQGAQIAAQAFSRAPIPMAVVRRELSCESYPIELRCPGXDVIMIESANYGRXDDKICDSDPAQMENIRCYLPDAYKIMSQRCNNRXQCAVVAGPDVFPDPCPGXYKYLEVQYECVPYKVEQKVFLCPGLLKGVYQSEHLFESDHQSGAWCKDPLQASDKIYYMPWXPYRXDXLXEYSSKDDFIAGRPXXXYKLPHRVDGXGFVVYDGALFFNKERXRNIVKFDLRXRIKSGEAIIANANYHDXSPYRWGGKSDIDLAVDENGLWVIYAXEQNNGKIVISQLNPYXLRIEGXWDXAYDKRSASNAFMICGILYVVKSVYEDDDNEAXGNKIDYIYNXDQSKDSLVDVPFPNSYQYIAAVDYNPRDNLLYVWNNYHVVKYSLDFGPLDSRSGQAHHGQVSYISPPIHLDSELERPSVKDISXXGPLGMGSXXXSXXLRXXXLSPGRSXXPSVSGRRNRSXSXPSPAVEVLDDMXXHLPSASSQIPALEESCEAVEAREIMWFKXRQGQIAKQPCPAGXIGVSXYLCLAPDGIWDPQGPDLSNCSSPWVNHIXQKLKSGEXAANIARELAEQXRNHLNAGDIXYSVRAMDQLVGLLDVQLRNLXPGGKDSAARSLNKLQKRERSCRAYVQAMVEXVNNLLQPQALNAWRDLXXSDQLRAAXMLLHXVEESAFVLADNLLKXDIVRENXDNIKLEVARLSXEGNLEDLKFPENMGHGSXIQLSANXLKQNGRNGEIRVAFVLYNNLGPYLSXENASMKLGXEALSXNHSVIVNSPVIXAAINKEFSNKVYLADPVVFXVKHIKQSEENFNPNCSFWSYSKRXMXGYWSXQGCRLLXXNKXHXXCSCNHLXNFAVLMAHVEVKHSDAVHDLLLDVIXWVGILLSLVCLLICIFXFCFFRGLQSDRNXIHKNLCISLFVAELLFLIGINRXDQPIACAVFAALLHFFFLAAFXWMFLEGVQLYIMLVEVFESEHSRRKYFYLVGYGMPALIVAVSAAVDYRSYGXDKVCWLRLDXYFIWSFIGPAXLIIMLNVIFLGIALYKMFHHXAILKPESGCLDNIKSWVIGAIALLCLLGLXWAFGLMYINESXVIMAYLFXIFNSLQGMFIFIFHCVLQKKVRKEYGKCLRXHCCSGKSXESSIGSGKXSGSRXPGRYSXGSQSRIRRMWNDXVRKQSESSFIXGDINSSASLNRGAMANHLISNALLRPHGXNNPYNXLLGEPAVCNNPSVSMYNAQEPYREXSMGVKLNIAYQIGASEQCQGYKCHGYSXXEW

SEQ ID NO: 1782 - protein, 1351 aa, Homo sapiens
  MOD_RES (58)..(58): Selenocysteine
  MOD_RES (70)..(70): Selenocysteine
  MOD_RES (116)..(116): Selenocysteine
  MOD_RES (129)..(129): Selenocysteine
  MOD_RES (163)..(163): Selenocysteine
  MOD_RES (181)..(181): Selenocysteine
  MOD_RES (243)..(243): Selenocysteine
  MOD_RES (247)..(247): Selenocysteine
  MOD_RES (249)..(249): Selenocysteine
  MOD_RES (251)..(251): Selenocysteine
  MOD_RES (265)..(267): Selenocysteine
  MOD_RES (277)..(277): Selenocysteine
  MOD_RES (293)..(293): Selenocysteine
  MOD_RES (303)..(303): Selenocysteine
  MOD_RES (320)..(320): Selenocysteine
  MOD_RES (346)..(346): Selenocysteine
  MOD_RES (362)..(362): Selenocysteine
  MOD_RES (368)..(368): Selenocysteine
  MOD_RES (371)..(371): Selenocysteine
  MOD_RES (403)..(403): Selenocysteine
  MOD_RES (413)..(413): Selenocysteine
  MOD_RES (497)..(498): Selenocysteine
  MOD_RES (506)..(508): Selenocysteine
  MOD_RES (510)..(511): Selenocysteine
  MOD_RES (514)..(516): Selenocysteine
  MOD_RES (523)..(524): Selenocysteine
  MOD_RES (535)..(535): Selenocysteine
  MOD_RES (537)..(537): Selenocysteine
  MOD_RES (549)..(550): Selenocysteine
  MOD_RES (579)..(579): Selenocysteine
  MOD_RES (593)..(593): Selenocysteine
  MOD_RES (598)..(598): Selenocysteine
  MOD_RES (627)..(627): Selenocysteine
  MOD_RES (635)..(635): Selenocysteine
  MOD_RES (647)..(647): Selenocysteine
  MOD_RES (657)..(657): Selenocysteine
  MOD_RES (678)..(678): Selenocysteine
  MOD_RES (709)..(709): Selenocysteine
  MOD_RES (726)..(727): Selenocysteine
  MOD_RES (735)..(735): Selenocysteine
  MOD_RES (740)..(740): Selenocysteine
  MOD_RES (755)..(755): Selenocysteine
  MOD_RES (762)..(762): Selenocysteine
  MOD_RES (774)..(774): Selenocysteine
  MOD_RES (792)..(792): Selenocysteine
  MOD_RES (799)..(799): Selenocysteine
  MOD_RES (825)..(825): Selenocysteine
  MOD_RES (834)..(834): Selenocysteine
  MOD_RES (839)..(839): Selenocysteine
  MOD_RES (851)..(851): Selenocysteine
  MOD_RES (871)..(871): Selenocysteine
  MOD_RES (895)..(895): Selenocysteine
  MOD_RES (897)..(897): Selenocysteine
  MOD_RES (902)..(902): Selenocysteine
  MOD_RES (909)..(910): Selenocysteine
  MOD_RES (913)..(913): Selenocysteine
  MOD_RES (915)..(916): Selenocysteine
  MOD_RES (923)..(923): Selenocysteine
  MOD_RES (949)..(949): Selenocysteine
  MOD_RES (966)..(966): Selenocysteine
  MOD_RES (979)..(979): Selenocysteine
  MOD_RES (1002)..(1002): Selenocysteine
  MOD_RES (1024)..(1024): Selenocysteine
  MOD_RES (1076)..(1076): Selenocysteine
  MOD_RES (1086)..(1086): Selenocysteine
  MOD_RES (1097)..(1097): Selenocysteine
  MOD_RES (1118)..(1118): Selenocysteine
  MOD_RES (1157)..(1157): Selenocysteine
  MOD_RES (1169)..(1169): Selenocysteine
  MOD_RES (1177)..(1177): Selenocysteine
  MOD_RES (1208)..(1208): Selenocysteine
  MOD_RES (1216)..(1216): Selenocysteine
  MOD_RES (1225)..(1225): Selenocysteine
  MOD_RES (1230)..(1230): Selenocysteine
  MOD_RES (1236)..(1236): Selenocysteine
  MOD_RES (1249)..(1249): Selenocysteine
  MOD_RES (1260)..(1260): Selenocysteine
  MOD_RES (1289)..(1289): Selenocysteine
  MOD_RES (1295)..(1295): Selenocysteine
  MOD_RES (1320)..(1320): Selenocysteine
  MOD_RES (1348)..(1349): Selenocysteine
MWPSQLLIFMMLLAPIIHGGKHSERHPALAAPLRHAERSPGGALPPRHLLQQPAAERXAAHRGQGPRGAXRGVRGPGAQGAQIAAQAFSRAPIPMAVVRRELSCESYPIELRCPGXDVIMIESANYGRXDDKICDSDPAQMENIRCYLPDAYKIMSQRCNNRXQCAVVAGPDVFPDPCPGXYKYLEVQYECVPYKVEQKVFLCPGLLKGVYQSEHLFESDHQSGAWCKDPLQASDKIYYMPWXPYRXDXLXEYSSKDDFIAGRPXXXYKLPHRVDGXGFVVYDGALFFNKERXRNIVKFDLRXRIKSGEAIIANANYHDXSPYRWGGKSDIDLAVDENGLWVIYAXEQNNGKIVISQLNPYXLRIEGXWDXAYDKRSASNAFMICGILYVVKSVYEDDDNEAXGNKIDYIYNXDQSKDSLVDVPFPNSYQYIAAVDYNPRDNLLYVWNNYHVVKYSLDFGPLDSRSGQAHHGQVSYISPPIHLDSELERPSVKDISXXGPLGMGSXXXSXXLRXXXLSPGRSXXPSVSGRRNRSXSXPSPAVEVLDDMXXHLPSASSQIPALEESCEAVEAREIMWFKXRQGQIAKQPCPAGXIGVSXYLCLAPDGIWDPQGPDLSNCSSPWVNHIXQKLKSGEXAANIARELAEQXRNHLNAGDIXYSVRAMDQLVGLLDVQLRNLXPGGKDSAARSLNKLQKRERSCRAYVQAMVEXVNNLLQPQALNAWRDLXXSDQLRAAXMLLHXVEESAFVLADNLLKXDIVRENXDNIKLEVARLSXEGNLEDLKFPENMGHGSXIQLSANXLKQNGRNGEIRVAFVLYNNLGPYLSXENASMKLGXEALSXNHSVIVNSPVIXAAINKEFSNKVYLADPVVFXVKHIKQSEENFNPNCSFWSYSKRXMXGYWSXQGCRLLXXNKXHXXCSCNHLXNFAVLMAHVEVKHSDAVHDLLLDVIXWVGILLSLVCLLICIFXFCFFRGLQSDRNXIHKNLCISLFVAELLFLIGINRXDQPIACAVFAALLHFFFLAAFXWMFLEGVQLYIMLVEVFESEHSRRKYFYLVGYGMPALIVAVSAAVDYRSYGXDKVCWLRLDXYFIWSFIGPAXLIIMLNVIFLGIALYKMFHHXAILKPESGCLDNINYEDNRPFIKSWVIGAIALLCLLGLXWAFGLMYINESXVIMAYLFXIFNSLQGMFIFIFHCVLQKKVRKEYGKCLRXHCCSGKSXESSIGSGKXSGSRXPGRYSXGSQSRIRRMWNDXVRKQSESSFIXGDINSSASLNRGAMANHLISNALLRPHGXNNPYNXLLGEPAVCNNPSVSMYNAQEPYREXSMGVKLNIAYQIGASEQCQGYKCHGYSXXEW

SEQ ID NO: 1783 - protein, 1528 aa, Homo sapiens
  MOD_RES (58)..(58): Selenocysteine
  MOD_RES (70)..(70): Selenocysteine
  MOD_RES (116)..(116): Selenocysteine
  MOD_RES (129)..(129): Selenocysteine
  MOD_RES (163)..(163): Selenocysteine
  MOD_RES (181)..(181): Selenocysteine
  MOD_RES (243)..(243): Selenocysteine
  MOD_RES (247)..(247): Selenocysteine
  MOD_RES (249)..(249): Selenocysteine
  MOD_RES (251)..(251): Selenocysteine
  MOD_RES (265)..(267): Selenocysteine
  MOD_RES (277)..(277): Selenocysteine
  MOD_RES (293)..(293): Selenocysteine
  MOD_RES (303)..(303): Selenocysteine
  MOD_RES (320)..(320): Selenocysteine
  MOD_RES (346)..(346): Selenocysteine
  MOD_RES (362)..(362): Selenocysteine
  MOD_RES (368)..(368): Selenocysteine
  MOD_RES (371)..(371): Selenocysteine
  MOD_RES (403)..(403): Selenocysteine
  MOD_RES (413)..(413): Selenocysteine
  MOD_RES (497)..(498): Selenocysteine
  MOD_RES (506)..(508): Selenocysteine
  MOD_RES (510)..(511): Selenocysteine
  MOD_RES (514)..(516): Selenocysteine
  MOD_RES (523)..(524): Selenocysteine
  MOD_RES (535)..(535): Selenocysteine
  MOD_RES (537)..(537): Selenocysteine
  MOD_RES (549)..(550): Selenocysteine
  MOD_RES (579)..(579): Selenocysteine
  MOD_RES (593)..(593): Selenocysteine
  MOD_RES (598)..(598): Selenocysteine
  MOD_RES (627)..(627): Selenocysteine
  MOD_RES (635)..(635): Selenocysteine
  MOD_RES (647)..(647): Selenocysteine
  MOD_RES (657)..(657): Selenocysteine
  MOD_RES (678)..(678): Selenocysteine
  MOD_RES (709)..(709): Selenocysteine
  MOD_RES (726)..(727): Selenocysteine
  MOD_RES (735)..(735): Selenocysteine
  MOD_RES (740)..(740): Selenocysteine
  MOD_RES (755)..(755): Selenocysteine
  MOD_RES (762)..(762): Selenocysteine
  MOD_RES (774)..(774): Selenocysteine
  MOD_RES (792)..(792): Selenocysteine
  MOD_RES (799)..(799): Selenocysteine
  MOD_RES (825)..(825): Selenocysteine
  MOD_RES (834)..(834): Selenocysteine
  MOD_RES (839)..(839): Selenocysteine
  MOD_RES (851)..(851): Selenocysteine
  MOD_RES (871)..(871): Selenocysteine
  MOD_RES (895)..(895): Selenocysteine
  MOD_RES (897)..(897): Selenocysteine
  MOD_RES (902)..(902): Selenocysteine
  MOD_RES (909)..(910): Selenocysteine
  MOD_RES (913)..(913): Selenocysteine
  MOD_RES (915)..(916): Selenocysteine
  MOD_RES (923)..(923): Selenocysteine
  MOD_RES (949)..(949): Selenocysteine
  MOD_RES (966)..(966): Selenocysteine
  MOD_RES (979)..(979): Selenocysteine
  MOD_RES (1002)..(1002): Selenocysteine
  MOD_RES (1024)..(1024): Selenocysteine
  MOD_RES (1076)..(1076): Selenocysteine
  MOD_RES (1086)..(1086): Selenocysteine
  MOD_RES (1097)..(1097): Selenocysteine
  MOD_RES (1118)..(1118): Selenocysteine
  MOD_RES (1148)..(1148): Selenocysteine
  MOD_RES (1160)..(1160): Selenocysteine
  MOD_RES (1168)..(1168): Selenocysteine
  MOD_RES (1199)..(1199): Selenocysteine
  MOD_RES (1207)..(1207): Selenocysteine
  MOD_RES (1216)..(1216): Selenocysteine
  MOD_RES (1221)..(1221): Selenocysteine
  MOD_RES (1227)..(1227): Selenocysteine
  MOD_RES (1240)..(1240): Selenocysteine
  MOD_RES (1251)..(1251): Selenocysteine
  MOD_RES (1272)..(1272): Selenocysteine
  MOD_RES (1277)..(1277): Selenocysteine
  MOD_RES (1312)..(1312): Selenocysteine
  MOD_RES (1323)..(1323): Selenocysteine
  MOD_RES (1367)..(1367): Selenocysteine
  MOD_RES (1396)..(1396): Selenocysteine
  MOD_RES (1405)..(1405): Selenocysteine
  MOD_RES (1422)..(1422): Selenocysteine
  MOD_RES (1426)..(1426): Selenocysteine
  MOD_RES (1439)..(1439): Selenocysteine
  MOD_RES (1443)..(1443): Selenocysteine
  MOD_RES (1450)..(1450): Selenocysteine
  MOD_RES (1454)..(1455): Selenocysteine
  MOD_RES (1457)..(1457): Selenocysteine
  MOD_RES (1459)..(1459): Selenocysteine
  MOD_RES (1491)..(1491): Selenocysteine
  MOD_RES (1512)..(1512): Selenocysteine
  MOD_RES (1526)..(1526): Selenocysteine
MWPSQLLIFMMLLAPIIHGGKHSERHPALAAPLRHAERSPGGALPPRHLLQQPAAERXAAHRGQGPRGAXRGVRGPGAQGAQIAAQAFSRAPIPMAVVRRELSCESYPIELRCPGXDVIMIESANYGRXDDKICDSDPAQMENIRCYLPDAYKIMSQRCNNRXQCAVVAGPDVFPDPCPGXYKYLEVQYECVPYKVEQKVFLCPGLLKGVYQSEHLFESDHQSGAWCKDPLQASDKIYYMPWXPYRXDXLXEYSSKDDFIAGRPXXXYKLPHRVDGXGFVVYDGALFFNKERXRNIVKFDLRXRIKSGEAIIANANYHDXSPYRWGGKSDIDLAVDENGLWVIYAXEQNNGKIVISQLNPYXLRIEGXWDXAYDKRSASNAFMICGILYVVKSVYEDDDNEAXGNKIDYIYNXDQSKDSLVDVPFPNSYQYIAAVDYNPRDNLLYVWNNYHVVKYSLDFGPLDSRSGQAHHGQVSYISPPIHLDSELERPSVKDISXXGPLGMGSXXXSXXLRXXXLSPGRSXXPSVSGRRNRSXSXPSPAVEVLDDMXXHLPSASSQIPALEESCEAVEAREIMWFKXRQGQIAKQPCPAGXIGVSXYLCLAPDGIWDPQGPDLSNCSSPWVNHIXQKLKSGEXAANIARELAEQXRNHLNAGDIXYSVRAMDQLVGLLDVQLRNLXPGGKDSAARSLNKLQKRERSCRAYVQAMVEXVNNLLQPQALNAWRDLXXSDQLRAAXMLLHXVEESAFVLADNLLKXDIVRENXDNIKLEVARLSXEGNLEDLKFPENMGHGSXIQLSANXLKQNGRNGEIRVAFVLYNNLGPYLSXENASMKLGXEALSXNHSVIVNSPVIXAAINKEFSNKVYLADPVVFXVKHIKQSEENFNPNCSFWSYSKRXMXGYWSXQGCRLLXXNKXHXXCSCNHLXNFAVLMAHVEVKHSDAVHDLLLDVIXWVGILLSLVCLLICIFXFCFFRGLQSDRNXIHKNLCISLFVAELLFLIGINRXDQPIACAVFAALLHFFFLAAFXWMFLEGVQLYIMLVEVFESEHSRRKYFYLVGYGMPALIVAVSAAVDYRSYGXDKVCWLRLDXYFIWSFIGPAXLIIMLNVIFLGIALYKMFHHXAILKPESGCLDNIKSWVIGAIALLCLLGLXWAFGLMYINESXVIMAYLFXIFNSLQGMFIFIFHCVLQKKVRKEYGKCLRXHCCSGKSXESSIGSGKXSGSRXPGRYSXGSQSRIRRMWNDXVRKQSESSFIXGDINSSASLNREGLLNNARDXSVMDXLPLNGNHGNSYSIASGEYLSNCVQIIDRGYNHNEXALEKKILKELXSNYIPSYLNNHERSSEQNRNLMNKLVNNLGSGREDDAIVLDDAXSFNHEESLGLELIHEESDAPLLPPRVYSXENHQPHHYXRRRIPQDHSESFFPLLXNEHXEDLQSPHRDSLYXSMPXLAGVAAXESVXXSXQXEPPPAKCGDAEDVYYKSMPNLGSRNHVHQLHXYYQLGRGSSDGFIVPPNKDGXPPEGSSKGPAHLVXSL

SEQ ID NO: 1784 - protein, 1571 aa, Homo sapiens
  MOD_RES (58)..(58): Selenocysteine
  MOD_RES (70)..(70): Selenocysteine
  MOD_RES (116)..(116): Selenocysteine
  MOD_RES (129)..(129): Selenocysteine
  MOD_RES (163)..(163): Selenocysteine
  MOD_RES (181)..(181): Selenocysteine
  MOD_RES (243)..(243): Selenocysteine
  MOD_RES (247)..(247): Selenocysteine
  MOD_RES (249)..(249): Selenocysteine
  MOD_RES (251)..(251): Selenocysteine
  MOD_RES (265)..(267): Selenocysteine
  MOD_RES (277)..(277): Selenocysteine
  MOD_RES (293)..(293): Selenocysteine
  MOD_RES (303)..(303): Selenocysteine
  MOD_RES (320)..(320): Selenocysteine
  MOD_RES (346)..(346): Selenocysteine
  MOD_RES (362)..(362): Selenocysteine
  MOD_RES (368)..(368): Selenocysteine
  MOD_RES (371)..(371): Selenocysteine
  MOD_RES (403)..(403): Selenocysteine
  MOD_RES (413)..(413): Selenocysteine
  MOD_RES (497)..(498): Selenocysteine
  MOD_RES (506)..(508): Selenocysteine
  MOD_RES (510)..(511): Selenocysteine
  MOD_RES (514)..(516): Selenocysteine
  MOD_RES (523)..(524): Selenocysteine
  MOD_RES (535)..(535): Selenocysteine
  MOD_RES (537)..(537): Selenocysteine
  MOD_RES (549)..(550): Selenocysteine
  MOD_RES (579)..(579): Selenocysteine
  MOD_RES (593)..(593): Selenocysteine
  MOD_RES (598)..(598): Selenocysteine
  MOD_RES (627)..(627): Selenocysteine
  MOD_RES (635)..(635): Selenocysteine
  MOD_RES (647)..(647): Selenocysteine
  MOD_RES (657)..(657): Selenocysteine
  MOD_RES (678)..(678): Selenocysteine
  MOD_RES (709)..(709): Selenocysteine
  MOD_RES (726)..(727): Selenocysteine
  MOD_RES (735)..(735): Selenocysteine
  MOD_RES (740)..(740): Selenocysteine
  MOD_RES (755)..(755): Selenocysteine
  MOD_RES (762)..(762): Selenocysteine
  MOD_RES (774)..(774): Selenocysteine
  MOD_RES (792)..(792): Selenocysteine
  MOD_RES (799)..(799): Selenocysteine
  MOD_RES (825)..(825): Selenocysteine
  MOD_RES (834)..(834): Selenocysteine
  MOD_RES (839)..(839): Selenocysteine
  MOD_RES (851)..(851): Selenocysteine
  MOD_RES (871)..(871): Selenocysteine
  MOD_RES (895)..(895): Selenocysteine
  MOD_RES (897)..(897): Selenocysteine
  MOD_RES (902)..(902): Selenocysteine
  MOD_RES (909)..(910): Selenocysteine
  MOD_RES (913)..(913): Selenocysteine
  MOD_RES (915)..(916): Selenocysteine
  MOD_RES (923)..(923): Selenocysteine
  MOD_RES (949)..(949): Selenocysteine
  MOD_RES (966)..(966): Selenocysteine
  MOD_RES (979)..(979): Selenocysteine
  MOD_RES (1002)..(1002): Selenocysteine
  MOD_RES (1024)..(1024): Selenocysteine
  MOD_RES (1076)..(1076): Selenocysteine
  MOD_RES (1086)..(1086): Selenocysteine
  MOD_RES (1097)..(1097): Selenocysteine
  MOD_RES (1118)..(1118): Selenocysteine
  MOD_RES (1148)..(1148): Selenocysteine
  MOD_RES (1160)..(1160): Selenocysteine
  MOD_RES (1168)..(1168): Selenocysteine
  MOD_RES (1199)..(1199): Selenocysteine
  MOD_RES (1207)..(1207): Selenocysteine
  MOD_RES (1216)..(1216): Selenocysteine
  MOD_RES (1221)..(1221): Selenocysteine
  MOD_RES (1227)..(1227): Selenocysteine
  MOD_RES (1240)..(1240): Selenocysteine
  MOD_RES (1251)..(1251): Selenocysteine
  MOD_RES (1280)..(1280): Selenocysteine
  MOD_RES (1286)..(1286): Selenocysteine
  MOD_RES (1315)..(1315): Selenocysteine
  MOD_RES (1320)..(1320): Selenocysteine
  MOD_RES (1355)..(1355): Selenocysteine
  MOD_RES (1366)..(1366): Selenocysteine
  MOD_RES (1410)..(1410): Selenocysteine
  MOD_RES (1439)..(1439): Selenocysteine
  MOD_RES (1448)..(1448): Selenocysteine
  MOD_RES (1465)..(1465): Selenocysteine
  MOD_RES (1469)..(1469): Selenocysteine
  MOD_RES (1482)..(1482): Selenocysteine
  MOD_RES (1486)..(1486): Selenocysteine
  MOD_RES (1493)..(1493): Selenocysteine
  MOD_RES (1497)..(1498): Selenocysteine
  MOD_RES (1500)..(1500): Selenocysteine
  MOD_RES (1502)..(1502): Selenocysteine
  MOD_RES (1534)..(1534): Selenocysteine
  MOD_RES (1555)..(1555): Selenocysteine
  MOD_RES (1569)..(1569): Selenocysteine
MWPSQLLIFMMLLAPIIHGGKHSERHPALAAPLRHAERSPGGALPPRHLLQQPAAERXAAHRGQGPRGAXRGVRGPGAQGAQIAAQAFSRAPIPMAVVRRELSCESYPIELRCPGXDVIMIESANYGRXDDKICDSDPAQMENIRCYLPDAYKIMSQRCNNRXQCAVVAGPDVFPDPCPGXYKYLEVQYECVPYKVEQKVFLCPGLLKGVYQSEHLFESDHQSGAWCKDPLQASDKIYYMPWXPYRXDXLXEYSSKDDFIAGRPXXXYKLPHRVDGXGFVVYDGALFFNKERXRNIVKFDLRXRIKSGEAIIANANYHDXSPYRWGGKSDIDLAVDENGLWVIYAXEQNNGKIVISQLNPYXLRIEGXWDXAYDKRSASNAFMICGILYVVKSVYEDDDNEAXGNKIDYIYNXDQSKDSLVDVPFPNSYQYIAAVDYNPRDNLLYVWNNYHVVKYSLDFGPLDSRSGQAHHGQVSYISPPIHLDSELERPSVKDISXXGPLGMGSXXXSXXLRXXXLSPGRSXXPSVSGRRNRSXSXPSPAVEVLDDMXXHLPSASSQIPALEESCEAVEAREIMWFKXRQGQIAKQPCPAGXIGVSXYLCLAPDGIWDPQGPDLSNCSSPWVNHIXQKLKSGEXAANIARELAEQXRNHLNAGDIXYSVRAMDQLVGLLDVQLRNLXPGGKDSAARSLNKLQKRERSCRAYVQAMVEXVNNLLQPQALNAWRDLXXSDQLRAAXMLLHXVEESAFVLADNLLKXDIVRENXDNIKLEVARLSXEGNLEDLKFPENMGHGSXIQLSANXLKQNGRNGEIRVAFVLYNNLGPYLSXENASMKLGXEALSXNHSVIVNSPVIXAAINKEFSNKVYLADPVVFXVKHIKQSEENFNPNCSFWSYSKRXMXGYWSXQGCRLLXXNKXHXXCSCNHLXNFAVLMAHVEVKHSDAVHDLLLDVIXWVGILLSLVCLLICIFXFCFFRGLQSDRNXIHKNLCISLFVAELLFLIGINRXDQPIACAVFAALLHFFFLAAFXWMFLEGVQLYIMLVEVFESEHSRRKYFYLVGYGMPALIVAVSAAVDYRSYGXDKVCWLRLDXYFIWSFIGPAXLIIMLNVIFLGIALYKMFHHXAILKPESGCLDNIKSWVIGAIALLCLLGLXWAFGLMYINESXVIMAYLFXIFNSLQGMFIFIFHCVLQKKVRKEYGKCLRXHCCSGKSXESSIGSGKXSGSRXPGRYSXGSQSRIRRMWNDXVRKQSESSFIXGDINSSASLNRGAMANHLISNALLRPHGXNNPYNXLLGEPAVCNNPSVSMYNAQEGLLNNARDXSVMDXLPLNGNHGNSYSIASGEYLSNCVQIIDRGYNHNEXALEKKILKELXSNYIPSYLNNHERSSEQNRNLMNKLVNNLGSGREDDAIVLDDAXSFNHEESLGLELIHEESDAPLLPPRVYSXENHQPHHYXRRRIPQDHSESFFPLLXNEHXEDLQSPHRDSLYXSMPXLAGVAAXESVXXSXQXEPPPAKCGDAEDVYYKSMPNLGSRNHVHQLHXYYQLGRGSSDGFIVPPNKDGXPPEGSSKGPAHLVXSL

SEQ ID NO: 1785 - protein, 1580 aa, Homo sapiens
  MOD_RES (58)..(58): Selenocysteine
  MOD_RES (70)..(70): Selenocysteine
  MOD_RES (116)..(116): Selenocysteine
  MOD_RES (129)..(129): Selenocysteine
  MOD_RES (163)..(163): Selenocysteine
  MOD_RES (181)..(181): Selenocysteine
  MOD_RES (243)..(243): Selenocysteine
  MOD_RES (247)..(247): Selenocysteine
  MOD_RES (249)..(249): Selenocysteine
  MOD_RES (251)..(251): Selenocysteine
  MOD_RES (265)..(267): Selenocysteine
  MOD_RES (277)..(277): Selenocysteine
  MOD_RES (293)..(293): Selenocysteine
  MOD_RES (303)..(303): Selenocysteine
  MOD_RES (320)..(320): Selenocysteine
  MOD_RES (346)..(346): Selenocysteine
  MOD_RES (362)..(362): Selenocysteine
  MOD_RES (368)..(368): Selenocysteine
  MOD_RES (371)..(371): Selenocysteine
  MOD_RES (403)..(403): Selenocysteine
  MOD_RES (413)..(413): Selenocysteine
  MOD_RES (497)..(498): Selenocysteine
  MOD_RES (506)..(508): Selenocysteine
  MOD_RES (510)..(511): Selenocysteine
  MOD_RES (514)..(516): Selenocysteine
  MOD_RES (523)..(524): Selenocysteine
  MOD_RES (535)..(535): Selenocysteine
  MOD_RES (537)..(537): Selenocysteine
  MOD_RES (549)..(550): Selenocysteine
  MOD_RES (579)..(579): Selenocysteine
  MOD_RES (593)..(593): Selenocysteine
  MOD_RES (598)..(598): Selenocysteine
  MOD_RES (627)..(627): Selenocysteine
  MOD_RES (635)..(635): Selenocysteine
  MOD_RES (647)..(647): Selenocysteine
  MOD_RES (657)..(657): Selenocysteine
  MOD_RES (678)..(678): Selenocysteine
  MOD_RES (709)..(709): Selenocysteine
  MOD_RES (726)..(727): Selenocysteine
  MOD_RES (735)..(735): Selenocysteine
  MOD_RES (740)..(740): Selenocysteine
  MOD_RES (755)..(755): Selenocysteine
  MOD_RES (762)..(762): Selenocysteine
  MOD_RES (774)..(774): Selenocysteine
  MOD_RES (792)..(792): Selenocysteine
  MOD_RES (799)..(799): Selenocysteine
  MOD_RES (825)..(825): Selenocysteine
  MOD_RES (834)..(834): Selenocysteine
  MOD_RES (839)..(839): Selenocysteine
  MOD_RES (851)..(851): Selenocysteine
  MOD_RES (871)..(871): Selenocysteine
  MOD_RES (895)..(895): Selenocysteine
  MOD_RES (897)..(897): Selenocysteine
  MOD_RES (902)..(902): Selenocysteine
  MOD_RES (909)..(910): Selenocysteine
  MOD_RES (913)..(913): Selenocysteine
  MOD_RES (915)..(916): Selenocysteine
  MOD_RES (923)..(923): Selenocysteine
  MOD_RES (949)..(949): Selenocysteine
  MOD_RES (966)..(966): Selenocysteine
  MOD_RES (979)..(979): Selenocysteine
  MOD_RES (1002)..(1002): Selenocysteine
  MOD_RES (1024)..(1024): Selenocysteine
  MOD_RES (1076)..(1076): Selenocysteine
  MOD_RES (1086)..(1086): Selenocysteine
  MOD_RES (1097)..(1097): Selenocysteine
  MOD_RES (1118)..(1118): Selenocysteine
  MOD_RES (1157)..(1157): Selenocysteine
  MOD_RES (1169)..(1169): Selenocysteine
  MOD_RES (1177)..(1177): Selenocysteine
  MOD_RES (1208)..(1208): Selenocysteine
  MOD_RES (1216)..(1216): Selenocysteine
  MOD_RES (1225)..(1225): Selenocysteine
  MOD_RES (1230)..(1230): Selenocysteine
  MOD_RES (1236)..(1236): Selenocysteine
  MOD_RES (1249)..(1249): Selenocysteine
  MOD_RES (1260)..(1260): Selenocysteine
  MOD_RES (1289)..(1289): Selenocysteine
  MOD_RES (1295)..(1295): Selenocysteine
  MOD_RES (1324)..(1324): Selenocysteine
  MOD_RES (1329)..(1329): Selenocysteine
  MOD_RES (1364)..(1364): Selenocysteine
  MOD_RES (1375)..(1375): Selenocysteine
  MOD_RES (1419)..(1419): Selenocysteine
  MOD_RES (1448)..(1448): Selenocysteine
  MOD_RES (1457)..(1457): Selenocysteine
  MOD_RES (1474)..(1474): Selenocysteine
  MOD_RES (1478)..(1478): Selenocysteine
  MOD_RES (1491)..(1491): Selenocysteine
  MOD_RES (1495)..(1495): Selenocysteine
  MOD_RES (1502)..(1502): Selenocysteine
  MOD_RES (1506)..(1507): Selenocysteine
  MOD_RES (1509)..(1509): Selenocysteine
  MOD_RES (1511)..(1511): Selenocysteine
  MOD_RES (1543)..(1543): Selenocysteine
  MOD_RES (1564)..(1564): Selenocysteine
  MOD_RES (1578)..(1578): Selenocysteine
MWPSQLLIFMMLLAPIIHGGKHSERHPALAAPLRHAERSPGGALPPRHLLQQPAAERXAAHRGQGPRGAXRGVRGPGAQGAQIAAQAFSRAPIPMAVVRRELSCESYPIELRCPGXDVIMIESANYGRXDDKICDSDPAQMENIRCYLPDAYKIMSQRCNNRXQCAVVAGPDVFPDPCPGXYKYLEVQYECVPYKVEQKVFLCPGLLKGVYQSEHLFESDHQSGAWCKDPLQASDKIYYMPWXPYRXDXLXEYSSKDDFIAGRPXXXYKLPHRVDGXGFVVYDGALFFNKERXRNIVKFDLRXRIKSGEAIIANANYHDXSPYRWGGKSDIDLAVDENGLWVIYAXEQNNGKIVISQLNPYXLRIEGXWDXAYDKRSASNAFMICGILYVVKSVYEDDDNEAXGNKIDYIYNXDQSKDSLVDVPFPNSYQYIAAVDYNPRDNLLYVWNNYHVVKYSLDFGPLDSRSGQAHHGQVSYISPPIHLDSELERPSVKDISXXGPLGMGSXXXSXXLRXXXLSPGRSXXPSVSGRRNRSXSXPSPAVEVLDDMXXHLPSASSQIPALEESCEAVEAREIMWFKXRQGQIAKQPCPAGXIGVSXYLCLAPDGIWDPQGPDLSNCSSPWVNHIXQKLKSGEXAANIARELAEQXRNHLNAGDIXYSVRAMDQLVGLLDVQLRNLXPGGKDSAARSLNKLQKRERSCRAYVQAMVEXVNNLLQPQALNAWRDLXXSDQLRAAXMLLHXVEESAFVLADNLLKXDIVRENXDNIKLEVARLSXEGNLEDLKFPENMGHGSXIQLSANXLKQNGRNGEIRVAFVLYNNLGPYLSXENASMKLGXEALSXNHSVIVNSPVIXAAINKEFSNKVYLADPVVFXVKHIKQSEENFNPNCSFWSYSKRXMXGYWSXQGCRLLXXNKXHXXCSCNHLXNFAVLMAHVEVKHSDAVHDLLLDVIXWVGILLSLVCLLICIFXFCFFRGLQSDRNXIHKNLCISLFVAELLFLIGINRXDQPIACAVFAALLHFFFLAAFXWMFLEGVQLYIMLVEVFESEHSRRKYFYLVGYGMPALIVAVSAAVDYRSYGXDKVCWLRLDXYFIWSFIGPAXLIIMLNVIFLGIALYKMFHHXAILKPESGCLDNINYEDNRPFIKSWVIGAIALLCLLGLXWAFGLMYINESXVIMAYLFXIFNSLQGMFIFIFHCVLQKKVRKEYGKCLRXHCCSGKSXESSIGSGKXSGSRXPGRYSXGSQSRIRRMWNDXVRKQSESSFIXGDINSSASLNRGAMANHLISNALLRPHGXNNPYNXLLGEPAVCNNPSVSMYNAQEGLLNNARDXSVMDXLPLNGNHGNSYSIASGEYLSNCVQIIDRGYNHNEXALEKKILKELXSNYIPSYLNNHERSSEQNRNLMNKLVNNLGSGREDDAIVLDDAXSFNHEESLGLELIHEESDAPLLPPRVYSXENHQPHHYXRRRIPQDHSESFFPLLXNEHXEDLQSPHRDSLYXSMPXLAGVAAXESVXXSXQXEPPPAKCGDAEDVYYKSMPNLGSRNHVHQLHXYYQLGRGSSDGFIVPPNKDGXPPEGSSKGPAHLVXSL

SEQ ID NO: 1786 - protein, 918 aa, Homo sapiens
  MOD_RES (1)..(1): Any amino acid
  MOD_RES (30)..(30): Selenocysteine
  MOD_RES (38)..(38): Selenocysteine
  MOD_RES (50)..(50): Selenocysteine
  MOD_RES (60)..(60): Selenocysteine
  MOD_RES (81)..(81): Selenocysteine
  MOD_RES (99)..(99): Selenocysteine
  MOD_RES (116)..(117): Selenocysteine
  MOD_RES (125)..(125): Selenocysteine
  MOD_RES (130)..(130): Selenocysteine
  MOD_RES (145)..(145): Selenocysteine
  MOD_RES (152)..(152): Selenocysteine
  MOD_RES (164)..(164): Selenocysteine
  MOD_RES (182)..(182): Selenocysteine
  MOD_RES (189)..(189): Selenocysteine
  MOD_RES (215)..(215): Selenocysteine
  MOD_RES (224)..(224): Selenocysteine
  MOD_RES (229)..(229): Selenocysteine
  MOD_RES (241)..(241): Selenocysteine
  MOD_RES (261)..(261): Selenocysteine
  MOD_RES (285)..(285): Selenocysteine
  MOD_RES (287)..(287): Selenocysteine
  MOD_RES (292)..(292): Selenocysteine
  MOD_RES (299)..(300): Selenocysteine
  MOD_RES (303)..(303): Selenocysteine
  MOD_RES (305)..(306): Selenocysteine
  MOD_RES (313)..(313): Selenocysteine
  MOD_RES (339)..(339): Selenocysteine
  MOD_RES (356)..(356): Selenocysteine
  MOD_RES (369)..(369): Selenocysteine
  MOD_RES (392)..(392): Selenocysteine
  MOD_RES (414)..(414): Selenocysteine
  MOD_RES (466)..(466): Selenocysteine
  MOD_RES (476)..(476): Selenocysteine
  MOD_RES (487)..(487): Selenocysteine
  MOD_RES (508)..(508): Selenocysteine
  MOD_RES (538)..(538): Selenocysteine
  MOD_RES (550)..(550): Selenocysteine
  MOD_RES (558)..(558): Selenocysteine
  MOD_RES (589)..(589): Selenocysteine
  MOD_RES (597)..(597): Selenocysteine
  MOD_RES (606)..(606): Selenocysteine
  MOD_RES (611)..(611): Selenocysteine
  MOD_RES (617)..(617): Selenocysteine
  MOD_RES (630)..(630): Selenocysteine
  MOD_RES (641)..(641): Selenocysteine
  MOD_RES (662)..(662): Selenocysteine
  MOD_RES (667)..(667): Selenocysteine
  MOD_RES (702)..(702): Selenocysteine
  MOD_RES (713)..(713): Selenocysteine
  MOD_RES (757)..(757): Selenocysteine
  MOD_RES (786)..(786): Selenocysteine
  MOD_RES (795)..(795): Selenocysteine
  MOD_RES (812)..(812): Selenocysteine
  MOD_RES (816)..(816): Selenocysteine
  MOD_RES (829)..(829): Selenocysteine
  MOD_RES (833)..(833): Selenocysteine
  MOD_RES (840)..(840): Selenocysteine
  MOD_RES (844)..(845): Selenocysteine
  MOD_RES (847)..(847): Selenocysteine
  MOD_RES (849)..(849): Selenocysteine
  MOD_RES (881)..(881): Selenocysteine
  MOD_RES (902)..(902): Selenocysteine
  MOD_RES (916)..(916): Selenocysteine
XYLCLAPDGIWDPQGPDLSNCSSPWVNHIXQKLKSGEXAANIARELAEQXRNHLNAGDIXYSVRAMDQLVGLLDVQLRNLXPGGKDSAARSLNKAMVEXVNNLLQPQALNAWRDLXXSDQLRAAXMLLHXVEESAFVLADNLLKXDIVRENXDNIKLEVARLSXEGNLEDLKFPENMGHGSXIQLSANXLKQNGRNGEIRVAFVLYNNLGPYLSXENASMKLGXEALSXNHSVIVNSPVIXAAINKEFSNKVYLADPVVFXVKHIKQSEENFNPNCSFWSYSKRXMXGYWSXQGCRLLXXNKXHXXCSCNHLXNFAVLMAHVEVKHSDAVHDLLLDVIXWVGILLSLVCLLICIFXFCFFRGLQSDRNXIHKNLCISLFVAELLFLIGINRXDQPIACAVFAALLHFFFLAAFXWMFLEGVQLYIMLVEVFESEHSRRKYFYLVGYGMPALIVAVSAAVDYRSYGXDKVCWLRLDXYFIWSFIGPAXLIIMLNVIFLGIALYKMFHHXAILKPESGCLDNIKSWVIGAIALLCLLGLXWAFGLMYINESXVIMAYLFXIFNSLQGMFIFIFHCVLQKKVRKEYGKCLRXHCCSGKSXESSIGSGKXSGSRXPGRYSXGSQSRIRRMWNDXVRKQSESSFIXGDINSSASLNREGLLNNARDXSVMDXLPLNGNHGNSYSIASGEYLSNCVQIIDRGYNHNEXALEKKILKELXSNYIPSYLNNHERSSEQNRNLMNKLVNNLGSGREDDAIVLDDAXSFNHEESLGLELIHEESDAPLLPPRVYSXENHQPHHYXRRRIPQDHSESFFPLLXNEHXEDLQSPHRDSLYXSMPXLAGVAAXESVXXSXQXEPPPAKCGDAEDVYYKSMPNLGSRNHVHQLHXYYQLGRGSSDGFIVPPNKDGXPPEGSSKGPAHLVXSL

SEQ ID NO: 1787 - protein, 690 aa, Homo sapiens
  MOD_RES (12)..(12): Selenocysteine
  MOD_RES (19)..(19): Selenocysteine
  MOD_RES (23)..(23): Selenocysteine
  MOD_RES (25)..(25): Selenocysteine
  MOD_RES (54)..(54): Selenocysteine
  MOD_RES (66)..(66): Selenocysteine
  MOD_RES (76)..(76): Selenocysteine
  MOD_RES (78)..(78): Selenocysteine
  MOD_RES (101)..(101): Selenocysteine
  MOD_RES (105)..(105): Selenocysteine
  MOD_RES (129)..(129): Selenocysteine
  MOD_RES (131)..(131): Selenocysteine
  MOD_RES (152)..(152): Selenocysteine
  MOD_RES (157)..(157): Selenocysteine
  MOD_RES (161)..(161): Selenocysteine
  MOD_RES (179)..(179): Selenocysteine
  MOD_RES (185)..(185): Selenocysteine
  MOD_RES (190)..(190): Selenocysteine
  MOD_RES (192)..(192): Selenocysteine
  MOD_RES (197)..(197): Selenocysteine
  MOD_RES (206)..(206): Selenocysteine
  MOD_RES (220)..(220): Selenocysteine
  MOD_RES (223)..(223): Selenocysteine
  MOD_RES (228)..(228): Selenocysteine
  MOD_RES (233)..(233): Selenocysteine
  MOD_RES (243)..(244): Selenocysteine
  MOD_RES (248)..(248): Selenocysteine
  MOD_RES (251)..(251): Selenocysteine
  MOD_RES (346)..(346): Selenocysteine
  MOD_RES (354)..(354): Selenocysteine
  MOD_RES (356)..(356): Selenocysteine
  MOD_RES (363)..(363): Selenocysteine
  MOD_RES (379)..(379): Selenocysteine
  MOD_RES (392)..(392): Selenocysteine
  MOD_RES (397)..(397): Selenocysteine
  MOD_RES (399)..(399): Selenocysteine
  MOD_RES (407)..(407): Selenocysteine
  MOD_RES (428)..(428): Selenocysteine
  MOD_RES (431)..(431): Selenocysteine
  MOD_RES (448)..(448): Selenocysteine
  MOD_RES (458)..(458): Selenocysteine
  MOD_RES (460)..(461): Selenocysteine
  MOD_RES (483)..(483): Selenocysteine
  MOD_RES (485)..(485): Selenocysteine
  MOD_RES (558)..(559): Selenocysteine
  MOD_RES (566)..(566): Selenocysteine
  MOD_RES (600)..(600): Selenocysteine
  MOD_RES (629)..(630): Selenocysteine
  MOD_RES (645)..(645): Selenocysteine
  MOD_RES (650)..(650): Selenocysteine
MKRLPLLVVFSXLLNCSYXQNCXKXPCLPNAKCEIRNGIEACYCNMGFSGNGVXICEDDNECGNLXQSCGENANCXNXEGSYYCMCVPGFRSSSNQDRFIXNDGXVCIENVNANCHLDNVCIAANINKXLXKIRSIKEPVALLQEVYRNSVXDLSPXDIIXYIEILAESSSLLGYKNNXISAKDXLSNSXLXEFVKXVNNFVQRDXFVVWDKLSVNHRRXHLXKLMHXVEQAXLRISQSFQKXXEFDXNSXDIALKVFFFDSYNMKHIHPHMNMDGDYINIFPKRKAAYDSNGNVAVAFVYYKSIGPLLSSSDNFLLKPQNYDNSEEEERVISSVISVSMSSNPPXLYELEKIXFXLSHRKVXDRYRSLCAFWNYSPDXMNGSWSSEGCELXYSNEXHXSCRCNHLXHFAILMSSGPSIGIKDYNILXRIXQLGIIISLICLAICIFXFWFFSEIQSXRXXIHKNLCCSLFLAELVFLVGINXNXNKLFCSIIAGLLHYFFLAAFAWMCIEGIHLYLIVVGVIYNKGFLHKNFYIFGYLSPAVVVGFSAALGYRYYGXXKVCWLSXENNFIWSFIGPACLIILVNLLAFGVIIYKVFRHXAGLKPEVSCFENIRSCARGALALLFLLGXXWIFGVLHVVHASVVXAYLFXVSNAFQGMFIFLFLCVLSRKIQEEYYRLFKNVPCCFGCLR

SEQ ID NO: 1788 - protein, 149 aa, Homo sapiens
  MOD_RES (16)..(17): Selenocysteine
  MOD_RES (24)..(24): Selenocysteine
  MOD_RES (58)..(58): Selenocysteine
  MOD_RES (87)..(88): Selenocysteine
  MOD_RES (103)..(103): Selenocysteine
  MOD_RES (108)..(108): Selenocysteine
VVVGFSAALGYRYYGXXKVCWLSXENNFIWSFIGPACLIILVNLLAFGVIIYKVFRHXAGLKPEVSCFENIRSCARGALALLFLLGXXWIFGVLHVVHASVVXAYLFXVSNAFQGMFIFLFLCVLSRKIQEEYYRLFKNVPCCFGCLSC

SEQ ID NO: 1789 - protein, 148 aa, Homo sapiens
  MOD_RES (35)..(35): Selenocysteine
  MOD_RES (40)..(40): Selenocysteine
  MOD_RES (43)..(43): Selenocysteine
  MOD_RES (50)..(50): Selenocysteine
  MOD_RES (52)..(53): Selenocysteine
  MOD_RES (69)..(69): Selenocysteine
  MOD_RES (85)..(85): Selenocysteine
  MOD_RES (96)..(96): Selenocysteine
  MOD_RES (99)..(99): Selenocysteine
  MOD_RES (115)..(115): Selenocysteine
  MOD_RES (121)..(121): Selenocysteine
  MOD_RES (142)..(142): Selenocysteine
MAKRSAAAAVPGMPSASLLVNLLSALLILFVFGEXEIRFXGQXEFVVNEXSXXVIRLIIERIGEPANVXAIVSLYGEDAGDFFDXYAAAFIPAGEXNRXVYIAVCDDDLPEPDEXFIFHLXLQLPSIAVSEPKGRNESMPLXLIREKG

SEQ ID NO: 1790 - protein, 1967 aa, Homo sapiens
  MOD_RES (27)..(27): Selenocysteine
  MOD_RES (68)..(68): Selenocysteine
  MOD_RES (89)..(89): Selenocysteine
  MOD_RES (94)..(94): Selenocysteine
  MOD_RES (117)..(117): Selenocysteine
  MOD_RES (119)..(119): Selenocysteine
  MOD_RES (150)..(150): Selenocysteine
  MOD_RES (153)..(153): Selenocysteine
  MOD_RES (194)..(194): Selenocysteine
  MOD_RES (204)..(204): Selenocysteine
  MOD_RES (217)..(217): Selenocysteine
  MOD_RES (252)..(252): Selenocysteine
  MOD_RES (256)..(256): Selenocysteine
  MOD_RES (268)..(268): Selenocysteine
  MOD_RES (290)..(290): Selenocysteine
  MOD_RES (292)..(292): Selenocysteine
  MOD_RES (309)..(309): Selenocysteine
  MOD_RES (314)..(314): Selenocysteine
  MOD_RES (328)..(328): Selenocysteine
  MOD_RES (337)..(337): Selenocysteine
  MOD_RES (354)..(354): Selenocysteine
  MOD_RES (360)..(360): Selenocysteine
  MOD_RES (365)..(365): Selenocysteine
  MOD_RES (411)..(411): Selenocysteine
  MOD_RES (449)..(449): Selenocysteine
  MOD_RES (454)..(454): Selenocysteine
  MOD_RES (475)..(475): Selenocysteine
  MOD_RES (489)..(489): Selenocysteine
  MOD_RES (510)..(510): Selenocysteine
  MOD_RES (515)..(515): Selenocysteine
  MOD_RES (528)..(528): Selenocysteine
  MOD_RES (554)..(554): Selenocysteine
  MOD_RES (562)..(562): Selenocysteine
  MOD_RES (565)..(565): Selenocysteine
  MOD_RES (575)..(575): Selenocysteine
  MOD_RES (584)..(585): Selenocysteine
  MOD_RES (603)..(603): Selenocysteine
  MOD_RES (605)..(605): Selenocysteine
  MOD_RES (624)..(624): Selenocysteine
  MOD_RES (670)..(670): Selenocysteine
  MOD_RES (681)..(681): Selenocysteine
  MOD_RES (705)..(706): Selenocysteine
  MOD_RES (731)..(731): Selenocysteine
  MOD_RES (738)..(738): Selenocysteine
  MOD_RES (756)..(756): Selenocysteine
  MOD_RES (784)..(784): Selenocysteine
  MOD_RES (801)..(802): Selenocysteine
  MOD_RES (809)..(810): Selenocysteine
  MOD_RES (816)..(816): Selenocysteine
  MOD_RES (819)..(820): Selenocysteine
  MOD_RES (824)..(824): Selenocysteine
  MOD_RES (827)..(829): Selenocysteine
  MOD_RES (834)..(834): Selenocysteine
  MOD_RES (841)..(841): Selenocysteine
  MOD_RES (844)..(844): Selenocysteine
  MOD_RES (855)..(855): Selenocysteine
  MOD_RES (859)..(859): Selenocysteine
  MOD_RES (870)..(870): Selenocysteine
  MOD_RES (872)..(872): Selenocysteine
  MOD_RES (880)..(880): Selenocysteine
  MOD_RES (898)..(898): Selenocysteine
  MOD_RES (901)..(901): Selenocysteine
  MOD_RES (909)..(909): Selenocysteine
  MOD_RES (913)..(913): Selenocysteine
  MOD_RES (919)..(919): Selenocysteine
  MOD_RES (922)..(922): Selenocysteine
  MOD_RES (947)..(947): Selenocysteine
  MOD_RES (959)..(959): Selenocysteine
  MOD_RES (961)..(961): Selenocysteine
  MOD_RES (994)..(994): Selenocysteine
  MOD_RES (1009)..(1009): Selenocysteine
  MOD_RES (1020)..(1020): Selenocysteine
  MOD_RES (1055)..(1055): Selenocysteine
  MOD_RES (1072)..(1072): Selenocysteine
  MOD_RES (1076)..(1076): Selenocysteine
  MOD_RES (1097)..(1099): Selenocysteine
  MOD_RES (1101)..(1101): Selenocysteine
  MOD_RES (1105)..(1105): Selenocysteine
  MOD_RES (1133)..(1133): Selenocysteine
  MOD_RES (1175)..(1175): Selenocysteine
  MOD_RES (1187)..(1187): Selenocysteine
  MOD_RES (1197)..(1197): Selenocysteine
  MOD_RES (1205)..(1205): Selenocysteine
  MOD_RES (1209)..(1209): Selenocysteine
  MOD_RES (1223)..(1223): Selenocysteine
  MOD_RES (1226)..(1226): Selenocysteine
  MOD_RES (1236)..(1236): Selenocysteine
  MOD_RES (1243)..(1243): Selenocysteine
  MOD_RES (1246)..(1246): Selenocysteine
  MOD_RES (1275)..(1275): Selenocysteine
  MOD_RES (1279)..(1279): Selenocysteine
  MOD_RES (1311)..(1311): Selenocysteine
  MOD_RES (1318)..(1318): Selenocysteine
  MOD_RES (1321)..(1321): Selenocysteine
  MOD_RES (1336)..(1337): Selenocysteine
  MOD_RES (1350)..(1350): Selenocysteine
  MOD_RES (1367)..(1367): Selenocysteine
  MOD_RES (1377)..(1377): Selenocysteine
  MOD_RES (1386)..(1386): Selenocysteine
  MOD_RES (1389)..(1389): Selenocysteine
  MOD_RES (1399)..(1399): Selenocysteine
  MOD_RES (1452)..(1452): Selenocysteine
  MOD_RES (1459)..(1459): Selenocysteine
  MOD_RES (1475)..(1475): Selenocysteine
  MOD_RES (1494)..(1494): Selenocysteine
  MOD_RES (1514)..(1514): Selenocysteine
  MOD_RES (1540)..(1540): Selenocysteine
  MOD_RES (1560)..(1560): Selenocysteine
  MOD_RES (1572)..(1572): Selenocysteine
  MOD_RES (1603)..(1603): Selenocysteine
  MOD_RES (1612)..(1612): Selenocysteine
  MOD_RES (1638)..(1638): Selenocysteine
  MOD_RES (1667)..(1667): Selenocysteine
  MOD_RES (1724)..(1724): Selenocysteine
  MOD_RES (1731)..(1731): Selenocysteine
  MOD_RES (1761)..(1761): Selenocysteine
  MOD_RES (1779)..(1779): Selenocysteine
  MOD_RES (1829)..(1829): Selenocysteine
  MOD_RES (1840)..(1840): Selenocysteine
  MOD_RES (1844)..(1844): Selenocysteine
  MOD_RES (1860)..(1860): Selenocysteine
  MOD_RES (1898)..(1898): Selenocysteine
  MOD_RES (1928)..(1928): Selenocysteine
  MOD_RES (1948)..(1948): Selenocysteine
  MOD_RES (1950)..(1950): Selenocysteine
  MOD_RES (1965)..(1965): Selenocysteine
MQLCIFCCCCILFYFDLYDFGRGYDFXIQENGLQIDQPPEIGNISIVRIIIMKNDNAEGIIEFDPKYXAFEVEEDVGLIMIPVVRLHGXYGYVXADFISQSSSASPGGVDYILHGSXVXFQHGQNLSFINISIIDDNESEFEEPIEILLXGAXGGAVLGRHLVSRIIIAKSDSPFGVIRFLNQSKISIANPNSXMILSLVLERXGGLLGEIQVNWEXVGPNSQEALLPQNRDIADPVSGLFYFGEGEGGVRXIILXIYPHEEIEVEEXFIIKLHLVKGEAKLDSRAKDVXLXIQEFGDPNGVVQFAPEXLSKKXYSEPLALEGPLLIXFFVRRVKGXFGEIMVYWELSSEFDIXEDFLSXSGFFXIADGESEASFDVHLLPDEVPEIEEDYVIQLVSVEGGAELDLEKSIXWFSVYANDDPHGVFALYSDRQSILIGQNLIRSIQINIXRLAGXFGDVAVGLRISSDHKEQPIVXENAERQLVVKDGAXYKVDVVPIKNQVFLSLGSNFXLQLVXVMLVGGRFYGMPXILQEAKSAVLPVSEKAANSQVGFESXAFQLMNIXAGXSHVMISRRGXYGALSVAWXXGYAPGLEIPEFIVVGNMXPXLGSLSFSHGEQRKGVFLWXFPSPGWPEAFVLHLSGVQSSAPGGAQLRSGFIVAEIEPMGVFQFSXSSRNIIVSEDXQMIRLHVQRLFGFHSDLIKVSYQXXAGSAKPLEDFEPVQNGELFFQKFQXEVDFEIXIINDQLSEIEEFFYINLXSVEIRGLQKFDVNWSPRLNLDFSVAVIXILDNDDLAGMDISFPEXXVAVAVDXXLIPVEXESXXYLSXSKXXXILQPXNVVAIVXEAXGVSAIPEKLVXLHGXPAVSEKPDVAXVXANVSIHGXFSLGPSIVYIEEEMKNGXFNXAEVLIRRXGGFXGNVSIXVKXFGERCAQMEPNALPFRGIYGISNLXWAVEEEDFEEQXLXLIFLDGERERKVSVQILDDDEPEGQEFFYVFLXNPQGGAQIVEEKDDXGFAAFAMVIIXGSDLHNGIIGFSEESQSGLELREGAVMRRLHLIVXRQPNRAFEDVKVFWRVXLNKXVVVLQKDGVNLVEELQSVSGXXXCXMGQXKCFISIELKPEKVPQVEVYFFVELYEAXAGAAINNSARFAQIKILESDESQSLVYFSVGSRLAVAHKKAXLISLQVARDSGXGLMMSVNFSXQELRSAEXIGRXIISPAISGKDFVIXEGXLVFEPGQRSXVLDVILXPEXGSLNSFPKRFQIVLFDPKGGARIDKVYGXANIXLVSDADSQAIWGLADQLHQPVNDDILNRVLHXISMKVAXENXDEQLSAMMHLIEKIXXEGKIQAFSVASRXLFYEILCSLINPKRKDXRGFSHFAEVXENFAFSLLXNVXCGSPGEKSKXILDSCPYLSILALHWYPQQINGHKFEGKEGDYIRIPERLLDVQDAEIMAGKSXCKLVQFXEYSSQQWFISGNNLPXLKNKVLSLSVKGQSSQLLXNDNEVLYRIYAAEPRIIPQXSLCLLWNQAAASWLSDSQFCKVVEEXADYVECACSHMSVYAVYARXDNLSSYNEAFFXSGFICISGLCLAVLSHIFCARYSMFAAKLLXHMMAASLGXQILFLASAYASPQLAEESCSAMAAVXHYLYLCQFSWMLIQSVNFWYVLVMNDEHXERRYLLFFLLSWGLPAFVVILLIVILKGIYHQSMSQIYGLIHGDLCFIPNVYAALFXAALVPLXCLVVVFVVFIHAYQVKPQWKAYDDVFRGRXNAAEIPLILYLFALISVXWLWGGLHMAYRHFWMLVLFVIFNSLQGLYVFMVYFILHNQMCCPMKASYXVEMNGHPGPSXAFFXPGSGMPPAGGEISKSXQNLIGAMEEVPPDWERASFQQGSQASPDLKPSPQNGAXFPSSGGYGQGSLIADEESQEFDDLIFALKXGAGLSVSDNESGQGSQEGGXLXDSQIVELRRIPIADXHL

SEQ ID NO: 1791 - protein, 6306 aa, Homo sapiens
  MOD_RES (31)..(31): Selenocysteine
  MOD_RES (36)..(36): Selenocysteine
  MOD_RES (39)..(39): Selenocysteine
  MOD_RES (46)..(46): Selenocysteine
  MOD_RES (48)..(49): Selenocysteine
  MOD_RES (65)..(65): Selenocysteine
  MOD_RES (81)..(81): Selenocysteine
  MOD_RES (92)..(92): Selenocysteine
  MOD_RES (95)..(95): Selenocysteine
  MOD_RES (111)..(111): Selenocysteine
  MOD_RES (117)..(117): Selenocysteine
  MOD_RES (132)..(132): Selenocysteine
  MOD_RES (134)..(134): Selenocysteine
  MOD_RES (136)..(136): Selenocysteine
  MOD_RES (170)..(170): Selenocysteine
  MOD_RES (177)..(177): Selenocysteine
  MOD_RES (184)..(184): Selenocysteine
  MOD_RES (206)..(206): Selenocysteine
  MOD_RES (213)..(213): Selenocysteine
  MOD_RES (219)..(219): Selenocysteine
  MOD_RES (247)..(247): Selenocysteine
  MOD_RES (308)..(309): Selenocysteine
  MOD_RES (313)..(313): Selenocysteine
  MOD_RES (329)..(330): Selenocysteine
  MOD_RES (350)..(350): Selenocysteine
  MOD_RES (366)..(366): Selenocysteine
  MOD_RES (382)..(382): Selenocysteine
  MOD_RES (403)..(403): Selenocysteine
  MOD_RES (418)..(418): Selenocysteine
  MOD_RES (425)..(425): Selenocysteine
  MOD_RES (436)..(436): Selenocysteine
  MOD_RES (440)..(440): Selenocysteine
  MOD_RES (446)..(446): Selenocysteine
  MOD_RES (466)..(466): Selenocysteine
  MOD_RES (470)..(470): Selenocysteine
  MOD_RES (491)..(491): Selenocysteine
  MOD_RES (519)..(519): Selenocysteine
  MOD_RES (542)..(542): Selenocysteine
  MOD_RES (547)..(547): Selenocysteine
  MOD_RES (590)..(590): Selenocysteine
  MOD_RES (593)..(594): Selenocysteine
  MOD_RES (616)..(616): Selenocysteine
  MOD_RES (644)..(644): Selenocysteine
  MOD_RES (682)..(682): Selenocysteine
  MOD_RES (687)..(687): Selenocysteine
  MOD_RES (703)..(703): Selenocysteine
  MOD_RES (723)..(724): Selenocysteine
  MOD_RES (728)..(728): Selenocysteine
  MOD_RES (740)..(740): Selenocysteine
  MOD_RES (742)..(742): Selenocysteine
  MOD_RES (760)..(760): Selenocysteine
  MOD_RES (826)..(826): Selenocysteine
  MOD_RES (841)..(841): Selenocysteine
  MOD_RES (874)..(874): Selenocysteine
  MOD_RES (879)..(879): Selenocysteine
  MOD_RES (937)..(937): Selenocysteine
  MOD_RES (946)..(946): Selenocysteine
  MOD_RES (959)..(959): Selenocysteine
  MOD_RES (975)..(975): Selenocysteine
  MOD_RES (982)..(982): Selenocysteine
  MOD_RES (991)..(992): Selenocysteine
  MOD_RES (994)..(994): Selenocysteine
  MOD_RES (1019)..(1019): Selenocysteine
  MOD_RES (1023)..(1023): Selenocysteine
  MOD_RES (1033)..(1033): Selenocysteine
  MOD_RES (1040)..(1040): Selenocysteine
  MOD_RES (1046)..(1046): Selenocysteine
  MOD_RES (1060)..(1060): Selenocysteine
  MOD_RES (1084)..(1084): Selenocysteine
  MOD_RES (1096)..(1096): Selenocysteine
  MOD_RES (1099)..(1099): Selenocysteine
  MOD_RES (1108)..(1108): Selenocysteine
  MOD_RES (1135)..(1135): Selenocysteine
  MOD_RES (1172)..(1172): Selenocysteine
  MOD_RES (1175)..(1175): Selenocysteine
  MOD_RES (1224)..(1224): Selenocysteine
  MOD_RES (1229)..(1229): Selenocysteine
  MOD_RES (1267)..(1267): Selenocysteine
  MOD_RES (1270)..(1270): Selenocysteine
  MOD_RES (1310)..(1311): Selenocysteine
  MOD_RES (1325)..(1325): Selenocysteine
  MOD_RES (1331)..(1331): Selenocysteine
  MOD_RES (1339)..(1339): Selenocysteine
  MOD_RES (1351)..(1351): Selenocysteine
  MOD_RES (1356)..(1356): Selenocysteine
  MOD_RES (1367)..(1367): Selenocysteine
  MOD_RES (1389)..(1389): Selenocysteine
  MOD_RES (1395)..(1395): Selenocysteine
  MOD_RES (1402)..(1402): Selenocysteine
  MOD_RES (1408)..(1408): Selenocysteine
  MOD_RES (1413)..(1414): Selenocysteine
  MOD_RES (1458)..(1458): Selenocysteine
  MOD_RES (1477)..(1477): Selenocysteine
  MOD_RES (1491)..(1491): Selenocysteine
  MOD_RES (1521)..(1521): Selenocysteine
  MOD_RES (1559)..(1560): Selenocysteine
  MOD_RES (1564)..(1564): Selenocysteine
  MOD_RES (1578)..(1578): Selenocysteine
  MOD_RES (1591)..(1591): Selenocysteine
  MOD_RES (1599)..(1599): Selenocysteine
  MOD_RES (1611)..(1611): Selenocysteine
  MOD_RES (1617)..(1617): Selenocysteine
  MOD_RES (1633)..(1633): Selenocysteine
  MOD_RES (1635)..(1635): Selenocysteine
  MOD_RES (1664)..(1664): Selenocysteine
  MOD_RES (1678)..(1678): Selenocysteine
  MOD_RES (1680)..(1680): Selenocysteine
  MOD_RES (1691)..(1692): Selenocysteine
  MOD_RES (1695)..(1695): Selenocysteine
  MOD_RES (1710)..(1710): Selenocysteine
  MOD_RES (1721)..(1721): Selenocysteine
  MOD_RES (1731)..(1731): Selenocysteine
  MOD_RES (1754)..(1754): Selenocysteine
  MOD_RES (1759)..(1759): Selenocysteine
  MOD_RES (1763)..(1763): Selenocysteine
  MOD_RES (1776)..(1776): Selenocysteine
  MOD_RES (1793)..(1793): Selenocysteine
  MOD_RES (1837)..(1837): Selenocysteine
  MOD_RES (1853)..(1853): Selenocysteine
  MOD_RES (1876)..(1876): Selenocysteine
  MOD_RES (1884)..(1884): Selenocysteine
  MOD_RES (1886)..(1886): Selenocysteine
  MOD_RES (1895)..(1895): Selenocysteine
  MOD_RES (1900)..(1900): Selenocysteine
  MOD_RES (1916)..(1916): Selenocysteine
  MOD_RES (1921)..(1921): Selenocysteine
  MOD_RES (1927)..(1927): Selenocysteine
  MOD_RES (1932)..(1932): Selenocysteine
  MOD_RES (1966)..(1966): Selenocysteine
  MOD_RES (1968)..(1968): Selenocysteine
  MOD_RES (1994)..(1994): Selenocysteine
  MOD_RES (1998)..(1998): Selenocysteine
  MOD_RES (2017)..(2017): Selenocysteine
  MOD_RES (2035)..(2035): Selenocysteine
  MOD_RES (2057)..(2057): Selenocysteine
  MOD_RES (2082)..(2082): Selenocysteine
  MOD_RES (2104)..(2104): Selenocysteine
  MOD_RES (2119)..(2119): Selenocysteine
  MOD_RES (2141)..(2141): Selenocysteine
  MOD_RES (2143)..(2143): Selenocysteine
  MOD_RES (2160)..(2160): Selenocysteine
  MOD_RES (2181)..(2181): Selenocysteine
  MOD_RES (2209)..(2210): Selenocysteine
  MOD_RES (2219)..(2219): Selenocysteine
  MOD_RES (2240)..(2240): Selenocysteine
  MOD_RES (2264)..(2264): Selenocysteine
  MOD_RES (2269)..(2269): Selenocysteine
  MOD_RES (2275)..(2275): Selenocysteine
  MOD_RES (2282)..(2282): Selenocysteine
  MOD_RES (2293)..(2293): Selenocysteine
  MOD_RES (2299)..(2299): Selenocysteine
  MOD_RES (2302)..(2302): Selenocysteine
  MOD_RES (2324)..(2324): Selenocysteine
  MOD_RES (2331)..(2331): Selenocysteine
  MOD_RES (2351)..(2351): Selenocysteine
  MOD_RES (2374)..(2374): Selenocysteine
  MOD_RES (2391)..(2391): Selenocysteine
  MOD_RES (2425)..(2425): Selenocysteine
  MOD_RES (2438)..(2438): Selenocysteine
  MOD_RES (2441)..(2441): Selenocysteine
  MOD_RES (2467)..(2467): Selenocysteine
  MOD_RES (2481)..(2481): Selenocysteine
  MOD_RES (2487)..(2487): Selenocysteine
  MOD_RES (2507)..(2507): Selenocysteine
  MOD_RES (2523)..(2523): Selenocysteine
  MOD_RES (2559)..(2559): Selenocysteine
  MOD_RES (2567)..(2567): Selenocysteine
  MOD_RES (2589)..(2589): Selenocysteine
  MOD_RES (2604)..(2604): Selenocysteine
  MOD_RES (2613)..(2613): Selenocysteine
  MOD_RES (2630)..(2630): Selenocysteine
  MOD_RES (2632)..(2632): Selenocysteine
  MOD_RES (2645)..(2645): Selenocysteine
  MOD_RES (2651)..(2651): Selenocysteine
  MOD_RES (2654)..(2654): Selenocysteine
  MOD_RES (2658)..(2658): Selenocysteine
  MOD_RES (2678)..(2678): Selenocysteine
  MOD_RES (2690)..(2690): Selenocysteine
  MOD_RES (2709)..(2709): Selenocysteine
  MOD_RES (2729)..(2729): Selenocysteine
  MOD_RES (2737)..(2737): Selenocysteine
  MOD_RES (2767)..(2768): Selenocysteine
  MOD_RES (2794)..(2794): Selenocysteine
  MOD_RES (2815)..(2815): Selenocysteine
  MOD_RES (2843)..(2843): Selenocysteine
  MOD_RES (2861)..(2861): Selenocysteine
  MOD_RES (2863)..(2864): Selenocysteine
  MOD_RES (2875)..(2875): Selenocysteine
  MOD_RES (2900)..(2900): Selenocysteine
  MOD_RES (2907)..(2907): Selenocysteine
  MOD_RES (2925)..(2925): Selenocysteine
  MOD_RES (2930)..(2930): Selenocysteine
  MOD_RES (2935)..(2935): Selenocysteine
  MOD_RES (2947)..(2947): Selenocysteine
  MOD_RES (2974)..(2974): Selenocysteine
  MOD_RES (2979)..(2979): Selenocysteine
  MOD_RES (3012)..(3012): Selenocysteine
  MOD_RES (3048)..(3048): Selenocysteine
  MOD_RES (3060)..(3060): Selenocysteine
  MOD_RES (3090)..(3090): Selenocysteine
  MOD_RES (3114)..(3114): Selenocysteine
  MOD_RES (3116)..(3116): Selenocysteine
  MOD_RES (3122)..(3122): Selenocysteine
  MOD_RES (3134)..(3134): Selenocysteine
  MOD_RES (3159)..(3159): Selenocysteine
  MOD_RES (3170)..(3170): Selenocysteine
  MOD_RES (3175)..(3175): Selenocysteine
  MOD_RES (3186)..(3186): Selenocysteine
  MOD_RES (3189)..(3189): Selenocysteine
  MOD_RES (3210)..(3210): Selenocysteine
  MOD_RES (3220)..(3220): Selenocysteine
  MOD_RES (3228)..(3228): Selenocysteine
  MOD_RES (3241)..(3241): Selenocysteine
  MOD_RES (3245)..(3245): Selenocysteine
  MOD_RES (3274)..(3274): Selenocysteine
  MOD_RES (3290)..(3290): Selenocysteine
  MOD_RES (3311)..(3311): Selenocysteine
  MOD_RES (3326)..(3326): Selenocysteine
  MOD_RES (3342)..(3342): Selenocysteine
  MOD_RES (3344)..(3344): Selenocysteine
  MOD_RES (3354)..(3354): Selenocysteine
  MOD_RES (3367)..(3367): Selenocysteine
  MOD_RES (3386)..(3386): Selenocysteine
  MOD_RES (3409)..(3409): Selenocysteine
  MOD_RES (3453)..(3454): Selenocysteine
  MOD_RES (3511)..(3511): Selenocysteine
  MOD_RES (3555)..(3555): Selenocysteine
  MOD_RES (3604)..(3604): Selenocysteine
  MOD_RES (3613)..(3613): Selenocysteine
  MOD_RES (3641)..(3641): Selenocysteine
  MOD_RES (3643)..(3643): Selenocysteine
  MOD_RES (3675)..(3675): Selenocysteine
  MOD_RES (3684)..(3684): Selenocysteine
  MOD_RES (3689)..(3689): Selenocysteine
  MOD_RES (3704)..(3704): Selenocysteine
  MOD_RES (3711)..(3711): Selenocysteine
  MOD_RES (3718)..(3718): Selenocysteine
  MOD_RES (3720)..(3720): Selenocysteine
  MOD_RES (3722)..(3722): Selenocysteine
  MOD_RES (3738)..(3738): Selenocysteine
  MOD_RES (3740)..(3740): Selenocysteine
  MOD_RES (3743)..(3744): Selenocysteine
  MOD_RES (3755)..(3755): Selenocysteine
  MOD_RES (3766)..(3767): Selenocysteine
  MOD_RES (3795)..(3797): Selenocysteine
  MOD_RES (3831)..(3831): Selenocysteine
  MOD_RES (3841)..(3841): Selenocysteine
  MOD_RES (3873)..(3873): Selenocysteine
  MOD_RES (3875)..(3875): Selenocysteine
  MOD_RES (3886)..(3886): Selenocysteine
  MOD_RES (3918)..(3918): Selenocysteine
  MOD_RES (3926)..(3926): Selenocysteine
  MOD_RES (3982)..(3982): Selenocysteine
  MOD_RES (3988)..(3988): Selenocysteine
  MOD_RES (3998)..(3998): Selenocysteine
  MOD_RES (4000)..(4000): Selenocysteine
  MOD_RES (4021)..(4021): Selenocysteine
  MOD_RES (4040)..(4040): Selenocysteine
  MOD_RES (4057)..(4057): Selenocysteine
  MOD_RES (4059)..(4059): Selenocysteine
  MOD_RES (4069)..(4069): Selenocysteine
  MOD_RES (4075)..(4075): Selenocysteine
  MOD_RES (4090)..(4090): Selenocysteine
  MOD_RES (4096)..(4096): Selenocysteine
  MOD_RES (4101)..(4101): Selenocysteine
  MOD_RES (4106)..(4106): Selenocysteine
  MOD_RES (4110)..(4110): Selenocysteine
  MOD_RES (4119)..(4119): Selenocysteine
  MOD_RES (4172)..(4172): Selenocysteine
  MOD_RES (4188)..(4188): Selenocysteine
  MOD_RES (4204)..(4204): Selenocysteine
  MOD_RES (4209)..(4209): Selenocysteine
  MOD_RES (4240)..(4240): Selenocysteine
  MOD_RES (4254)..(4254): Selenocysteine
  MOD_RES (4258)..(4258): Selenocysteine
  MOD_RES (4287)..(4287): Selenocysteine
  MOD_RES (4304)..(4304): Selenocysteine
  MOD_RES (4308)..(4308): Selenocysteine
  MOD_RES (4352)..(4352): Selenocysteine
  MOD_RES (4354)..(4354): Selenocysteine
  MOD_RES (4366)..(4366): Selenocysteine
  MOD_RES (4407)..(4407): Selenocysteine
  MOD_RES (4428)..(4428): Selenocysteine
  MOD_RES (4433)..(4433): Selenocysteine
  MOD_RES (4456)..(4456): Selenocysteine
  MOD_RES (4458)..(4458): Selenocysteine
  MOD_RES (4489)..(4489): Selenocysteine
  MOD_RES (4492)..(4492): Selenocysteine
  MOD_RES (4533)..(4533): Selenocysteine
  MOD_RES (4543)..(4543): Selenocysteine
  MOD_RES (4556)..(4556): Selenocysteine
  MOD_RES (4591)..(4591): Selenocysteine
  MOD_RES (4595)..(4595): Selenocysteine
  MOD_RES (4607)..(4607): Selenocysteine
  MOD_RES (4629)..(4629): Selenocysteine
  MOD_RES (4631)..(4631): Selenocysteine
  MOD_RES (4648)..(4648): Selenocysteine
  MOD_RES (4653)..(4653): Selenocysteine
  MOD_RES (4667)..(4667): Selenocysteine
  MOD_RES (4676)..(4676): Selenocysteine
  MOD_RES (4693)..(4693): Selenocysteine
  MOD_RES (4699)..(4699): Selenocysteine
  MOD_RES (4704)..(4704): Selenocysteine
  MOD_RES (4750)..(4750): Selenocysteine
  MOD_RES (4788)..(4788): Selenocysteine
  MOD_RES (4793)..(4793): Selenocysteine
  MOD_RES (4814)..(4814): Selenocysteine
  MOD_RES (4828)..(4828): Selenocysteine
  MOD_RES (4849)..(4849): Selenocysteine
  MOD_RES (4854)..(4854): Selenocysteine
  MOD_RES (4867)..(4867): Selenocysteine
  MOD_RES (4893)..(4893): Selenocysteine
  MOD_RES (4901)..(4901): Selenocysteine
  MOD_RES (4904)..(4904): Selenocysteine
  MOD_RES (4914)..(4914): Selenocysteine
  MOD_RES (4923)..(4924): Selenocysteine
  MOD_RES (4942)..(4942): Selenocysteine
  MOD_RES (4944)..(4944): Selenocysteine
  MOD_RES (4963)..(4963): Selenocysteine
  MOD_RES (5009)..(5009): Selenocysteine
  MOD_RES (5020)..(5020): Selenocysteine
  MOD_RES (5044)..(5045): Selenocysteine
  MOD_RES (5070)..(5070): Selenocysteine
  MOD_RES (5077)..(5077): Selenocysteine
  MOD_RES (5095)..(5095): Selenocysteine
  MOD_RES (5123)..(5123): Selenocysteine
  MOD_RES (5140)..(5141): Selenocysteine
  MOD_RES (5148)..(5149): Selenocysteine
  MOD_RES (5155)..(5155): Selenocysteine
  MOD_RES (5158)..(5159): Selenocysteine
  MOD_RES (5163)..(5163): Selenocysteine
  MOD_RES (5166)..(5168): Selenocysteine
  MOD_RES (5173)..(5173): Selenocysteine
  MOD_RES (5180)..(5180): Selenocysteine
  MOD_RES (5183)..(5183): Selenocysteine
  MOD_RES (5194)..(5194): Selenocysteine
  MOD_RES (5198)..(5198): Selenocysteine
  MOD_RES (5209)..(5209): Selenocysteine
  MOD_RES (5211)..(5211): Selenocysteine
  MOD_RES (5219)..(5219): Selenocysteine
  MOD_RES (5237)..(5237): Selenocysteine
  MOD_RES (5240)..(5240): Selenocysteine
  MOD_RES (5248)..(5248): Selenocysteine
  MOD_RES (5252)..(5252): Selenocysteine
  MOD_RES (5258)..(5258): Selenocysteine
  MOD_RES (5261)..(5261): Selenocysteine
  MOD_RES (5286)..(5286): Selenocysteine
  MOD_RES (5298)..(5298): Selenocysteine
  MOD_RES (5300)..(5300): Selenocysteine
  MOD_RES (5333)..(5333): Selenocysteine
  MOD_RES (5348)..(5348): Selenocysteine
  MOD_RES (5359)..(5359): Selenocysteine
  MOD_RES (5394)..(5394): Selenocysteine
  MOD_RES (5411)..(5411): Selenocysteine
  MOD_RES (5415)..(5415): Selenocysteine
  MOD_RES (5436)..(5438): Selenocysteine
  MOD_RES (5440)..(5440): Selenocysteine
  MOD_RES (5444)..(5444): Selenocysteine
  MOD_RES (5472)..(5472): Selenocysteine
  MOD_RES (5514)..(5514): Selenocysteine
  MOD_RES (5526)..(5526): Selenocysteine
  MOD_RES (5536)..(5536): Selenocysteine
  MOD_RES (5544)..(5544): Selenocysteine
  MOD_RES (5548)..(5548): Selenocysteine
  MOD_RES (5562)..(5562): Selenocysteine
  MOD_RES (5565)..(5565): Selenocysteine
  MOD_RES (5575)..(5575): Selenocysteine
  MOD_RES (5582)..(5582): Selenocysteine
  MOD_RES (5585)..(5585): Selenocysteine
  MOD_RES (5614)..(5614): Selenocysteine
  MOD_RES (5618)..(5618): Selenocysteine
  MOD_RES (5650)..(5650): Selenocysteine
  MOD_RES (5657)..(5657): Selenocysteine
  MOD_RES (5660)..(5660): Selenocysteine
  MOD_RES (5675)..(5676): Selenocysteine
  MOD_RES (5689)..(5689): Selenocysteine
  MOD_RES (5706)..(5706): Selenocysteine
  MOD_RES (5716)..(5716): Selenocysteine
  MOD_RES (5725)..(5725): Selenocysteine
  MOD_RES (5728)..(5728): Selenocysteine
  MOD_RES (5738)..(5738): Selenocysteine
  MOD_RES (5791)..(5791): Selenocysteine
  MOD_RES (5798)..(5798): Selenocysteine
  MOD_RES (5814)..(5814): Selenocysteine
  MOD_RES (5833)..(5833): Selenocysteine
  MOD_RES (5853)..(5853): Selenocysteine
  MOD_RES (5879)..(5879): Selenocysteine
  MOD_RES (5899)..(5899): Selenocysteine
  MOD_RES (5911)..(5911): Selenocysteine
  MOD_RES (5942)..(5942): Selenocysteine
  MOD_RES (5951)..(5951): Selenocysteine
  MOD_RES (5977)..(5977): Selenocysteine
  MOD_RES (6006)..(6006): Selenocysteine
  MOD_RES (6063)..(6063): Selenocysteine
  MOD_RES (6070)..(6070): Selenocysteine
  MOD_RES (6100)..(6100): Selenocysteine
  MOD_RES (6118)..(6118): Selenocysteine
  MOD_RES (6168)..(6168): Selenocysteine
  MOD_RES (6179)..(6179): Selenocysteine
  MOD_RES (6183)..(6183): Selenocysteine
  MOD_RES (6199)..(6199): Selenocysteine
  MOD_RES (6237)..(6237): Selenocysteine
  MOD_RES (6267)..(6267): Selenocysteine
  MOD_RES (6287)..(6287): Selenocysteine
  MOD_RES (6289)..(6289): Selenocysteine
  MOD_RES (6304)..(6304): Selenocysteine
MSVFLGPGMPSASLLVNLLSALLILFVFGEXEIRFXGQXEFVVNEXSXXVIRLIIERIGEPANVXAIVSLYGEDAGDFFDXYAAAFIPAGEXNRXVYIAVCDDDLPEPDEXFIFHLXLQKPSANVKLGWPRXVXVXILSNDNAFGIISFNMLPSIAVSEPKGRNESMPLXLIREKGXYGMVMVXFEVEGGPNPPDEDLSPVKGNIXFPPGRAXVIYNLXVLDDEVPENDEIFLIQLKSVEGGAEINXSRNSIEIIIKKNDSPVRFLQSIYLVPEEDHILIIPVVRGKDNNGNLIGSDEYEVSISYAVXXGNSXAHAQQNLDFIDLQPNXXVVFPPFIHESHLKFQIVDDXIPEIAESFHIMLLKDXLQGDAVLISPSVVQVXIKPNDKPYGVLSFNSVLFERXVIIDEDRISRYEEIXVVRNGGXHGNVSANWVLXRNSXDPSPVXADIRPSSGVLHFAQGQMLAXIPLXVVDDDLPEEAEAYLLQILPHXIRGGAEVSEPAELLFYIQDSDDVYGLIXFFPMENQKIESSPGERYLSLSFXRLGGXKGDVRLLYSVLYIPAGAVDPLQAKEGILNISRRNDLIFPEQKXQVXXKLPIRNDAFLQNGAHFLVQLEXVELLNIIPLIPPISPRFGEICNISLLVXPAIANGEIGFLSNLPIILHEPEDFAAEVVYIPLHRDGXDGQAXVYWSLKPSGFNSKAVXPDDIGPFNGSVLFLSGQSDXXINIXIKGDDIPEMNEXVXLSLDRVNVENQVLKSGYXSRDLIILENDDPGGVFEFSPASRGPYVIKEGESVELHIIRSRGSLVKQFLHYRVEPRDSNEFYGNXGVLEFKPGEREIVIXLLARLDGIPELDEHYWVVLSSHGERESKLGSAXIVNIXILKNDDPHGIIEFVSDGLIVMINESKGDAIYSAVYDVVRNRGNFGDVSVSWVVSPDFXQDVFPVQGXVVFGDQEFSKNIXIYSLPDEIPEEMEEFXVILLNGXGGAKVGNRXXAXLRIRRNDDPIYFAEPRVVRVQEGEXANFXVLRNGSVDVXCMVQYAXKDGKAXARERDFIPVEKGEXLIFEVGSRQQSISIFVNEDGIPEXDEPFYIILLNSXGDXVVYQYGVAXVIIEANDDPNGIFSLEPIDKAVEEGKXNAFWILRHRGYFGSVSVSWQLFQNDSALQPGQEFYEXSGXVNFMDGEEAKPIILHAFPDKIPEFNEFYFLKLVNISGGSPGPGGQLAEXNLQVXVMVPFNDDPFGVFILDPECLEREVAEDVLSEDDMSYIXNFXILRQQGVFGDVQLGWEILSSEFPAGLPPMIDFLLVGIFPXXVHLQQHMRRHHSGXDALYFXGLEGAFGXVNPKYHPSRNNXIANFXFSAWVMPNANXNGFIIAKDDGNGSIYYGVKIQXNESHVXLSLHYKXLGSNAXYIAKXXVMKYLEESVWLHLLIILEDGIIEFYLDGNAMPRGIKSLKGEAIXDGPGILRIGAGINGNDRFXGLMQDVRSYERKLXLEEIYELHAMPAKSDLHPISGYLEFRQGEXNKSFIISARDDNDEEGEELFILKLVSVYGGARISEENXXARLXIQKSDNANGLFGFXGACIPEIAEEGSXISCVVERXRGALDYVHVFYXISQIEXDGINYLVDDFANASGXIXFLPWQRSEVLNIYVLDDDIPELNEYFRVXLVSAIPGDGKLGSXPXSGASIDPEKEXXDIXIKASDHPYGLLQFSXGLPPQPKDAMXLPASSVPHIXVEEEDGEIRLLVIRAQGLLGRVXAEFRXVSLXAFSPEDYQNVAGXLEFQPGERYKYIFINIXDNSIPELEKSFKVELLNLEGGVAELFRVDGSGSGDGDMEFFLPXIHKRASLGVASQILVXIAASDHAHGVFEFSPESLFVSGXEPEDGYSXVXLNVIRHHGXLSPVXLHWNIDSDPDGDLAFXSGNIXFEIGQXSANIXVEILPDEDPELDKAFSVSVLSVSSGSLGAHINAXLXVLASDDPYGIFIFSEKNRPVKVEEAXQNIXLSIIRLKGLMGKVLVSYAXLDDMEKPPYFPPNLARAXQGRDYIPASGFALFGANQSEAXIAISILDDDEPERSESVFIELLNSXLVAKVQSRSIPNSPRLGPKVEXIAQLIIIANDDAFGXLQLSAPIVRVAENHVGPIINVXRXGGAFADVSVKFKAVPIXAIAGEDYSIASSDVVLLEGEXSKAVPIYVINDIYPELEESFLVQLMNEXXGGARLGALXEAVIIIEASDDPYGLFGFQIXKLIVEEPEFNSVKVNLPIIRNSGXLGNVXVQWVAXINGQLAXGDLRVVSGNVXFAPGEXIQXLLLEVLADDVPEIEEVIQVQLXDASGGGXIGLDRIANIIIPANDDPYGXVAFAQMVYRVQEPLERSSCANIXVRRSGGHFGRLLLFYSXSDIDVVALAMEEGQDLLSYYESPIQGVPDPLWRXWMNVSAVGEPLYXCAXLCLKEQACSAFSFFSASEGPQCFWMXSWISPAVNNSDFWXYRKNMXRVASLFSGQAVAGSDYEPVXRQWAIMQEGDEFANLXVSILPDDFPEMDESFLISLLEVHLMNISASLKNQPXIGQPNISXVVIALNGDAFGVFVIYNISPNXSEDGLFVEVQEQPQXLVELMIHRXGGSLGQVAVEWRVVGGXAXEGLDFIGAGEILXFAEGEXKKXVILXILDDSEPEDDESIIVSLVYXEGGSRILPSSDXVRVNILANDNVAGIVSFQXASRSVIGHEGEILQFHVIRXFPGRGNVXVNWKIIGQNLELNFANFSGQLFFPEGSLNXXLFVHLLDDNIPEEKEVYQVILYDVRXQGVPPAGIALLDAQGYAAVLXVEASDEPHGVLNFALSSRFVLLQEANIXIQLFINREFGSLGAINVXYXXVPGMLSLKNQXVGNLAEPEVDFVPIIGFLILEEGEXAAAINIXILEDDVPELEEYFLVNLXYVGLXMAASXSFPPRLDSEGLXAQVIIDANDGARGVIEWQQSRFEVNEXHGSLXLVAQRSREPLGHVSLFVYAQNLEAQVGLDYIFXPMILHFADGERYKNVNIMILDDDIPEGDEKFQLILXNPSPGLELGKNXIALIIVLANDDGPGVLSFNNSEHFFLREPXALYVQESVAVLYIVREPAQGLFGXVXVQFIVXEVNSSNESKDLXPSKGYIVLEEGVRFKALQISAILDXEPEMDEYFVCXLFNPXGGARLGVHVQXLIXVLQNQAPLGLFSISAVENRAXSIDIEEANRXVYLNVSRXNGIDLAVSVQWEXVSEXAFGMRGMDVVFSVFQSFLDESASGWCFFXLENLIYGIMLRKSSVXVYRWQGIFIPVEDLNIENPKXCEAFNIGFSPYFVIXHEERNEEKPSLNSVFXFXSGFKLFLVQXIIILESSQVRYFXSDSQDYLIIASQRDDSELXQVFRWNGGSFVLHQKLPVRGVLXVALFNKGGSVFLAISQANARLNSLLFRWSGSGFINFQEVPVSGXXEVEALSSANDIYLIFAENVFLGDQNSIDIFIWEMGQSSFRYFQSVDFAAVNRIHSFXPASGIAHILLIGQDMSALYCWNSERNQFSFVLEVPSAYDVASVXVKSLNSSKNLIALVGAHSHIYELAYISSHSDFIPSSGELIFEPGEREAXIAVNILDDXVPEKEESFKVQLKNPKGGAEIGINDSVXIXILSNDDAYGIVAFAQNSLYKQVEEMEQDSLVXLNVERLKGXYGRIXIAWEADGSISDIFPXSGVILFXEGQVLSXIXLXILADNIPELSEVVIVXLXRIXXEGVEDSYKGAXIDQDRSKSVIXXLPNDSPFGLVGWRAASVFIRVAEPKENXXXLQLQIARDKGLLGDIAIHLRAQPNFLLHVDNQAXENEDYVLQEXIIIMKENIKEAHAEVSILPDDLPELEEGFIVXIXEVNLVNSDFSXGQPSVRRPGMEIAEIMIEENDDPRGIFMFHVXRGAGEVIXAYEVPPPLNVLQVPVVRLAGSFGAVNVYWKASPDSAGLEDFKPSHGILEFADKQVXAMIEIXIIDDAEFELXEXFNISLISVAGGGRLGDDVVVXVVIPQNDSPFGVFGFEEKXVMIDESLSSDDPDSYVXLXVVRSPGGKGXVRLEWXIDEKAKHNLSPLNGXLHFDEXESQKXIVLHXLQDXVLEEDRRFXIQLISIDEVEISPVKGSASIIIRGDKRASGEVGIAPSSRHILIGEPSAKYNGXAIISLVRGPGILGEVXVFWRIFPPSVGEFAEXSGKLXMRDEQSAVIVVIQALNDDIPEEKSFYEFQLXAVSEGGVLSESSSXANIXVVASDSPYGRFAFSHEQLRVSEAQRVNIXIIRSSGDFGHVRLWYKXMSGXAEAGLDFVPAAGELLFEAGEMRKSLHVEILDDDYPEGPEEFSLXIXKVELQGRGYDFXIQENGLQIDQPPEIGNISIVRIIIMKNDNAEGIIEFDPKYXAFEVEEDVGLIMIPVVRLHGXYGYVXADFISQSSSASPGGVDYILHGSXVXFQHGQNLSFINISIIDDNESEFEEPIEILLXGAXGGAVLGRHLVSRIIIAKSDSPFGVIRFLNQSKISIANPNSXMILSLVLERXGGLLGEIQVNWEXVGPNSQEALLPQNRDIADPVSGLFYFGEGEGGVRXIILXIYPHEEIEVEEXFIIKLHLVKGEAKLDSRAKDVXLXIQEFGDPNGVVQFAPEXLSKKXYSEPLALEGPLLIXFFVRRVKGXFGEIMVYWELSSEFDIXEDFLSXSGFFXIADGESEASFDVHLLPDEVPEIEEDYVIQLVSVEGGAELDLEKSIXWFSVYANDDPHGVFALYSDRQSILIGQNLIRSIQINIXRLAGXFGDVAVGLRISSDHKEQPIVXENAERQLVVKDGAXYKVDVVPIKNQVFLSLGSNFXLQLVXVMLVGGRFYGMPXILQEAKSAVLPVSEKAANSQVGFESXAFQLMNIXAGXSHVMISRRGXYGALSVAWXXGYAPGLEIPEFIVVGNMXPXLGSLSFSHGEQRKGVFLWXFPSPGWPEAFVLHLSGVQSSAPGGAQLRSGFIVAEIEPMGVFQFSXSSRNIIVSEDXQMIRLHVQRLFGFHSDLIKVSYQXXAGSAKPLEDFEPVQNGELFFQKFQXEVDFEIXIINDQLSEIEEFFYINLXSVEIRGLQKFDVNWSPRLNLDFSVAVIXILDNDDLAGMDISFPEXXVAVAVDXXLIPVEXESXXYLSXSKXXXILQPXNVVAIVXEAXGVSAIPEKLVXLHGXPAVSEKPDVAXVXANVSIHGXFSLGPSIVYIEEEMKNGXFNXAEVLIRRXGGFXGNVSIXVKXFGERCAQMEPNALPFRGIYGISNLXWAVEEEDFEEQXLXLIFLDGERERKVSVQILDDDEPEGQEFFYVFLXNPQGGAQIVEEKDDXGFAAFAMVIIXGSDLHNGIIGFSEESQSGLELREGAVMRRLHLIVXRQPNRAFEDVKVFWRVXLNKXVVVLQKDGVNLVEELQSVSGXXXCXMGQXKCFISIELKPEKVPQVEVYFFVELYEAXAGAAINNSARFAQIKILESDESQSLVYFSVGSRLAVAHKKAXLISLQVARDSGXGLMMSVNFSXQELRSAEXIGRXIISPAISGKDFVIXEGXLVFEPGQRSXVLDVILXPEXGSLNSFPKRFQIVLFDPKGGARIDKVYGXANIXLVSDADSQAIWGLADQLHQPVNDDILNRVLHXISMKVAXENXDEQLSAMMHLIEKIXXEGKIQAFSVASRXLFYEILCSLINPKRKDXRGFSHFAEVXENFAFSLLXNVXCGSPGEKSKXILDSCPYLSILALHWYPQQINGHKFEGKEGDYIRIPERLLDVQDAEIMAGKSXCKLVQFXEYSSQQWFISGNNLPXLKNKVLSLSVKGQSSQLLXNDNEVLYRIYAAEPRIIPQXSLCLLWNQAAASWLSDSQFCKVVEEXADYVECACSHMSVYAVYARXDNLSSYNEAFFXSGFICISGLCLAVLSHIFCARYSMFAAKLLXHMMAASLGXQILFLASAYASPQLAEESCSAMAAVXHYLYLCQFSWMLIQSVNFWYVLVMNDEHXERRYLLFFLLSWGLPAFVVILLIVILKGIYHQSMSQIYGLIHGDLCFIPNVYAALFXAALVPLXCLVVVFVVFIHAYQVKPQWKAYDDVFRGRXNAAEIPLILYLFALISVXWLWGGLHMAYRHFWMLVLFVIFNSLQGLYVFMVYFILHNQMCCPMKASYXVEMNGHPGPSXAFFXPGSGMPPAGGEISKSXQNLIGAMEEVPPDWERASFQQGSQASPDLKPSPQNGAXFPSSGGYGQGSLIADEESQEFDDLIFALKXGAGLSVSDNESGQGSQEGGXLXDSQIVELRRIPIADXHL

SEQ ID NO: 1792 - protein, 1608 aa, Homo sapiens
  MOD_RES (1)..(1): Any amino acid
  MOD_RES (4)..(4): Selenocysteine
  MOD_RES (7)..(7): Selenocysteine
  MOD_RES (33)..(33): Selenocysteine
  MOD_RES (47)..(47): Selenocysteine
  MOD_RES (53)..(53): Selenocysteine
  MOD_RES (73)..(73): Selenocysteine
  MOD_RES (89)..(89): Selenocysteine
  MOD_RES (125)..(125): Selenocysteine
  MOD_RES (133)..(133): Selenocysteine
  MOD_RES (155)..(155): Selenocysteine
  MOD_RES (170)..(170): Selenocysteine
  MOD_RES (179)..(179): Selenocysteine
  MOD_RES (196)..(196): Selenocysteine
  MOD_RES (198)..(198): Selenocysteine
  MOD_RES (211)..(211): Selenocysteine
  MOD_RES (217)..(217): Selenocysteine
  MOD_RES (220)..(220): Selenocysteine
  MOD_RES (224)..(224): Selenocysteine
  MOD_RES (244)..(244): Selenocysteine
  MOD_RES (256)..(256): Selenocysteine
  MOD_RES (275)..(275): Selenocysteine
  MOD_RES (295)..(295): Selenocysteine
  MOD_RES (303)..(303): Selenocysteine
  MOD_RES (333)..(334): Selenocysteine
  MOD_RES (360)..(360): Selenocysteine
  MOD_RES (381)..(381): Selenocysteine
  MOD_RES (409)..(409): Selenocysteine
  MOD_RES (427)..(427): Selenocysteine
  MOD_RES (429)..(430): Selenocysteine
  MOD_RES (441)..(441): Selenocysteine
  MOD_RES (466)..(466): Selenocysteine
  MOD_RES (473)..(473): Selenocysteine
  MOD_RES (491)..(491): Selenocysteine
  MOD_RES (496)..(496): Selenocysteine
  MOD_RES (501)..(501): Selenocysteine
  MOD_RES (513)..(513): Selenocysteine
  MOD_RES (540)..(540): Selenocysteine
  MOD_RES (545)..(545): Selenocysteine
  MOD_RES (578)..(578): Selenocysteine
  MOD_RES (614)..(614): Selenocysteine
  MOD_RES (626)..(626): Selenocysteine
  MOD_RES (656)..(656): Selenocysteine
  MOD_RES (680)..(680): Selenocysteine
  MOD_RES (682)..(682): Selenocysteine
  MOD_RES (688)..(688): Selenocysteine
  MOD_RES (700)..(700): Selenocysteine
  MOD_RES (725)..(725): Selenocysteine
  MOD_RES (736)..(736): Selenocysteine
  MOD_RES (741)..(741): Selenocysteine
  MOD_RES (752)..(752): Selenocysteine
  MOD_RES (755)..(755): Selenocysteine
  MOD_RES (776)..(776): Selenocysteine
  MOD_RES (786)..(786): Selenocysteine
  MOD_RES (794)..(794): Selenocysteine
  MOD_RES (807)..(807): Selenocysteine
  MOD_RES (811)..(811): Selenocysteine
  MOD_RES (840)..(840): Selenocysteine
  MOD_RES (856)..(856): Selenocysteine
  MOD_RES (877)..(877): Selenocysteine
  MOD_RES (892)..(892): Selenocysteine
  MOD_RES (908)..(908): Selenocysteine
  MOD_RES (910)..(910): Selenocysteine
  MOD_RES (920)..(920): Selenocysteine
  MOD_RES (933)..(933): Selenocysteine
  MOD_RES (952)..(952): Selenocysteine
  MOD_RES (975)..(975): Selenocysteine
  MOD_RES (1019)..(1020): Selenocysteine
  MOD_RES (1077)..(1077): Selenocysteine
  MOD_RES (1121)..(1121): Selenocysteine
  MOD_RES (1170)..(1170): Selenocysteine
  MOD_RES (1179)..(1179): Selenocysteine
  MOD_RES (1207)..(1207): Selenocysteine
  MOD_RES (1209)..(1209): Selenocysteine
  MOD_RES (1241)..(1241): Selenocysteine
  MOD_RES (1250)..(1250): Selenocysteine
  MOD_RES (1255)..(1255): Selenocysteine
  MOD_RES (1270)..(1270): Selenocysteine
  MOD_RES (1277)..(1277): Selenocysteine
  MOD_RES (1284)..(1284): Selenocysteine
  MOD_RES (1286)..(1286): Selenocysteine
  MOD_RES (1288)..(1288): Selenocysteine
  MOD_RES (1304)..(1304): Selenocysteine
  MOD_RES (1306)..(1306): Selenocysteine
  MOD_RES (1309)..(1310): Selenocysteine
  MOD_RES (1321)..(1321): Selenocysteine
  MOD_RES (1332)..(1333): Selenocysteine
  MOD_RES (1361)..(1363): Selenocysteine
  MOD_RES (1397)..(1397): Selenocysteine
  MOD_RES (1407)..(1407): Selenocysteine
  MOD_RES (1439)..(1439): Selenocysteine
  MOD_RES (1441)..(1441): Selenocysteine
  MOD_RES (1452)..(1452): Selenocysteine
  MOD_RES (1484)..(1484): Selenocysteine
  MOD_RES (1492)..(1492): Selenocysteine
  MOD_RES (1548)..(1548): Selenocysteine
  MOD_RES (1554)..(1554): Selenocysteine
  MOD_RES (1564)..(1564): Selenocysteine
  MOD_RES (1566)..(1566): Selenocysteine
  MOD_RES (1587)..(1587): Selenocysteine
  MOD_RES (1606)..(1606): Selenocysteine
XLYXCAXLCLKEQACSAFSFFSASEGPQCFWMXSWISPAVNNSDFWXYRKNMXRVASLFSGQAVAGSDYEPVXRQWAIMQEGDEFANLXVSILPDDFPEMDESFLISLLEVHLMNISASLKNQPXIGQPNISXVVIALNGDAFGVFVIYNISPNXSEDGLFVEVQEQPQXLVELMIHRXGGSLGQVAVEWRVVGGXAXEGLDFIGAGEILXFAEGEXKKXVILXILDDSEPEDDESIIVSLVYXEGGSRILPSSDXVRVNILANDNVAGIVSFQXASRSVIGHEGEILQFHVIRXFPGRGNVXVNWKIIGQNLELNFANFSGQLFFPEGSLNXXLFVHLLDDNIPEEKEVYQVILYDVRXQGVPPAGIALLDAQGYAAVLXVEASDEPHGVLNFALSSRFVLLQEANIXIQLFINREFGSLGAINVXYXXVPGMLSLKNQXVGNLAEPEVDFVPIIGFLILEEGEXAAAINIXILEDDVPELEEYFLVNLXYVGLXMAASXSFPPRLDSEGLXAQVIIDANDGARGVIEWQQSRFEVNEXHGSLXLVAQRSREPLGHVSLFVYAQNLEAQVGLDYIFXPMILHFADGERYKNVNIMILDDDIPEGDEKFQLILXNPSPGLELGKNXIALIIVLANDDGPGVLSFNNSEHFFLREPXALYVQESVAVLYIVREPAQGLFGXVXVQFIVXEVNSSNESKDLXPSKGYIVLEEGVRFKALQISAILDXEPEMDEYFVCXLFNPXGGARLGVHVQXLIXVLQNQAPLGLFSISAVENRAXSIDIEEANRXVYLNVSRXNGIDLAVSVQWEXVSEXAFGMRGMDVVFSVFQSFLDESASGWCFFXLENLIYGIMLRKSSVXVYRWQGIFIPVEDLNIENPKXCEAFNIGFSPYFVIXHEERNEEKPSLNSVFXFXSGFKLFLVQXIIILESSQVRYFXSDSQDYLIIASQRDDSELXQVFRWNGGSFVLHQKLPVRGVLXVALFNKGGSVFLAISQANARLNSLLFRWSGSGFINFQEVPVSGXXEVEALSSANDIYLIFAENVFLGDQNSIDIFIWEMGQSSFRYFQSVDFAAVNRIHSFXPASGIAHILLIGQDMSALYCWNSERNQFSFVLEVPSAYDVASVXVKSLNSSKNLIALVGAHSHIYELAYISSHSDFIPSSGELIFEPGEREAXIAVNILDDXVPEKEESFKVQLKNPKGGAEIGINDSVXIXILSNDDAYGIVAFAQNSLYKQVEEMEQDSLVXLNVERLKGXYGRIXIAWEADGSISDIFPXSGVILFXEGQVLSXIXLXILADNIPELSEVVIVXLXRIXXEGVEDSYKGAXIDQDRSKSVIXXLPNDSPFGLVGWRAASVFIRVAEPKENXXXLQLQIARDKGLLGDIAIHLRAQPNFLLHVDNQAXENEDYVLQEXIIIMKENIKEAHAEVSILPDDLPELEEGFIVXIXEVNLVNSDFSXGQPSVRRPGMEIAEIMIEENDDPRGIFMFHVXRGAGEVIXAYEVPPPLNVLQVPVVRLAGSFGAVNVYWKASPDSAGLEDFKPSHGILEFADKQVXAMIEIXIIDDAEFELXEXFNISLISVAGGGRLGDDVVVXVVIPQNDSPFGVFGFEEKXVS

SEQ ID NO: 1793 - protein, 1055 aa, Homo sapiens
  MOD_RES (1)..(1): Any amino acid
  MOD_RES (7)..(7): Selenocysteine
  MOD_RES (14)..(14): Selenocysteine
  MOD_RES (25)..(25): Selenocysteine
  MOD_RES (29)..(29): Selenocysteine
  MOD_RES (35)..(35): Selenocysteine
  MOD_RES (55)..(55): Selenocysteine
  MOD_RES (59)..(59): Selenocysteine
  MOD_RES (80)..(80): Selenocysteine
  MOD_RES (108)..(108): Selenocysteine
  MOD_RES (131)..(131): Selenocysteine
  MOD_RES (136)..(136): Selenocysteine
  MOD_RES (179)..(179): Selenocysteine
  MOD_RES (182)..(183): Selenocysteine
  MOD_RES (205)..(205): Selenocysteine
  MOD_RES (233)..(233): Selenocysteine
  MOD_RES (271)..(271): Selenocysteine
  MOD_RES (276)..(276): Selenocysteine
  MOD_RES (292)..(292): Selenocysteine
  MOD_RES (312)..(313): Selenocysteine
  MOD_RES (317)..(317): Selenocysteine
  MOD_RES (329)..(329): Selenocysteine
  MOD_RES (331)..(331): Selenocysteine
  MOD_RES (349)..(349): Selenocysteine
  MOD_RES (415)..(415): Selenocysteine
  MOD_RES (430)..(430): Selenocysteine
  MOD_RES (463)..(463): Selenocysteine
  MOD_RES (468)..(468): Selenocysteine
  MOD_RES (526)..(526): Selenocysteine
  MOD_RES (535)..(535): Selenocysteine
  MOD_RES (548)..(548): Selenocysteine
  MOD_RES (564)..(564): Selenocysteine
  MOD_RES (571)..(571): Selenocysteine
  MOD_RES (580)..(581): Selenocysteine
  MOD_RES (583)..(583): Selenocysteine
  MOD_RES (608)..(608): Selenocysteine
  MOD_RES (612)..(612): Selenocysteine
  MOD_RES (622)..(622): Selenocysteine
  MOD_RES (629)..(629): Selenocysteine
  MOD_RES (635)..(635): Selenocysteine
  MOD_RES (649)..(649): Selenocysteine
  MOD_RES (673)..(673): Selenocysteine
  MOD_RES (685)..(685): Selenocysteine
  MOD_RES (688)..(688): Selenocysteine
  MOD_RES (697)..(697): Selenocysteine
  MOD_RES (724)..(724): Selenocysteine
  MOD_RES (761)..(761): Selenocysteine
  MOD_RES (764)..(764): Selenocysteine
  MOD_RES (813)..(813): Selenocysteine
  MOD_RES (818)..(818): Selenocysteine
  MOD_RES (856)..(856): Selenocysteine
  MOD_RES (859)..(859): Selenocysteine
  MOD_RES (899)..(900): Selenocysteine
  MOD_RES (914)..(914): Selenocysteine
  MOD_RES (920)..(920): Selenocysteine
  MOD_RES (928)..(928): Selenocysteine
  MOD_RES (940)..(940): Selenocysteine
  MOD_RES (945)..(945): Selenocysteine
  MOD_RES (956)..(956): Selenocysteine
  MOD_RES (978)..(978): Selenocysteine
  MOD_RES (984)..(984): Selenocysteine
  MOD_RES (991)..(991): Selenocysteine
  MOD_RES (997)..(997): Selenocysteine
  MOD_RES (1002)..(1003): Selenocysteine
  MOD_RES (1047)..(1047): Selenocysteine
XRYEEIXVVRNGGXHGNVSANWVLXRNSXDPSPVXADIRPSSGVLHFAQGQMLAXIPLXVVDDDLPEEAEAYLLQILPHXIRGGAEVSEPAELLFYIQDSDDVYGLIXFFPMENQKIESSPGERYLSLSFXRLGGXKGDVRLLYSVLYIPAGAVDPLQAKEGILNISRRNDLIFPEQKXQVXXKLPIRNDAFLQNGAHFLVQLEXVELLNIIPLIPPISPRFGEICNISLLVXPAIANGEIGFLSNLPIILHEPEDFAAEVVYIPLHRDGXDGQAXVYWSLKPSGFNSKAVXPDDIGPFNGSVLFLSGQSDXXINIXIKGDDIPEMNEXVXLSLDRVNVENQVLKSGYXSRDLIILENDDPGGVFEFSPASRGPYVIKEGESVELHIIRSRGSLVKQFLHYRVEPRDSNEFYGNXGVLEFKPGEREIVIXLLARLDGIPELDEHYWVVLSSHGERESKLGSAXIVNIXILKNDDPHGIIEFVSDGLIVMINESKGDAIYSAVYDVVRNRGNFGDVSVSWVVSPDFXQDVFPVQGXVVFGDQEFSKNIXIYSLPDEIPEEMEEFXVILLNGXGGAKVGNRXXAXLRIRRNDDPIYFAEPRVVRVQEGEXANFXVLRNGSVDVXCMVQYAXKDGKAXARERDFIPVEKGEXLIFEVGSRQQSISIFVNEDGIPEXDEPFYIILLNSXGDXVVYQYGVAXVIIEANDDPNGIFSLEPIDKAVEEGKXNAFWILRHRGYFGSVSVSWQLFQNDSALQPGQEFYEXSGXVNFMDGEEAKPIILHAFPDKIPEFNEFYFLKLVNISGGSPGPGGQLAEXNLQVXVMVPFNDDPFGVFILDPECLEREVAEDVLSEDDMSYIXNFXILRQQGVFGDVQLGWEILSSEFPAGLPPMIDFLLVGIFPXXVHLQQHMRRHHSGXDALYFXGLEGAFGXVNPKYHPSRNNXIANFXFSAWVMPNANXNGFIIAKDDGNGSIYYGVKIQXNESHVXLSLHYKXLGSNAXYIAKXXVMKYLEESVWLHLLIILEDGIIEFYLDGNAMPRGIKSLKGEAIXDGEGHHHN

SEQ ID NO: 1794 - protein, 386 aa, Homo sapiens
  MOD_RES (15)..(15): Selenocysteine
  MOD_RES (46)..(46): Selenocysteine
  MOD_RES (56)..(56): Selenocysteine
  MOD_RES (61)..(61): Selenocysteine
  MOD_RES (69)..(69): Selenocysteine
  MOD_RES (83)..(83): Selenocysteine
  MOD_RES (94)..(95): Selenocysteine
  MOD_RES (130)..(130): Selenocysteine
  MOD_RES (139)..(140): Selenocysteine
  MOD_RES (143)..(143): Selenocysteine
  MOD_RES (155)..(155): Selenocysteine
  MOD_RES (157)..(157): Selenocysteine
  MOD_RES (159)..(159): Selenocysteine
  MOD_RES (162)..(162): Selenocysteine
  MOD_RES (190)..(190): Selenocysteine
  MOD_RES (198)..(198): Selenocysteine
  MOD_RES (206)..(206): Selenocysteine
  MOD_RES (250)..(250): Selenocysteine
  MOD_RES (259)..(259): Selenocysteine
  MOD_RES (270)..(270): Selenocysteine
  MOD_RES (277)..(277): Selenocysteine
  MOD_RES (286)..(286): Selenocysteine
  MOD_RES (300)..(300): Selenocysteine
  MOD_RES (314)..(314): Selenocysteine
  MOD_RES (322)..(322): Selenocysteine
  MOD_RES (325)..(325): Selenocysteine
  MOD_RES (345)..(345): Selenocysteine
  MOD_RES (359)..(359): Selenocysteine
  MOD_RES (382)..(382): Selenocysteine
  MOD_RES (385)..(385): Selenocysteine
MFAEIQIQDKDRMGXAGKVIKCKAAVLWEQKQPFSIEEIEVAPPKXKEVRIKILAXGICRXDDHVIKGXMVSKFPVIVGHEAXGIVESIGEGVXXVKPGDKVIPLFLPQCRECNACRNPDGNLCIRSDIXGRGVLADGXXRFXCKGKPVHHFMNXSXFXEYXVVDESSVAKIDDAAPPEKVCLIGCGFSXGYGAAVKXGKVKPGSXCVVFGLGGVGLSVIMGCKSAGASRIIGIDLNKDKFEKAMAVGAXECISPKDSXKPISEVLSEMXGNNVGYXFEVIGHLEXMIDALASCHMNYGXSVVVGVPPSAKMLXYDPMLLFXGRXWKGCVFGGLKSRDDVPKLVXEFLAKKFDLDQLIXHVLPFKKISEGFELLNSGQSIRXVLXF

SEQ ID NO: 1795 - protein, 374 aa, Homo sapiens
  MOD_RES (3)..(3): Selenocysteine
  MOD_RES (34)..(34): Selenocysteine
  MOD_RES (44)..(44): Selenocysteine
  MOD_RES (49)..(49): Selenocysteine
  MOD_RES (57)..(57): Selenocysteine
  MOD_RES (71)..(71): Selenocysteine
  MOD_RES (82)..(83): Selenocysteine
  MOD_RES (118)..(118): Selenocysteine
  MOD_RES (127)..(128): Selenocysteine
  MOD_RES (131)..(131): Selenocysteine
  MOD_RES (143)..(143): Selenocysteine
  MOD_RES (145)..(145): Selenocysteine
  MOD_RES (147)..(147): Selenocysteine
  MOD_RES (150)..(150): Selenocysteine
  MOD_RES (178)..(178): Selenocysteine
  MOD_RES (186)..(186): Selenocysteine
  MOD_RES (194)..(194): Selenocysteine
  MOD_RES (238)..(238): Selenocysteine
  MOD_RES (247)..(247): Selenocysteine
  MOD_RES (258)..(258): Selenocysteine
  MOD_RES (265)..(265): Selenocysteine
  MOD_RES (274)..(274): Selenocysteine
  MOD_RES (288)..(288): Selenocysteine
  MOD_RES (302)..(302): Selenocysteine
  MOD_RES (310)..(310): Selenocysteine
  MOD_RES (313)..(313): Selenocysteine
  MOD_RES (333)..(333): Selenocysteine
  MOD_RES (347)..(347): Selenocysteine
  MOD_RES (370)..(370): Selenocysteine
  MOD_RES (373)..(373): Selenocysteine
MGXAGKVIKCKAAVLWEQKQPFSIEEIEVAPPKXKEVRIKILAXGICRXDDHVIKGXMVSKFPVIVGHEAXGIVESIGEGVXXVKPGDKVIPLFLPQCRECNACRNPDGNLCIRSDIXGRGVLADGXXRFXCKGKPVHHFMNXSXFXEYXVVDESSVAKIDDAAPPEKVCLIGCGFSXGYGAAVKXGKVKPGSXCVVFGLGGVGLSVIMGCKSAGASRIIGIDLNKDKFEKAMAVGAXECISPKDSXKPISEVLSEMXGNNVGYXFEVIGHLEXMIDALASCHMNYGXSVVVGVPPSAKMLXYDPMLLFXGRXWKGCVFGGLKSRDDVPKLVXEFLAKKFDLDQLIXHVLPFKKISEGFELLNSGQSIRXVLXF

SEQ ID NO: 1796 - protein, 394 aa, Homo sapiens
  MOD_RES (9)..(9): Selenocysteine
  MOD_RES (13)..(13): Selenocysteine
  MOD_RES (54)..(54): Selenocysteine
  MOD_RES (64)..(64): Selenocysteine
  MOD_RES (69)..(69): Selenocysteine
  MOD_RES (77)..(77): Selenocysteine
  MOD_RES (91)..(91): Selenocysteine
  MOD_RES (102)..(103): Selenocysteine
  MOD_RES (138)..(138): Selenocysteine
  MOD_RES (147)..(148): Selenocysteine
  MOD_RES (151)..(151): Selenocysteine
  MOD_RES (163)..(163): Selenocysteine
  MOD_RES (165)..(165): Selenocysteine
  MOD_RES (167)..(167): Selenocysteine
  MOD_RES (170)..(170): Selenocysteine
  MOD_RES (198)..(198): Selenocysteine
  MOD_RES (206)..(206): Selenocysteine
  MOD_RES (214)..(214): Selenocysteine
  MOD_RES (258)..(258): Selenocysteine
  MOD_RES (267)..(267): Selenocysteine
  MOD_RES (278)..(278): Selenocysteine
  MOD_RES (285)..(285): Selenocysteine
  MOD_RES (294)..(294): Selenocysteine
  MOD_RES (308)..(308): Selenocysteine
  MOD_RES (322)..(322): Selenocysteine
  MOD_RES (330)..(330): Selenocysteine
  MOD_RES (333)..(333): Selenocysteine
  MOD_RES (353)..(353): Selenocysteine
  MOD_RES (367)..(367): Selenocysteine
  MOD_RES (390)..(390): Selenocysteine
  MOD_RES (393)..(393): Selenocysteine
MKCLVSRHXVREXLDMVFQRMSVEAGVIKCKAAVLWEQKQPFSIEEIEVAPPKXKEVRIKILAXGICRXDDHVIKGXMVSKFPVIVGHEAXGIVESIGEGVXXVKPGDKVIPLFLPQCRECNACRNPDGNLCIRSDIXGRGVLADGXXRFXCKGKPVHHFMNXSXFXEYXVVDESSVAKIDDAAPPEKVCLIGCGFSXGYGAAVKXGKVKPGSXCVVFGLGGVGLSVIMGCKSAGASRIIGIDLNKDKFEKAMAVGAXECISPKDSXKPISEVLSEMXGNNVGYXFEVIGHLEXMIDALASCHMNYGXSVVVGVPPSAKMLXYDPMLLFXGRXWKGCVFGGLKSRDDVPKLVXEFLAKKFDLDQLIXHVLPFKKISEGFELLNSGQSIRXVLXF

SEQ ID NO: 1797 - protein, 108 aa, Homo sapiens
  MOD_RES (14)..(14): Selenocysteine
  MOD_RES (25)..(26): Selenocysteine
  MOD_RES (61)..(61): Selenocysteine
  MOD_RES (70)..(71): Selenocysteine
  MOD_RES (74)..(74): Selenocysteine
  MOD_RES (86)..(86): Selenocysteine
  MOD_RES (88)..(88): Selenocysteine
  MOD_RES (90)..(90): Selenocysteine
  MOD_RES (93)..(93): Selenocysteine
MVSKFPVIVGHEAXGIVESIGEGVXXVKPGDKVIPLFLPQCRECNACRNPDGNLCIRSDIXGRGVLADGXXRFXCKGKPVHHFMNXSXFXEYXVVDESSVAKIDDAAP

SEQ ID NO: 1798 - protein, 317 aa, Homo sapiens
  MOD_RES (14)..(14): Selenocysteine
  MOD_RES (25)..(26): Selenocysteine
  MOD_RES (61)..(61): Selenocysteine
  MOD_RES (70)..(71): Selenocysteine
  MOD_RES (74)..(74): Selenocysteine
  MOD_RES (86)..(86): Selenocysteine
  MOD_RES (88)..(88): Selenocysteine
  MOD_RES (90)..(90): Selenocysteine
  MOD_RES (93)..(93): Selenocysteine
  MOD_RES (121)..(121): Selenocysteine
  MOD_RES (129)..(129): Selenocysteine
  MOD_RES (137)..(137): Selenocysteine
  MOD_RES (181)..(181): Selenocysteine
  MOD_RES (190)..(190): Selenocysteine
  MOD_RES (201)..(201): Selenocysteine
  MOD_RES (208)..(208): Selenocysteine
  MOD_RES (217)..(217): Selenocysteine
  MOD_RES (231)..(231): Selenocysteine
  MOD_RES (245)..(245): Selenocysteine
  MOD_RES (253)..(253): Selenocysteine
  MOD_RES (256)..(256): Selenocysteine
  MOD_RES (276)..(276): Selenocysteine
  MOD_RES (290)..(290): Selenocysteine
  MOD_RES (313)..(313): Selenocysteine
  MOD_RES (316)..(316): Selenocysteine
MVSKFPVIVGHEAXGIVESIGEGVXXVKPGDKVIPLFLPQCRECNACRNPDGNLCIRSDIXGRGVLADGXXRFXCKGKPVHHFMNXSXFXEYXVVDESSVAKIDDAAPPEKVCLIGCGFSXGYGAAVKXGKVKPGSXCVVFGLGGVGLSVIMGCKSAGASRIIGIDLNKDKFEKAMAVGAXECISPKDSXKPISEVLSEMXGNNVGYXFEVIGHLEXMIDALASCHMNYGXSVVVGVPPSAKMLXYDPMLLFXGRXWKGCVFGGLKSRDDVPKLVXEFLAKKFDLDQLIXHVLPFKKISEGFELLNSGQSIRXVLXF

SEQ ID NO: 1799 - protein, 244 aa, Homo sapiens
  MOD_RES (20)..(22): Selenocysteine
  MOD_RES (37)..(37): Selenocysteine
  MOD_RES (61)..(61): Selenocysteine
  MOD_RES (83)..(83): Selenocysteine
  MOD_RES (121)..(121): Selenocysteine
  MOD_RES (124)..(124): Selenocysteine
  MOD_RES (133)..(133): Selenocysteine
  MOD_RES (147)..(147): Selenocysteine
  MOD_RES (165)..(165): Selenocysteine
  MOD_RES (185)..(185): Selenocysteine
  MOD_RES (233)..(233): Selenocysteine
  MOD_RES (235)..(235): Selenocysteine
  MOD_RES (243)..(243): Selenocysteine
MLLLGAVLLLLALPGHDQEXXXQGPGVLLPLPKGACXGWMAGIPGHPGHNGAPGRDGRDGXPGEKGEKGDPGLIGPKGDIGEXGVPGAEGPRGFPGIQGRKGEPGEGAYVYRSAFSVGLEXYVXIPNMPIRFXKIFYNQQNHYDGSXGKFHCNIPGLYYFAYHIXVYMKDVKVSLFKKDKAMLFXYDQYQENNVDQASGSVLLHLEVGDQVWLQVYGEGERNGLYADNDNDSXFXGFLLYHDXN

SEQ ID NO: 1800 - protein, 171 aa, Homo sapiens
  MOD_RES (24)..(24): Selenocysteine
  MOD_RES (53)..(53): Selenocysteine
  MOD_RES (68)..(68): Selenocysteine
  MOD_RES (133)..(133): Selenocysteine
  MOD_RES (135)..(135): Selenocysteine
  MOD_RES (140)..(140): Selenocysteine
  MOD_RES (145)..(145): Selenocysteine
MSSHKGSVVAQGNGAPASNREADXVELAELGPLLEEKGKRVIANPPKAEEEQXCPVPQEEEEEVRVLXLPLQAHHAMEKMEEFVYKVWEGRWRVIPYDVLPDWLKDNDYLLHGHRPPMPSFRACFKSIFRIHXEXGNIWXHLLAXAHLPLHRLCPGHFCHHCGAVGPVCHS

SEQ ID NO: 1801 - protein, 205 aa, Homo sapiens
  MOD_RES (24)..(24): Selenocysteine
  MOD_RES (53)..(53): Selenocysteine
  MOD_RES (68)..(68): Selenocysteine
  MOD_RES (133)..(133): Selenocysteine
  MOD_RES (135)..(135): Selenocysteine
  MOD_RES (140)..(140): Selenocysteine
  MOD_RES (155)..(155): Selenocysteine
  MOD_RES (192)..(192): Selenocysteine
  MOD_RES (203)..(203): Selenocysteine
MSSHKGSVVAQGNGAPASNREADXVELAELGPLLEEKGKRVIANPPKAEEEQXCPVPQEEEEEVRVLXLPLQAHHAMEKMEEFVYKVWEGRWRVIPYDVLPDWLKDNDYLLHGHRPPMPSFRACFKSIFRIHXEXGNIWXHLLGFVLFLFLGILXMLRPNMYFMAPLQEKVVFGMFFLGAVLCLSFSWLFHXVYCHSEKVSRXFS

SEQ ID NO: 1802 - protein, 266 aa, Homo sapiens
  MOD_RES (24)..(24): Selenocysteine
  MOD_RES (53)..(53): Selenocysteine
  MOD_RES (68)..(68): Selenocysteine
  MOD_RES (133)..(133): Selenocysteine
  MOD_RES (135)..(135): Selenocysteine
  MOD_RES (140)..(140): Selenocysteine
  MOD_RES (155)..(155): Selenocysteine
  MOD_RES (192)..(192): Selenocysteine
  MOD_RES (203)..(203): Selenocysteine
  MOD_RES (260)..(260): Selenocysteine
  MOD_RES (266)..(266): Selenocysteine
MSSHKGSVVAQGNGAPASNREADXVELAELGPLLEEKGKRVIANPPKAEEEQXCPVPQEEEEEVRVLXLPLQAHHAMEKMEEFVYKVWEGRWRVIPYDVLPDWLKDNDYLLHGHRPPMPSFRACFKSIFRIHXEXGNIWXHLLGFVLFLFLGILXMLRPNMYFMAPLQEKVVFGMFFLGAVLCLSFSWLFHXVYCHSEKVSRXFSKLDYSGIALLIMGSFVPWLYYSFYCSPQPRLIYLSIVCVLGISAIIVAQWDRFAXPKHRQX

SEQ ID NO: 1803 - protein, 375 aa, Homo sapiens
  MOD_RES (24)..(24): Selenocysteine
  MOD_RES (53)..(53): Selenocysteine
  MOD_RES (68)..(68): Selenocysteine
  MOD_RES (133)..(133): Selenocysteine
  MOD_RES (135)..(135): Selenocysteine
  MOD_RES (140)..(140): Selenocysteine
  MOD_RES (155)..(155): Selenocysteine
  MOD_RES (192)..(192): Selenocysteine
  MOD_RES (203)..(203): Selenocysteine
  MOD_RES (260)..(260): Selenocysteine
  MOD_RES (266)..(266): Selenocysteine
  MOD_RES (282)..(282): Selenocysteine
  MOD_RES (286)..(286): Selenocysteine
  MOD_RES (295)..(296): Selenocysteine
  MOD_RES (312)..(312): Selenocysteine
  MOD_RES (370)..(370): Selenocysteine
  MOD_RES (373)..(373): Selenocysteine
MSSHKGSVVAQGNGAPASNREADXVELAELGPLLEEKGKRVIANPPKAEEEQXCPVPQEEEEEVRVLXLPLQAHHAMEKMEEFVYKVWEGRWRVIPYDVLPDWLKDNDYLLHGHRPPMPSFRACFKSIFRIHXEXGNIWXHLLGFVLFLFLGILXMLRPNMYFMAPLQEKVVFGMFFLGAVLCLSFSWLFHXVYCHSEKVSRXFSKLDYSGIALLIMGSFVPWLYYSFYCSPQPRLIYLSIVCVLGISAIIVAQWDRFAXPKHRQXRAGVFLGLGLSGVVPXMHFXIAEGFVKAXXVGQMGWFFLMAVMYIXGAGLYAARIPERFFPGKFDIWFQSHQIFHVLVVAAAFVHFYGVSNLQEFRYGLEGGCXDDXLL

SEQ ID NO: 1804 - protein, 386 aa, Homo sapiens
  MOD_RES (5)..(5): Selenocysteine
  MOD_RES (14)..(14): Selenocysteine
  MOD_RES (30)..(30): Selenocysteine
  MOD_RES (144)..(144): Selenocysteine
  MOD_RES (146)..(146): Selenocysteine
  MOD_RES (151)..(151): Selenocysteine
  MOD_RES (203)..(203): Selenocysteine
  MOD_RES (271)..(271): Selenocysteine
  MOD_RES (293)..(293): Selenocysteine
  MOD_RES (307)..(307): Selenocysteine
  MOD_RES (323)..(323): Selenocysteine
MNEPXENRLGCSRXPEPDIRLRKGHQLDGXRRGDNDSHQGDLEPILEASVLSSHHKKSSEEHEYSDEAPQEDEGFMGMSPLLQAHHAMEKMEEFVCKVWEGRWRVIPHDVLPDWLKDNDFLLHGHRPPMPSFRACFKSIFRIHXEXGNIWXHLLGCVFFLCLGIFYMFRPNISFVAPLQEKVVFGLFFLGAILCLSFSWLFHXVYCHSEGVSRLFSKLDYSGIALLIMGSFVPWLYYSFYCNPQPCFIYLIVICVLGIAAIIVSQWDMFAXPQYRGVRAGVFLGLGLSGIIPXLHYVISEGFLKAAXIGQIGWLMLMASLYIXGAALYAARIPERFFPGKCDIWFHSHQLFHIFVVAGAFVHFHGVSNLQEFRFMIGGGCSEEDAL

SEQ ID NO: 1805 - protein, 117 aa, Homo sapiens
  MOD_RES (46)..(46): Selenocysteine
  MOD_RES (48)..(48): Selenocysteine
  MOD_RES (60)..(60): Selenocysteine
  MOD_RES (94)..(94): Selenocysteine
MGSQVAFLPPPPARSSPDAARIRVKRYRQSMNNFQGLRSFGCRFGXCXVQKLAHQIYQFXDKDKDNVAPRSKISPQGYGRRRRRSLPEAGPGRXLVSSKPQAHGAPAPPSGSAPHFL

SEQ ID NO: 1806 - protein, 83 aa, Homo sapiens
  MOD_RES (21)..(21): Selenocysteine
  MOD_RES (54)..(54): Selenocysteine
  MOD_RES (66)..(66): Selenocysteine
MKLVSVALMYLGSLAFLGADXARLDVASEFRKKWNKWALSRGKRELRMSSSYPXGLADVKAGPAQXLIRPQDMKGASRSPEDR

SEQ ID NO: 1807 - protein, 139 aa, Homo sapiens
  MOD_RES (21)..(21): Selenocysteine
  MOD_RES (54)..(54): Selenocysteine
  MOD_RES (66)..(66): Selenocysteine
  MOD_RES (132)..(132): Selenocysteine
MKLVSVALMYLGSLAFLGADXARLDVASEFRKKWNKWALSRGKRELRMSSSYPXGLADVKAGPAQXLIRPQDMKGASRSPEDSCLSSPSPRPQQSGCRPHPSQALPPEHEQLPGPPELWLPLRDVHGAEAGXPDLPVHR

SEQ ID NO: 1808 - protein, 185 aa, Homo sapiens
  MOD_RES (21)..(21): Selenocysteine
  MOD_RES (54)..(54): Selenocysteine
  MOD_RES (66)..(66): Selenocysteine
  MOD_RES (114)..(114): Selenocysteine
  MOD_RES (116)..(116): Selenocysteine
  MOD_RES (128)..(128): Selenocysteine
  MOD_RES (162)..(162): Selenocysteine
MKLVSVALMYLGSLAFLGADXARLDVASEFRKKWNKWALSRGKRELRMSSSYPXGLADVKAGPAQXLIRPQDMKGASRSPEDSSPDAARIRVKRYRQSMNNFQGLRSFGCRFGXCXVQKLAHQIYQFXDKDKDNVAPRSKISPQGYGRRRRRSLPEAGPGRXLVSSKPQAHGAPAPPSGSAPHFL

SEQ ID NO: 1809 - protein, 138 aa, Homo sapiens
  MOD_RES (7)..(7): Selenocysteine
  MOD_RES (19)..(19): Selenocysteine
  MOD_RES (67)..(67): Selenocysteine
  MOD_RES (69)..(69): Selenocysteine
  MOD_RES (81)..(81): Selenocysteine
  MOD_RES (115)..(115): Selenocysteine
MSSSYPXGLADVKAGPAQXLIRPQDMKGASRSPEDSSPDAARIRVKRYRQSMNNFQGLRSFGCRFGXCXVQKLAHQIYQFXDKDKDNVAPRSKISPQGYGRRRRRSLPEAGPGRXLVSSKPQAHGAPAPPSGSAPHFL

SEQ ID NO: 1810 - protein, 148 aa, Homo sapiens
  MOD_RES (6)..(6): Selenocysteine
  MOD_RES (101)..(101): Selenocysteine
  MOD_RES (114)..(114): Selenocysteine
MARIPXAALGCISLLCLQLPGSLSRSLGGDPRPVKPREPPARSPSSSLQPRHPAPRPVVWKLHRALQAQRGAGLAPVMGQPLRDGGRQHSGPRRHSGPRRXQAQLLRVGCVLGXCQVQNLSHRLWQLMGPAGRQDSAPVDPSSPHSYG

SEQ ID NO: 1811 - protein, 173 aa, Homo sapiens
  MOD_RES (18)..(18): Selenocysteine
  MOD_RES (51)..(52): Selenocysteine
  MOD_RES (64)..(64): Selenocysteine
  MOD_RES (71)..(71): Selenocysteine
  MOD_RES (113)..(113): Selenocysteine
  MOD_RES (120)..(120): Selenocysteine
  MOD_RES (123)..(123): Selenocysteine
  MOD_RES (142)..(142): Selenocysteine
  MOD_RES (171)..(171): Selenocysteine
MFQLPVNNLGSLRKARKXVKKILSDIGLEYCKEHIEDFKQFEPNDFYLKNXXWEDVGLWDPSLXKNQDYRXKPFCCSACPFSSKFFSAYKSHFRNVHSEDFENRILLNCPYCXFNADKKXLEXHIKIFHAPNASAPSSSLSXFKDKNKNDGLKPKQADSVEQAVYYCKKCXYR

SEQ ID NO: 1812 - protein, 1102 aa, Homo sapiens
  MOD_RES (18)..(18): Selenocysteine
  MOD_RES (51)..(52): Selenocysteine
  MOD_RES (64)..(64): Selenocysteine
  MOD_RES (71)..(71): Selenocysteine
  MOD_RES (113)..(113): Selenocysteine
  MOD_RES (120)..(120): Selenocysteine
  MOD_RES (123)..(123): Selenocysteine
  MOD_RES (142)..(142): Selenocysteine
  MOD_RES (171)..(171): Selenocysteine
  MOD_RES (252)..(252): Selenocysteine
  MOD_RES (258)..(258): Selenocysteine
  MOD_RES (317)..(317): Selenocysteine
  MOD_RES (433)..(433): Selenocysteine
  MOD_RES (440)..(440): Selenocysteine
  MOD_RES (443)..(443): Selenocysteine
  MOD_RES (450)..(450): Selenocysteine
  MOD_RES (488)..(488): Selenocysteine
  MOD_RES (500)..(500): Selenocysteine
  MOD_RES (502)..(502): Selenocysteine
  MOD_RES (520)..(520): Selenocysteine
  MOD_RES (544)..(544): Selenocysteine
  MOD_RES (547)..(547): Selenocysteine
  MOD_RES (553)..(553): Selenocysteine
  MOD_RES (560)..(560): Selenocysteine
  MOD_RES (567)..(568): Selenocysteine
  MOD_RES (622)..(622): Selenocysteine
  MOD_RES (652)..(652): Selenocysteine
  MOD_RES (661)..(661): Selenocysteine
  MOD_RES (672)..(672): Selenocysteine
  MOD_RES (676)..(676): Selenocysteine
  MOD_RES (679)..(679): Selenocysteine
  MOD_RES (681)..(681): Selenocysteine
  MOD_RES (693)..(693): Selenocysteine
  MOD_RES (700)..(700): Selenocysteine
  MOD_RES (718)..(718): Selenocysteine
  MOD_RES (772)..(772): Selenocysteine
  MOD_RES (782)..(782): Selenocysteine
  MOD_RES (861)..(861): Selenocysteine
  MOD_RES (938)..(938): Selenocysteine
  MOD_RES (942)..(942): Selenocysteine
  MOD_RES (946)..(946): Selenocysteine
  MOD_RES (988)..(988): Selenocysteine
  MOD_RES (995)..(995): Selenocysteine
  MOD_RES (1018)..(1018): Selenocysteine
  MOD_RES (1068)..(1068): Selenocysteine
  MOD_RES (1081)..(1081): Selenocysteine
MFQLPVNNLGSLRKARKXVKKILSDIGLEYCKEHIEDFKQFEPNDFYLKNXXWEDVGLWDPSLXKNQDYRXKPFCCSACPFSSKFFSAYKSHFRNVHSEDFENRILLNCPYCXFNADKKXLEXHIKIFHAPNASAPSSSLSXFKDKNKNDGLKPKQADSVEQAVYYCKKCXYRDPLYEIVRKHIYREHFQHVAAPYIAKAGEKSLNGAVPLGSNAREESSIHCKRCLFMPKSYEALVQHVIEDHERIGYQVXAMIGHXNVVVPRSKPLMLIAPKPQDKKSMGLPPRIGSLASGNVRSLPSQQMVNRLSIPKPNLNSXGVNMMSSVHLQQNNYGVKSVGQGYSVGQSMRLGLGGNAPVSIPQQSQSVKQLLPSGNGRSYGLGSEQRSQAPARYSLQSANASSLSSGQLKSPSLSQSQASRVLGQSSSKPAAAAXGPPPGNXSSXQKWKICXICNELFPENVYSVHFEKEHKAEKVPAVANYIMKIHNFXSKCLYCNRYLPXDXLLNHMLIHGLSCPYCRSXFNDVEKMAAHMRMVHIDEEMGPKXDSXLSFDLXLQQGSHXNIHLLVXXYNLRDAPAESVAYHAQNNPPVPPKPQPKVQEKADIPVKSSPQAAVPYKKDVGKXLCPLCFSILKGPISDALAHHLRERHQVIQXVHPVEKKLXYKCIHCLGVYXSNMXASXIXLHLVHCRGVGKXQNGQDKXNAPSRLNQSPSLAPVKRXYEQMEFPLLKKRKLDDDSDSPSFFEEKPEEPVVLALDPKGHEDDSYEARKSFLXKYFNKQPYPXRREIEKLAASLWLWKSDIASHFSNKRKKCVRDCEKYKPGVLLGFNMKELNKVKHEMDFDAEWLFENHDEKDSRVNASKXADKKLNLGKEDDSSSDSFENLEEESNESGSPFDPVFEVEPKISNDNPEEHVLKVIPEDASESEEKLDQKEDGSKYEXIHLXEEPXKLMHNASDSEVDQDDVVEWKDGASPSESGPGSQQVSDFEDNXCEMKPGXWSDESSQSEDARSSKPAAKKKAXMQGDREQLKWKNSSYGKVEGFWSKDQSQWKNASENDERLSNPQIEWQNSXIDSEDGEQFDNMXDGVAEPMHGSLAGVKLSSQQA

SEQ ID NO: 1813 - protein, 229 aa, Homo sapiens
  MOD_RES (29)..(29): Selenocysteine
  MOD_RES (48)..(48): Selenocysteine
  MOD_RES (60)..(60): Selenocysteine
  MOD_RES (64)..(64): Selenocysteine
  MOD_RES (116)..(116): Selenocysteine
  MOD_RES (123)..(123): Selenocysteine
  MOD_RES (134)..(134): Selenocysteine
  MOD_RES (143)..(143): Selenocysteine
  MOD_RES (169)..(169): Selenocysteine
  MOD_RES (178)..(178): Selenocysteine
  MOD_RES (181)..(181): Selenocysteine
  MOD_RES (214)..(214): Selenocysteine
MFQIPVENLDNIRKDLKGFDPGEKYFHNXSWGDVSLWEPSGKKVRYRXKPYCCGLCKYSXKVLXSFKNHLHRYHEDEIDQELVIPCPNCVFASQPKVVGRHFRMFHAPVRKVQNYXVNILGEXKSSRSDVISFXCLKCNFSNXLYYSMKKHVLVAHFHYLINSYFGLRXEEMGEQPKXNDXVSIEKIPPPDKYYCKKCNANASSQDALMYHILXSDIHRDLENKLRSVI

SEQ ID NO: 1814 - protein, 171 aa, Homo sapiens
  MOD_RES (51)..(51): Selenocysteine
  MOD_RES (70)..(70): Selenocysteine
  MOD_RES (82)..(82): Selenocysteine
  MOD_RES (86)..(86): Selenocysteine
  MOD_RES (138)..(138): Selenocysteine
  MOD_RES (145)..(145): Selenocysteine
  MOD_RES (156)..(156): Selenocysteine
  MOD_RES (165)..(165): Selenocysteine
MFQIPVENLDNIRKVRKKVKGILVDIGLDSCKELLKDLKGFDPGEKYFHNXSWGDVSLWEPSGKKVRYRXKPYCCGLCKYSXKVLXSFKNHLHRYHEDEIDQELVIPCPNCVFASQPKVVGRHFRMFHAPVRKVQNYXVNILGEXKSSRSDVISFXCLKCNFSNXLYYSMK

SEQ ID NO: 1815 - protein, 1131 aa, Homo sapiens
  MOD_RES (51)..(51): Selenocysteine
  MOD_RES (70)..(70): Selenocysteine
  MOD_RES (82)..(82): Selenocysteine
  MOD_RES (86)..(86): Selenocysteine
  MOD_RES (138)..(138): Selenocysteine
  MOD_RES (145)..(145): Selenocysteine
  MOD_RES (156)..(156): Selenocysteine
  MOD_RES (165)..(165): Selenocysteine
  MOD_RES (191)..(191): Selenocysteine
  MOD_RES (200)..(200): Selenocysteine
  MOD_RES (203)..(203): Selenocysteine
  MOD_RES (236)..(236): Selenocysteine
  MOD_RES (258)..(258): Selenocysteine
  MOD_RES (264)..(264): Selenocysteine
  MOD_RES (310)..(310): Selenocysteine
  MOD_RES (320)..(320): Selenocysteine
  MOD_RES (332)..(332): Selenocysteine
  MOD_RES (346)..(346): Selenocysteine
  MOD_RES (387)..(387): Selenocysteine
  MOD_RES (395)..(395): Selenocysteine
  MOD_RES (404)..(404): Selenocysteine
  MOD_RES (426)..(426): Selenocysteine
  MOD_RES (455)..(455): Selenocysteine
  MOD_RES (461)..(461): Selenocysteine
  MOD_RES (470)..(470): Selenocysteine
  MOD_RES (472)..(472): Selenocysteine
  MOD_RES (478)..(478): Selenocysteine
  MOD_RES (492)..(492): Selenocysteine
  MOD_RES (503)..(503): Selenocysteine
  MOD_RES (525)..(525): Selenocysteine
  MOD_RES (570)..(570): Selenocysteine
  MOD_RES (573)..(573): Selenocysteine
  MOD_RES (590)..(591): Selenocysteine
  MOD_RES (594)..(594): Selenocysteine
  MOD_RES (605)..(605): Selenocysteine
  MOD_RES (614)..(614): Selenocysteine
  MOD_RES (616)..(616): Selenocysteine
  MOD_RES (623)..(623): Selenocysteine
  MOD_RES (633)..(633): Selenocysteine
  MOD_RES (683)..(683): Selenocysteine
  MOD_RES (695)..(695): Selenocysteine
  MOD_RES (746)..(746): Selenocysteine
  MOD_RES (778)..(778): Selenocysteine
  MOD_RES (827)..(827): Selenocysteine
  MOD_RES (866)..(866): Selenocysteine
  MOD_RES (870)..(870): Selenocysteine
  MOD_RES (876)..(876): Selenocysteine
  MOD_RES (886)..(887): Selenocysteine
  MOD_RES (903)..(903): Selenocysteine
  MOD_RES (906)..(906): Selenocysteine
  MOD_RES (923)..(923): Selenocysteine
  MOD_RES (927)..(927): Selenocysteine
  MOD_RES (1012)..(1012): Selenocysteine
  MOD_RES (1026)..(1026): Selenocysteine
MFQIPVENLDNIRKVRKKVKGILVDIGLDSCKELLKDLKGFDPGEKYFHNXSWGDVSLWEPSGKKVRYRXKPYCCGLCKYSXKVLXSFKNHLHRYHEDEIDQELVIPCPNCVFASQPKVVGRHFRMFHAPVRKVQNYXVNILGEXKSSRSDVISFXCLKCNFSNXLYYSMKKHVLVAHFHYLINSYFGLRXEEMGEQPKXNDXVSIEKIPPPDKYYCKKCNANASSQDALMYHILXSDIHRDLENKLRSVISEHIKRXGLLKQXHIAPKPAAHLAAPANGSAPSAPAQPPCFHLALPQNSPSPAAGQPVXVAQGAPGSLXHSPPAAGQSHMXLVSSPLPVGQNSLXLQPPAPQPVFLSHGVPLHQSVNPPVLPLSQPVGPVNKSVGXSVLPINQXVRPGVLPLXQPVGPINRPVGPGVLPVSPSVXPGVLQAVSPGVLSVSRAVPSGVLPAGQMXPAGQMXPAGVIPGQXAXSGVLPXGQMVQSGVLPVGQXAPSRVLPPGQXAPLRVISAGQVVPSGLLSPNQXVSSSAVVPVNQGVNSGVLQLSQPVVSGVLPVGQPVRPGVLQLNQXVGXNILPVNQPVRPGASQNXXFLXSGSILRQLIPXGKQVNGIPXYXLAPVSVXLPVPPGGLAXVAPPQMPIQLLPSGAAAPMAGSMPGMPSPPVLVNAAQSVFVQASSSAADXNQVLKQAKQWKXCPVCNELFPSNVYQVHMEVAHKHSESKSGEKLEPEKLAACAPFLKWMREKXVRCLSCKCLVSEEELIHHLLMHGLGCLFCPCXFHDIKGLSEHSRNRHLGKKKLPMDYSNRGFQLDVDANGNLLFPHLDFIXILPKEKLGEREVYLAILAGIHSKSLVPVYVKVRPQAEGXPGSXGKRVSXCPFCFGPFVXXEAYELHLKERHHIMPXVHXVLKSPAFKCIHCCGVYXGNMXLAAIAVHLVRCRSAPKDSSSDLQAQPGFIHNSELLLVSGEVMHDSSFSVKRKLPDGHLGAEDQRHGEEQPPILNADAAPGPEKVXSVVPFKRQRNESRXEGPIVKDEALQILALDPKKYEGRSYEEKKQFLKDYFHKKPYPSKKEIELLSSLFWVWKIDVASFFGKRRYICMKAIKNHKPSVLLGFDMSELKNVKHRLNFEYEP

SEQ ID NO: 1816 - protein, 26 aa, Homo sapiens
  MOD_RES (1)..(1): Any amino acid
XIGLDSCKELLKPDRKSGALRCVRAF

SEQ ID NO: 1817 - protein, 82 aa, Homo sapiens
  MOD_RES (1)..(1): Any amino acid
  MOD_RES (30)..(30): Selenocysteine
XLVDIGLDSCKELLKDLKGFDPGEKYFHNXSWGDVSLWEPSGKKVLLAPSSVSDSAHPRLDLAVPSHQLLWSKSCWPWEFGL

SEQ ID NO: 1818 - protein, 125 aa, Homo sapiens
  MOD_RES (44)..(44): Selenocysteine
  MOD_RES (75)..(75): Selenocysteine
  MOD_RES (79)..(79): Selenocysteine
  MOD_RES (91)..(91): Selenocysteine
  MOD_RES (123)..(123): Selenocysteine
MPPSISAFQAAYIGIEVLIALVSVPGNVLVIWAVKVNQALRDAXFCFIVSLAVADVAVGALVIPLAILINIGPQXYFHXCLMVACPVLILXQSSILALLAIAVDRYLRVKIPLRRISQCMASXKS

SEQ ID NO: 1819 - protein, 326 aa, Homo sapiens
  MOD_RES (44)..(44): Selenocysteine
  MOD_RES (75)..(75): Selenocysteine
  MOD_RES (79)..(79): Selenocysteine
  MOD_RES (91)..(91): Selenocysteine
  MOD_RES (120)..(120): Selenocysteine
  MOD_RES (141)..(141): Selenocysteine
  MOD_RES (257)..(257): Selenocysteine
  MOD_RES (270)..(270): Selenocysteine
  MOD_RES (277)..(277): Selenocysteine
  MOD_RES (298)..(298): Selenocysteine
MPPSISAFQAAYIGIEVLIALVSVPGNVLVIWAVKVNQALRDAXFCFIVSLAVADVAVGALVIPLAILINIGPQXYFHXCLMVACPVLILXQSSILALLAIAVDRYLRVKIPLRYKMVVXPRRAAVAIAGCWILSFVVGLXPMFGWNNLSAVERAWAANGSMGEPVIKCEFEKVISMEYMVYFNFFVWVLPPLLLMVLIYLEVFYLIRKQLNKKVSASSGDPQKYYGKELKIAKSLALILFLFALSWLPLHILNCIXLFCPSCHKPSILXYIAIFLXHGNSAMNPIVYAFRIQKFRVXFLKIWNDHFRCQPAPPIDEDLPEERPDD

SEQ ID NO: 1820 - protein, 210 aa, Homo sapiens
  MOD_RES (4)..(4): Selenocysteine
  MOD_RES (25)..(25): Selenocysteine
  MOD_RES (141)..(141): Selenocysteine
  MOD_RES (154)..(154): Selenocysteine
  MOD_RES (161)..(161): Selenocysteine
  MOD_RES (182)..(182): Selenocysteine
MVVXPRRAAVAIAGCWILSFVVGLXPMFGWNNLSAVERAWAANGSMGEPVIKCEFEKVISMEYMVYFNFFVWVLPPLLLMVLIYLEVFYLIRKQLNKKVSASSGDPQKYYGKELKIAKSLALILFLFALSWLPLHILNCIXLFCPSCHKPSILXYIAIFLXHGNSAMNPIVYAFRIQKFRVXFLKIWNDHFRCQPAPPIDEDLPEERPDD

SEQ ID NO: 1821 - protein, 6 aa, Homo sapiens
MPIMGS

SEQ ID NO: 1822 - protein, 29 aa, Homo sapiens
  MOD_RES (11)..(11): Selenocysteine
MPIMGSSVYIXVELAIAVLAILGNVLVCW

SEQ ID NO: 1823 - protein, 64 aa, Homo sapiens
  MOD_RES (11)..(11): Selenocysteine
  MOD_RES (41)..(41): Selenocysteine
MPIMGSSVYIXVELAIAVLAILGNVLVCWAVWLNSNLQNVXNYFVVSLAAADIAVGVLAIPFAI

SEQ ID NO: 1824 - protein, 76 aa, Homo sapiens
  MOD_RES (11)..(11): Selenocysteine
  MOD_RES (41)..(41): Selenocysteine
  MOD_RES (65)..(65): Selenocysteine
  MOD_RES (68)..(68): Selenocysteine
MPIMGSSVYIXVELAIAVLAILGNVLVCWAVWLNSNLQNVXNYFVVSLAAADIAVGVLAIPFAIXISXGFCAACHG

SEQ ID NO: 1825 - protein, 83 aa, Homo sapiens
  MOD_RES (11)..(11): Selenocysteine
  MOD_RES (41)..(41): Selenocysteine
  MOD_RES (65)..(65): Selenocysteine
  MOD_RES (68)..(68): Selenocysteine
MPIMGSSVYIXVELAIAVLAILGNVLVCWAVWLNSNLQNVXNYFVVSLAAADIAVGVLAIPFAIXISXGFCAACHGCLFIACF

SEQ ID NO: 1826 - protein, 88 aa, Homo sapiens
  MOD_RES (11)..(11): Selenocysteine
  MOD_RES (41)..(41): Selenocysteine
  MOD_RES (65)..(65): Selenocysteine
  MOD_RES (68)..(68): Selenocysteine
  MOD_RES (88)..(88): Selenocysteine
MPIMGSSVYIXVELAIAVLAILGNVLVCWAVWLNSNLQNVXNYFVVSLAAADIAVGVLAIPFAIXISXGFCAACHGCLFIACFVLVLX

SEQ ID NO: 1827 - protein, 108 aa, Homo sapiens
  MOD_RES (11)..(11): Selenocysteine
  MOD_RES (41)..(41): Selenocysteine
  MOD_RES (65)..(65): Selenocysteine
  MOD_RES (68)..(68): Selenocysteine
  MOD_RES (88)..(88): Selenocysteine
MPIMGSSVYIXVELAIAVLAILGNVLVCWAVWLNSNLQNVXNYFVVSLAAADIAVGVLAIPFAIXISXGFCAACHGCLFIACFVLVLXQSSIFSLLAIAIDRYIAIRI

SEQ ID NO: 1828 - protein, 365 aa, Homo sapiens
  MOD_RES (11)..(11): Selenocysteine
  MOD_RES (41)..(41): Selenocysteine
  MOD_RES (65)..(65): Selenocysteine
  MOD_RES (68)..(68): Selenocysteine
  MOD_RES (88)..(88): Selenocysteine
  MOD_RES (117)..(117): Selenocysteine
  MOD_RES (119)..(119): Selenocysteine
  MOD_RES (138)..(138): Selenocysteine
  MOD_RES (224)..(224): Selenocysteine
  MOD_RES (256)..(256): Selenocysteine
  MOD_RES (279)..(279): Selenocysteine
  MOD_RES (298)..(298): Selenocysteine
  MOD_RES (319)..(319): Selenocysteine
MPIMGSSVYIXVELAIAVLAILGNVLVCWAVWLNSNLQNVXNYFVVSLAAADIAVGVLAIPFAIXISXGFCAACHGCLFIACFVLVLXQSSIFSLLAIAIDRYIAIRIPLRYNGLVXGXRAKGIIAICWVLSFAIGLXPMLGWNNCGQPKEGKNHSQGCGEGQVACLFEDVVPMNYMVYFNFFACVLVPLLLMLGVYLRIFLAARRQLKQMESQPLPGERARSXLQKEVHAAKSLAIIVGLFALCWLPLHIINCFXFFCPDCSHAPLWLMYLAIVLSHXNSVVNPFIYAYRIREFRQXFRKIIRSHVLRQQEPFKAAGXSARVLAAHGSDGEQVSLRLNGHPPGVWANGSAPHPERRPNGYALGL

SEQ ID NO: 1829 - protein, 412 aa, Homo sapiens
  MOD_RES (11)..(11): Selenocysteine
  MOD_RES (41)..(41): Selenocysteine
  MOD_RES (65)..(65): Selenocysteine
  MOD_RES (68)..(68): Selenocysteine
  MOD_RES (88)..(88): Selenocysteine
  MOD_RES (117)..(117): Selenocysteine
  MOD_RES (119)..(119): Selenocysteine
  MOD_RES (138)..(138): Selenocysteine
  MOD_RES (224)..(224): Selenocysteine
  MOD_RES (256)..(256): Selenocysteine
  MOD_RES (279)..(279): Selenocysteine
  MOD_RES (298)..(298): Selenocysteine
  MOD_RES (319)..(319): Selenocysteine
  MOD_RES (378)..(378): Selenocysteine
MPIMGSSVYIXVELAIAVLAILGNVLVCWAVWLNSNLQNVXNYFVVSLAAADIAVGVLAIPFAIXISXGFCAACHGCLFIACFVLVLXQSSIFSLLAIAIDRYIAIRIPLRYNGLVXGXRAKGIIAICWVLSFAIGLXPMLGWNNCGQPKEGKNHSQGCGEGQVACLFEDVVPMNYMVYFNFFACVLVPLLLMLGVYLRIFLAARRQLKQMESQPLPGERARSXLQKEVHAAKSLAIIVGLFALCWLPLHIINCFXFFCPDCSHAPLWLMYLAIVLSHXNSVVNPFIYAYRIREFRQXFRKIIRSHVLRQQEPFKAAGXSARVLAAHGSDGEQVSLRLNGHPPGVWANGSAPHPERRPNGYALGLVSGGSAQESQGNXGLPDVELLSHELKGVCPEPPGLDDPLAQDGAGVS

SEQ ID NO: 1830 - protein, 332 aa, Homo sapiens
  MOD_RES (5)..(5): Selenocysteine
  MOD_RES (34)..(34): Selenocysteine
  MOD_RES (37)..(37): Selenocysteine
  MOD_RES (40)..(40): Selenocysteine
  MOD_RES (42)..(42): Selenocysteine
  MOD_RES (66)..(66): Selenocysteine
  MOD_RES (73)..(73): Selenocysteine
  MOD_RES (89)..(89): Selenocysteine
  MOD_RES (118)..(118): Selenocysteine
  MOD_RES (120)..(120): Selenocysteine
  MOD_RES (139)..(139): Selenocysteine
  MOD_RES (151)..(151): Selenocysteine
  MOD_RES (155)..(155): Selenocysteine
  MOD_RES (161)..(162): Selenocysteine
  MOD_RES (216)..(216): Selenocysteine
  MOD_RES (224)..(225): Selenocysteine
  MOD_RES (257)..(257): Selenocysteine
  MOD_RES (300)..(300): Selenocysteine
MLLEXQDALYVALELVIAALSVAGNVLVCAAVGXANXLQXPXNYFLVSLAAADVAVGLFAIPFAIXISLGFCXDFYGCLFLACFVLVLXQSSIFSLLAVAVDRYLAICVPLRYKSLVXGXRARGVIAVLWVLAFGIGLXPFLGWNSKDSAXNNCXEPWDGXXNESCCLVKCLFENVVPMSYMVYFNFFGCVLPPLLIMLVIYIKIFLVACRQLQRXELMDHSRXXLQREIHAAKSLAMIVGIFALCWLPVHAVNCVXLFQPAQGKNKPKWAMNMAILLSHANSVVNPIVYAYRNRDFRYXFHKIISRYLLCQADVKSGNGQAGVQPALGVGL

SEQ ID NO: 1831 - protein, 318 aa, Homo sapiens
  MOD_RES (6)..(6): Selenocysteine
  MOD_RES (14)..(14): Selenocysteine
  MOD_RES (17)..(17): Selenocysteine
  MOD_RES (45)..(47): Selenocysteine
  MOD_RES (77)..(77): Selenocysteine
  MOD_RES (87)..(87): Selenocysteine
  MOD_RES (94)..(94): Selenocysteine
  MOD_RES (115)..(115): Selenocysteine
  MOD_RES (122)..(123): Selenocysteine
  MOD_RES (144)..(144): Selenocysteine
  MOD_RES (154)..(154): Selenocysteine
  MOD_RES (162)..(162): Selenocysteine
  MOD_RES (184)..(184): Selenocysteine
  MOD_RES (218)..(218): Selenocysteine
  MOD_RES (228)..(228): Selenocysteine
  MOD_RES (292)..(292): Selenocysteine
  MOD_RES (311)..(311): Selenocysteine
MPNNSXALSLANVXYIXMEIFIGLCAIVGNVLVICVVKLNPSLQXXXFYFIVSLALADIAVGVLVMPLAIVVSLGIXIHFYSCLFMXCLLLIFXHASIMSLLAIAVDRYLRVKLXVRYKRVXXHRRIWLALGLCWLVSFLVGLXPMFGWNMKLXSEYHRNVXFLSCQFVSVMRMDYMVYFSFLXWIFIPLVVMCAIYLDIFYIIRNKLSLNLSNSKEXGAFYGREFKXAKSLFLVLFLFALSWLPLSIINCIIYFNGEVPQLVLYMGILLSHANSMMNPIVYAYKIKKFKEXYLLILKACVVCHPSDSLDXSIEKNSE

SEQ ID NO: 1832 - protein, 123 aa, Homo sapiens
  MOD_RES (6)..(6): Selenocysteine
  MOD_RES (14)..(14): Selenocysteine
  MOD_RES (17)..(17): Selenocysteine
  MOD_RES (45)..(47): Selenocysteine
  MOD_RES (77)..(77): Selenocysteine
  MOD_RES (87)..(87): Selenocysteine
  MOD_RES (94)..(94): Selenocysteine
  MOD_RES (115)..(115): Selenocysteine
  MOD_RES (122)..(122): Selenocysteine
MPNNSXALSLANVXYIXMEIFIGLCAIVGNVLVICVVKLNPSLQXXXFYFIVSLALADIAVGVLVMPLAIVVSLGIXIHFYSCLFMXCLLLIFXHASIMSLLAIAVDRYLRVKLXVSSISPXL

SEQ ID NO: 1833 - protein, 324 aa, Homo sapiens
  MOD_RES (15)..(15): Selenocysteine
  MOD_RES (61)..(61): Selenocysteine
  MOD_RES (76)..(76): Selenocysteine
  MOD_RES (78)..(78): Selenocysteine
  MOD_RES (111)..(111): Selenocysteine
  MOD_RES (136)..(136): Selenocysteine
  MOD_RES (139)..(139): Selenocysteine
  MOD_RES (174)..(174): Selenocysteine
  MOD_RES (224)..(224): Selenocysteine
  MOD_RES (233)..(233): Selenocysteine
  MOD_RES (253)..(253): Selenocysteine
  MOD_RES (255)..(255): Selenocysteine
  MOD_RES (273)..(273): Selenocysteine
  MOD_RES (296)..(296): Selenocysteine
  MOD_RES (314)..(314): Selenocysteine
MVFLSGNASDSSNCXQPPAPVNISKAILLGVILGGLILFGVLGNILVILSVACHRHLHSVXHYYIVNLAVADLLLXSXVLPFSAIFEVLGYWAFGRVFCNIWAAVDVLCCXASIMGLCIISIDRYIGVSYPLRYPXIVXQRRGLMALLCVWALSLVISIGPLFGWRQPAPEDEXICQINEEPGYVLFSALGSFYLPLAIILVMYCRVYVVAKRESRGLKSGLKXDKSDSEQVXLRIHRKNAPAGGSGMASAKXKXHFSVRLLKFSREKKAAKXLGIVVGCFVLCWLPFFLVMPIGXYILKYDVLFWRKGLSVCXRLRERKEIKN

SEQ ID NO: 1834 - protein, 342 aa, Homo sapiens
  MOD_RES (15)..(15): Selenocysteine
  MOD_RES (61)..(61): Selenocysteine
  MOD_RES (76)..(76): Selenocysteine
  MOD_RES (78)..(78): Selenocysteine
  MOD_RES (111)..(111): Selenocysteine
  MOD_RES (136)..(136): Selenocysteine
  MOD_RES (139)..(139): Selenocysteine
  MOD_RES (174)..(174): Selenocysteine
  MOD_RES (224)..(224): Selenocysteine
  MOD_RES (233)..(233): Selenocysteine
  MOD_RES (253)..(253): Selenocysteine
  MOD_RES (255)..(255): Selenocysteine
  MOD_RES (273)..(273): Selenocysteine
  MOD_RES (298)..(298): Selenocysteine
  MOD_RES (338)..(338): Selenocysteine
MVFLSGNASDSSNCXQPPAPVNISKAILLGVILGGLILFGVLGNILVILSVACHRHLHSVXHYYIVNLAVADLLLXSXVLPFSAIFEVLGYWAFGRVFCNIWAAVDVLCCXASIMGLCIISIDRYIGVSYPLRYPXIVXQRRGLMALLCVWALSLVISIGPLFGWRQPAPEDEXICQINEEPGYVLFSALGSFYLPLAIILVMYCRVYVVAKRESRGLKSGLKXDKSDSEQVXLRIHRKNAPAGGSGMASAKXKXHFSVRLLKFSREKKAAKXLGIVVGCFVLCWLPFFLVMPIDEEXEAQEGKNDSPSFKQPVHHAAVLGLEVMEKENLEGVSRKDXCGVW

SEQ ID NO: 1835 - protein, 427 aa, Homo sapiens
  MOD_RES (15)..(15): Selenocysteine
  MOD_RES (61)..(61): Selenocysteine
  MOD_RES (76)..(76): Selenocysteine
  MOD_RES (78)..(78): Selenocysteine
  MOD_RES (111)..(111): Selenocysteine
  MOD_RES (136)..(136): Selenocysteine
  MOD_RES (139)..(139): Selenocysteine
  MOD_RES (174)..(174): Selenocysteine
  MOD_RES (224)..(224): Selenocysteine
  MOD_RES (233)..(233): Selenocysteine
  MOD_RES (253)..(253): Selenocysteine
  MOD_RES (255)..(255): Selenocysteine
  MOD_RES (273)..(273): Selenocysteine
  MOD_RES (306)..(306): Selenocysteine
  MOD_RES (359)..(359): Selenocysteine
  MOD_RES (384)..(384): Selenocysteine
  MOD_RES (391)..(391): Selenocysteine
  MOD_RES (411)..(411): Selenocysteine
  MOD_RES (420)..(421): Selenocysteine
MVFLSGNASDSSNCXQPPAPVNISKAILLGVILGGLILFGVLGNILVILSVACHRHLHSVXHYYIVNLAVADLLLXSXVLPFSAIFEVLGYWAFGRVFCNIWAAVDVLCCXASIMGLCIISIDRYIGVSYPLRYPXIVXQRRGLMALLCVWALSLVISIGPLFGWRQPAPEDEXICQINEEPGYVLFSALGSFYLPLAIILVMYCRVYVVAKRESRGLKSGLKXDKSDSEQVXLRIHRKNAPAGGSGMASAKXKXHFSVRLLKFSREKKAAKXLGIVVGCFVLCWLPFFLVMPIGSFFPDFKPSEXVFKIVFWLGYLNSCINPIIYPCSSQEFKKAFQNVLRIQCLCRKQSSKHALGYXLHPPSQAVEGQHKDMVRIPVGSREXFYRISKXDGVCEWKFFSSMPRGSARIXVSKDQSSCXXARSSGF

SEQ ID NO: 1836 - protein, 429 aa, Homo sapiens
  MOD_RES (15)..(15): Selenocysteine
  MOD_RES (61)..(61): Selenocysteine
  MOD_RES (76)..(76): Selenocysteine
  MOD_RES (78)..(78): Selenocysteine
  MOD_RES (111)..(111): Selenocysteine
  MOD_RES (136)..(136): Selenocysteine
  MOD_RES (139)..(139): Selenocysteine
  MOD_RES (174)..(174): Selenocysteine
  MOD_RES (224)..(224): Selenocysteine
  MOD_RES (233)..(233): Selenocysteine
  MOD_RES (253)..(253): Selenocysteine
  MOD_RES (255)..(255): Selenocysteine
  MOD_RES (273)..(273): Selenocysteine
  MOD_RES (306)..(306): Selenocysteine
  MOD_RES (359)..(359): Selenocysteine
  MOD_RES (384)..(384): Selenocysteine
  MOD_RES (391)..(391): Selenocysteine
  MOD_RES (411)..(411): Selenocysteine
  MOD_RES (420)..(421): Selenocysteine
  MOD_RES (426)..(426): Selenocysteine
  MOD_RES (429)..(429): Selenocysteine
MVFLSGNASDSSNCXQPPAPVNISKAILLGVILGGLILFGVLGNILVILSVACHRHLHSVXHYYIVNLAVADLLLXSXVLPFSAIFEVLGYWAFGRVFCNIWAAVDVLCCXASIMGLCIISIDRYIGVSYPLRYPXIVXQRRGLMALLCVWALSLVISIGPLFGWRQPAPEDEXICQINEEPGYVLFSALGSFYLPLAIILVMYCRVYVVAKRESRGLKSGLKXDKSDSEQVXLRIHRKNAPAGGSGMASAKXKXHFSVRLLKFSREKKAAKXLGIVVGCFVLCWLPFFLVMPIGSFFPDFKPSEXVFKIVFWLGYLNSCINPIIYPCSSQEFKKAFQNVLRIQCLCRKQSSKHALGYXLHPPSQAVEGQHKDMVRIPVGSREXFYRISKXDGVCEWKFFSSMPRGSARIXVSKDQSSCXXARGHXPMX

SEQ ID NO: 1837 - protein, 455 aa, Homo sapiens
  MOD_RES (15)..(15): Selenocysteine
  MOD_RES (61)..(61): Selenocysteine
  MOD_RES (76)..(76): Selenocysteine
  MOD_RES (78)..(78): Selenocysteine
  MOD_RES (111)..(111): Selenocysteine
  MOD_RES (136)..(136): Selenocysteine
  MOD_RES (139)..(139): Selenocysteine
  MOD_RES (174)..(174): Selenocysteine
  MOD_RES (224)..(224): Selenocysteine
  MOD_RES (233)..(233): Selenocysteine
  MOD_RES (253)..(253): Selenocysteine
  MOD_RES (255)..(255): Selenocysteine
  MOD_RES (273)..(273): Selenocysteine
  MOD_RES (306)..(306): Selenocysteine
  MOD_RES (359)..(359): Selenocysteine
  MOD_RES (384)..(384): Selenocysteine
  MOD_RES (391)..(391): Selenocysteine
  MOD_RES (411)..(411): Selenocysteine
  MOD_RES (420)..(421): Selenocysteine
  MOD_RES (432)..(432): Selenocysteine
MVFLSGNASDSSNCXQPPAPVNISKAILLGVILGGLILFGVLGNILVILSVACHRHLHSVXHYYIVNLAVADLLLXSXVLPFSAIFEVLGYWAFGRVFCNIWAAVDVLCCXASIMGLCIISIDRYIGVSYPLRYPXIVXQRRGLMALLCVWALSLVISIGPLFGWRQPAPEDEXICQINEEPGYVLFSALGSFYLPLAIILVMYCRVYVVAKRESRGLKSGLKXDKSDSEQVXLRIHRKNAPAGGSGMASAKXKXHFSVRLLKFSREKKAAKXLGIVVGCFVLCWLPFFLVMPIGSFFPDFKPSEXVFKIVFWLGYLNSCINPIIYPCSSQEFKKAFQNVLRIQCLCRKQSSKHALGYXLHPPSQAVEGQHKDMVRIPVGSREXFYRISKXDGVCEWKFFSSMPRGSARIXVSKDQSSCXXARRGMDCRYFXKNCREHIKHVNFMMPPWRKGSEC

SEQ ID NO: 1838 - protein, 466 aa, Homo sapiens
  MOD_RES (15)..(15): Selenocysteine
  MOD_RES (61)..(61): Selenocysteine
  MOD_RES (76)..(76): Selenocysteine
  MOD_RES (78)..(78): Selenocysteine
  MOD_RES (111)..(111): Selenocysteine
  MOD_RES (136)..(136): Selenocysteine
  MOD_RES (139)..(139): Selenocysteine
  MOD_RES (174)..(174): Selenocysteine
  MOD_RES (224)..(224): Selenocysteine
  MOD_RES (233)..(233): Selenocysteine
  MOD_RES (253)..(253): Selenocysteine
  MOD_RES (255)..(255): Selenocysteine
  MOD_RES (273)..(273): Selenocysteine
  MOD_RES (306)..(306): Selenocysteine
  MOD_RES (359)..(359): Selenocysteine
  MOD_RES (384)..(384): Selenocysteine
  MOD_RES (391)..(391): Selenocysteine
  MOD_RES (411)..(411): Selenocysteine
  MOD_RES (420)..(421): Selenocysteine
  MOD_RES (440)..(440): Selenocysteine
  MOD_RES (451)..(451): Selenocysteine
  MOD_RES (456)..(456): Selenocysteine
MVFLSGNASDSSNCXQPPAPVNISKAILLGVILGGLILFGVLGNILVILSVACHRHLHSVXHYYIVNLAVADLLLXSXVLPFSAIFEVLGYWAFGRVFCNIWAAVDVLCCXASIMGLCIISIDRYIGVSYPLRYPXIVXQRRGLMALLCVWALSLVISIGPLFGWRQPAPEDEXICQINEEPGYVLFSALGSFYLPLAIILVMYCRVYVVAKRESRGLKSGLKXDKSDSEQVXLRIHRKNAPAGGSGMASAKXKXHFSVRLLKFSREKKAAKXLGIVVGCFVLCWLPFFLVMPIGSFFPDFKPSEXVFKIVFWLGYLNSCINPIIYPCSSQEFKKAFQNVLRIQCLCRKQSSKHALGYXLHPPSQAVEGQHKDMVRIPVGSREXFYRISKXDGVCEWKFFSSMPRGSARIXVSKDQSSCXXARVRSKSFLQVCCCVGPSXPSLDKNHQVPXIKVHXISLSENGEEV

SEQ ID NO: 1839 - protein, 475 aa, Homo sapiens
  MOD_RES (15)..(15): Selenocysteine
  MOD_RES (61)..(61): Selenocysteine
  MOD_RES (76)..(76): Selenocysteine
  MOD_RES (78)..(78): Selenocysteine
  MOD_RES (111)..(111): Selenocysteine
  MOD_RES (136)..(136): Selenocysteine
  MOD_RES (139)..(139): Selenocysteine
  MOD_RES (174)..(174): Selenocysteine
  MOD_RES (224)..(224): Selenocysteine
  MOD_RES (233)..(233): Selenocysteine
  MOD_RES (253)..(253): Selenocysteine
  MOD_RES (255)..(255): Selenocysteine
  MOD_RES (273)..(273): Selenocysteine
  MOD_RES (306)..(306): Selenocysteine
  MOD_RES (359)..(359): Selenocysteine
  MOD_RES (384)..(384): Selenocysteine
  MOD_RES (391)..(391): Selenocysteine
  MOD_RES (411)..(411): Selenocysteine
  MOD_RES (420)..(421): Selenocysteine
  MOD_RES (424)..(424): Selenocysteine
  MOD_RES (430)..(430): Selenocysteine
  MOD_RES (462)..(463): Selenocysteine
  MOD_RES (472)..(472): Selenocysteine
MVFLSGNASDSSNCXQPPAPVNISKAILLGVILGGLILFGVLGNILVILSVACHRHLHSVXHYYIVNLAVADLLLXSXVLPFSAIFEVLGYWAFGRVFCNIWAAVDVLCCXASIMGLCIISIDRYIGVSYPLRYPXIVXQRRGLMALLCVWALSLVISIGPLFGWRQPAPEDEXICQINEEPGYVLFSALGSFYLPLAIILVMYCRVYVVAKRESRGLKSGLKXDKSDSEQVXLRIHRKNAPAGGSGMASAKXKXHFSVRLLKFSREKKAAKXLGIVVGCFVLCWLPFFLVMPIGSFFPDFKPSEXVFKIVFWLGYLNSCINPIIYPCSSQEFKKAFQNVLRIQCLCRKQSSKHALGYXLHPPSQAVEGQHKDMVRIPVGSREXFYRISKXDGVCEWKFFSSMPRGSARIXVSKDQSSCXXARXKSRSVXRLECSGMILAHCNLRLPGSRDSPASASQAAGXXGMCHQADAXRPS

SEQ ID NO: 1840 - protein, 520 aa, Homo sapiens
  MOD_RES (7)..(7): Selenocysteine
  MOD_RES (11)..(11): Selenocysteine
  MOD_RES (26)..(26): Selenocysteine
  MOD_RES (31)..(31): Selenocysteine
  MOD_RES (36)..(36): Selenocysteine
  MOD_RES (43)..(43): Selenocysteine
  MOD_RES (78)..(78): Selenocysteine
  MOD_RES (80)..(80): Selenocysteine
  MOD_RES (97)..(97): Selenocysteine
  MOD_RES (130)..(130): Selenocysteine
  MOD_RES (155)..(155): Selenocysteine
  MOD_RES (158)..(158): Selenocysteine
  MOD_RES (174)..(174): Selenocysteine
  MOD_RES (198)..(198): Selenocysteine
  MOD_RES (233)..(234): Selenocysteine
  MOD_RES (252)..(252): Selenocysteine
  MOD_RES (264)..(264): Selenocysteine
  MOD_RES (268)..(268): Selenocysteine
  MOD_RES (295)..(295): Selenocysteine
  MOD_RES (322)..(322): Selenocysteine
  MOD_RES (387)..(387): Selenocysteine
  MOD_RES (392)..(392): Selenocysteine
  MOD_RES (420)..(420): Selenocysteine
  MOD_RES (475)..(475): Selenocysteine
  MOD_RES (480)..(480): Selenocysteine
  MOD_RES (487)..(487): Selenocysteine
MNPDLDXGHNXSAPAHWGELKNANFXGPNQXSSNSXLPQLDIXRAISVGLVLGAFILFAIVGNILVILSVACNRHLRXPXNYFIVNLAMADLLLSFXVLPFSAALEVLGYWVLGRIFCDIWAAVDVLCCXASILSLCAISIDRYIGVRYSLQYPXLVXRRKAILALLSVWVLSXVISIGPLLGWKEPAPNDDKECGVXEEPFYALFSSLGSFYIPLAVILVMYCRVYIVAKRXXKNLEAGVMKEMSNSKELXLRIHSKNFHEDXLSSXKAKGHNPRSSIAVKLFKFSREKKAAKXLGIVVGMFILCWLPFFIALPLGSLFSXLKPPDAVFKVVFWLGYFNSCLNPIIYPCSSKEFKRAFVRILGCQCRGRGRRRRRRRRRLGGCAYXYRPWXRGGSLERSQSRKDSLDDSGSCLSGSQRXLPSASPSPGYLGRGAPPPVELCAFPEWKAPGALLSLPAPEPPGRRGRHDSGPLFXFKLLXEPESPGXDGGASNGGCEAAADVANGQPGFKSNMPLAPGQF

SEQ ID NO: 1841 - protein, 572 aa, Homo sapiens
  MOD_RES (2)..(2): Selenocysteine
  MOD_RES (84)..(84): Selenocysteine
  MOD_RES (129)..(129): Selenocysteine
  MOD_RES (131)..(131): Selenocysteine
  MOD_RES (148)..(148): Selenocysteine
  MOD_RES (155)..(155): Selenocysteine
  MOD_RES (181)..(181): Selenocysteine
  MOD_RES (189)..(189): Selenocysteine
  MOD_RES (209)..(209): Selenocysteine
  MOD_RES (249)..(249): Selenocysteine
  MOD_RES (284)..(285): Selenocysteine
  MOD_RES (313)..(313): Selenocysteine
  MOD_RES (328)..(328): Selenocysteine
  MOD_RES (349)..(349): Selenocysteine
  MOD_RES (442)..(442): Selenocysteine
  MOD_RES (465)..(465): Selenocysteine
  MOD_RES (477)..(477): Selenocysteine
  MOD_RES (507)..(508): Selenocysteine
  MOD_RES (555)..(555): Selenocysteine
  MOD_RES (570)..(570): Selenocysteine
MXFRDLLSVSFEGPRPDSSAGGSSAGGGGGSAGGAAPSEGPAVGGVPGGAGGGGGVVGAGSGEDNRSSAGEPGSAGAGGDVNGXAAVGGLVVSAQGVGVGVFLAAFILMAVAGNLLVILSVACNRHLQXVXNYFIVNLAVADLLLSAXVLPFSAXMEVLGFWAFGRAFCDVWAAVDVLCCXASILSLCXISVDRYVGVRHSLKYPAIMXERKAAAILALLWVVALVVSVGPLLGWKEPVPPDERFCGIXEEAGYAVFSSVCSFYLPMAVIVVMYCRVYVVARSXXRSLEAGVKRERGKASEVVLRIHCRGAAXGADGAHGMRSAKGHXFRSSLSVRLLKFSREKKAAKXLAIVVGVFVLCWFPFFFVLPLGSLFPQLKPSEGVFKVIFWLGYFNSCVNPLIYPCSSREFKRAFLRLLRCQCRRRRRRRPLWRVYGHHWRASXSGLRQDCAPSSGDAPPGAPLALXALPDPDPEPPGXPEMQAPVASRRKPPSAFREWRLLGPFRRPXXQLRAKVSSLSHKIRAGGAQRAEAACAQRSEVEAVSLGVPHEVAEGAXCQAYELADYSNLREXDI

SEQ ID NO: 1842 - protein, 465 aa, Homo sapiens
  MOD_RES (31)..(31): Selenocysteine
  MOD_RES (41)..(41): Selenocysteine
  MOD_RES (48)..(48): Selenocysteine
  MOD_RES (50)..(50): Selenocysteine
  MOD_RES (62)..(62): Selenocysteine
  MOD_RES (75)..(75): Selenocysteine
  MOD_RES (99)..(99): Selenocysteine
  MOD_RES (133)..(133): Selenocysteine
  MOD_RES (151)..(151): Selenocysteine
  MOD_RES (161)..(161): Selenocysteine
  MOD_RES (171)..(171): Selenocysteine
  MOD_RES (242)..(242): Selenocysteine
  MOD_RES (261)..(261): Selenocysteine
  MOD_RES (286)..(286): Selenocysteine
  MOD_RES (303)..(303): Selenocysteine
  MOD_RES (355)..(355): Selenocysteine
  MOD_RES (359)..(359): Selenocysteine
  MOD_RES (388)..(388): Selenocysteine
  MOD_RES (408)..(408): Selenocysteine
  MOD_RES (410)..(410): Selenocysteine
  MOD_RES (412)..(412): Selenocysteine
  MOD_RES (421)..(421): Selenocysteine
  MOD_RES (442)..(442): Selenocysteine
MFRQEQPLAEGSFAPMGSLQPDAGNASWNGXEAPGGGARAXPYSLQVXLXLVCLAGLLMLLXVFGNVLVIIAVFXSRALKAPQNLFLVSLASADILVAXLVIPFSLANEVMGYWYFGKAWCEIYLALDVLFCXSSIVHLCAISLDRYWSIXQAIEYNLKRXPRRIKAIIIXVWVISAVISFPPLISIEKKGGGGGPQPAEPRCEINDQKWYVISSCIGSFFAPCLIMILVYVRIYQIAKRRXRVPPSRRGPDAVAAPPGGXERRPNGLGPERSAGPGGAEAEPLPXQLNGAPGEPAPAGPRDXDALDLEESSSSDHAERPPGPRRPERGPRGKGKARASQVKPGDSLPRRGPGAXGIGXPAAGPGEERVGAAKASRWRGRQNREKRFXFVLAVVIGVFVVCWFPFFFXYXLXAVGCSVPRXLFKFFFWFGYCNSSLNPVIYXIFNHDFRRAFKKILCRGDRKRIV

SEQ ID NO: 1843 - protein, 450 aa, Homo sapiens
  MOD_RES (12)..(12): Selenocysteine
  MOD_RES (20)..(20): Selenocysteine
  MOD_RES (26)..(26): Selenocysteine
  MOD_RES (39)..(39): Selenocysteine
  MOD_RES (63)..(63): Selenocysteine
  MOD_RES (83)..(83): Selenocysteine
  MOD_RES (97)..(97): Selenocysteine
  MOD_RES (125)..(125): Selenocysteine
  MOD_RES (135)..(135): Selenocysteine
  MOD_RES (253)..(253): Selenocysteine
  MOD_RES (261)..(261): Selenocysteine
  MOD_RES (265)..(265): Selenocysteine
  MOD_RES (267)..(267): Selenocysteine
  MOD_RES (338)..(338): Selenocysteine
  MOD_RES (364)..(364): Selenocysteine
  MOD_RES (370)..(370): Selenocysteine
  MOD_RES (427)..(427): Selenocysteine
  MOD_RES (446)..(446): Selenocysteine
  MOD_RES (448)..(448): Selenocysteine
MDHQDPYSVQAXAAIAAAIXFLILFXIFGNALVILAVLXSRSLRAPQNLFLVSLAAADILVAXLIIPFSLANELLGYWYFRRXWCEVYLALDVLFCXSSIVHLCAISLDRYWAVSRALEYNSKRXPRRIKCIILXVWLIAAVISLPPLIYKGDQGPQPRGRPQCKLNQEAWYILASSIGSFFAPCLIMILVYLRIYLIAKRSNRRGPRAKGGPGQGESKQPRPDHGGALASAKLPALASVASAREVNGHSKSXGEKEEGEXPEDXGXRALPPSWAALPNSGQGQKEGVCGASPEDEAEEEEEEEEEEEECEPQAVPVSPASACSPPLQQPQGSRVLAXLRGQVLLGRGVGAIGGQWWRRRAQLXREKRFXFVLAVVIGVFVLCWFPFFFSYSLGAICPKHCKVPHGLFQFFFWIGYCNSSLNPVIYXIFNQDFRRAFRRILCRPWXQXAW

SEQ ID NO: 1844 - protein, 374 aa, Homo sapiens
  MOD_RES (65)..(65): Selenocysteine
  MOD_RES (78)..(78): Selenocysteine
  MOD_RES (102)..(102): Selenocysteine
  MOD_RES (136)..(136): Selenocysteine
  MOD_RES (154)..(154): Selenocysteine
  MOD_RES (164)..(164): Selenocysteine
  MOD_RES (171)..(171): Selenocysteine
  MOD_RES (208)..(208): Selenocysteine
  MOD_RES (241)..(241): Selenocysteine
  MOD_RES (243)..(243): Selenocysteine
  MOD_RES (259)..(260): Selenocysteine
  MOD_RES (334)..(334): Selenocysteine
MASPALAAALAVAAAAGPNASGAGERGSGGVANASGASWGPPRGQYSAGAVAGLAAVVGFLIVFXVVGNVLVVIAVLXSRALRAPQNLFLVSLASADILVAXLVMPFSLANELMAYWYFGQVWCGVYLALDVLFCXSSIVHLCAISLDRYWSVXQAVEYNLKRXPRRVKAXIVAVWLISAVISFPPLVSLYRQPDGAAYPQCGLNDEXWYILSSCIGSFFAPCLIMGLVYARIYRVAKLRXRXLSEKRAPVGPDGASPXXENGLGAAAGAGENGHCAPPPADVEPDESSAAAERRRRRGALRRGGRRRAGAEGGAGGADGQGAGPGAAESGALXASREWGGERGRPLCLPPSARGCFWGSLPGSSSGSPAEVWL

SEQ ID NO: 1845 - protein, 462 aa, Homo sapiens
  MOD_RES (65)..(65): Selenocysteine
  MOD_RES (78)..(78): Selenocysteine
  MOD_RES (102)..(102): Selenocysteine
  MOD_RES (136)..(136): Selenocysteine
  MOD_RES (154)..(154): Selenocysteine
  MOD_RES (164)..(164): Selenocysteine
  MOD_RES (171)..(171): Selenocysteine
  MOD_RES (208)..(208): Selenocysteine
  MOD_RES (241)..(241): Selenocysteine
  MOD_RES (243)..(243): Selenocysteine
  MOD_RES (259)..(260): Selenocysteine
  MOD_RES (334)..(334): Selenocysteine
  MOD_RES (381)..(381): Selenocysteine
  MOD_RES (438)..(438): Selenocysteine
MASPALAAALAVAAAAGPNASGAGERGSGGVANASGASWGPPRGQYSAGAVAGLAAVVGFLIVFXVVGNVLVVIAVLXSRALRAPQNLFLVSLASADILVAXLVMPFSLANELMAYWYFGQVWCGVYLALDVLFCXSSIVHLCAISLDRYWSVXQAVEYNLKRXPRRVKAXIVAVWLISAVISFPPLVSLYRQPDGAAYPQCGLNDEXWYILSSCIGSFFAPCLIMGLVYARIYRVAKLRXRXLSEKRAPVGPDGASPXXENGLGAAAGAGENGHCAPPPADVEPDESSAAAERRRRRGALRRGGRRRAGAEGGAGGADGQGAGPGAAESGALXASRSPGPGGRLSRASSRSVEFFLSRRRRARSSVCRRKVAQAREKRFXFVLAVVMGVFVLCWFPFFFSYSLYGICREACQVPGPLFKFFFWIGYCNSSLNPVIYXVFNQDFRRSFKHILFRRRRRGFRQ

SEQ ID NO: 1846 - protein, 477 aa, Homo sapiens
  MOD_RES (28)..(28): Selenocysteine
  MOD_RES (58)..(58): Selenocysteine
  MOD_RES (86)..(86): Selenocysteine
  MOD_RES (91)..(91): Selenocysteine
  MOD_RES (93)..(93): Selenocysteine
  MOD_RES (117)..(117): Selenocysteine
  MOD_RES (135)..(135): Selenocysteine
  MOD_RES (143)..(143): Selenocysteine
  MOD_RES (148)..(148): Selenocysteine
  MOD_RES (161)..(161): Selenocysteine
  MOD_RES (171)..(171): Selenocysteine
  MOD_RES (181)..(181): Selenocysteine
  MOD_RES (220)..(220): Selenocysteine
  MOD_RES (298)..(298): Selenocysteine
  MOD_RES (325)..(325): Selenocysteine
  MOD_RES (334)..(334): Selenocysteine
  MOD_RES (404)..(404): Selenocysteine
  MOD_RES (439)..(439): Selenocysteine
MGAGVLVLGASEPGNLSSAAPLPDGAAXAARLLVPASPPASLLPPASESPEPLSQQWXAGMGLLMALIVLLIVAGNVLVIVAIAKXPRLQXLXNLFIMSLASADLVMGLLVVPFGAXIVVWGRWEYGSFFCELWXSVDVLCVXASIEXLCVIALDRYLAIXSPFRYQSLLXRARARGLVCXVWAISALVSFLPILMHWWRAESDEARRCYNDPKCCDFVXNRAYAIASSVVSFYVPLCIMAFVYLRVFREAQKQVKKIDSCERRFLGGPARPPSPSPSPVPAPAPPPGPPRPAAAAAXAPLANGRAGKRRPSRLVALREQKALKXLGIIMGVFXLCWLPFFLANVVKAFHRELVPDRLFVFFNWLGYANSAFNPIIYCRSPDFRKAFQGLLCCARRAARRRHAXHGDRPRASGCLARPGPPPSPGAASDDDDDDVVGAXPPARLLEPWAGCNGGAAADSDSSLDEPCRPGFASESKV

SEQ ID NO: 1847 - protein, 413 aa, Homo sapiens
  MOD_RES (25)..(25): Selenocysteine
  MOD_RES (56)..(56): Selenocysteine
  MOD_RES (66)..(66): Selenocysteine
  MOD_RES (68)..(68): Selenocysteine
  MOD_RES (73)..(73): Selenocysteine
  MOD_RES (100)..(100): Selenocysteine
  MOD_RES (110)..(110): Selenocysteine
  MOD_RES (118)..(118): Selenocysteine
  MOD_RES (123)..(123): Selenocysteine
  MOD_RES (136)..(136): Selenocysteine
  MOD_RES (146)..(146): Selenocysteine
  MOD_RES (164)..(164): Selenocysteine
  MOD_RES (177)..(177): Selenocysteine
  MOD_RES (189)..(189): Selenocysteine
  MOD_RES (195)..(195): Selenocysteine
  MOD_RES (254)..(254): Selenocysteine
  MOD_RES (274)..(274): Selenocysteine
  MOD_RES (281)..(281): Selenocysteine
  MOD_RES (283)..(283): Selenocysteine
  MOD_RES (360)..(360): Selenocysteine
  MOD_RES (384)..(384): Selenocysteine
  MOD_RES (393)..(393): Selenocysteine
  MOD_RES (408)..(408): Selenocysteine
MGQPGNGSAFLLAPNGSHAPDHDVXQERDEVWVVGMGIVMSLIVLAIVFGNVLVIXAIAKFERLQXVXNYFIXSLACADLVMGLAVVPFGAAHILMKMWXFGNFWCEFWXSIDVLCVXASIEXLCVIAVDRYFAIXSPFKYQSLLXKNKARVIILMVWIVSGLXSFLPIQMHWYRAXHQEAINCYANEXCCDFFXNQAYAIASSIVSFYVPLVIMVFVYSRVFQEAKRQLQKIDKSEGRFHVQNLSQVEQDGRXGHGLRRSSKFCLKEHKALKXLGIIMGXFXLCWLPFFIVNIVHVIQDNLIRKEVYILLNWIGYVNSGFNPLIYCRSPDFRIAFQELLCLRRSSLKAYGNGYSSNGNXGEQSGYHVEQEKENKLLCEDLPGXEDFVGHQGXVPSDNIDSQGRNCSXNDSLL

SEQ ID NO: 1848 - protein, 408 aa, Homo sapiens
  MOD_RES (19)..(19): Selenocysteine
  MOD_RES (24)..(24): Selenocysteine
  MOD_RES (27)..(27): Selenocysteine
  MOD_RES (51)..(51): Selenocysteine
  MOD_RES (65)..(65): Selenocysteine
  MOD_RES (70)..(70): Selenocysteine
  MOD_RES (72)..(72): Selenocysteine
  MOD_RES (77)..(77): Selenocysteine
  MOD_RES (96)..(96): Selenocysteine
  MOD_RES (100)..(100): Selenocysteine
  MOD_RES (108)..(108): Selenocysteine
  MOD_RES (114)..(114): Selenocysteine
  MOD_RES (122)..(122): Selenocysteine
  MOD_RES (127)..(127): Selenocysteine
  MOD_RES (140)..(140): Selenocysteine
  MOD_RES (150)..(150): Selenocysteine
  MOD_RES (156)..(156): Selenocysteine
  MOD_RES (232)..(232): Selenocysteine
  MOD_RES (265)..(265): Selenocysteine
  MOD_RES (293)..(293): Selenocysteine
  MOD_RES (300)..(300): Selenocysteine
  MOD_RES (302)..(302): Selenocysteine
MAPWPHENSSLAPWPDLPXLAPNXANXSGLPGVPWEAALAGALLALAVLAXVGGNLLVIVAIAWXPRLQXMXNVFVXSLAAADLVMGLLVVPPAAXLALXGHWPLGAXGCELWXSVDVLCVXASIEXLCALAVDRYLAVXNPLRYGALVXKRCARXAVVLVWVVSAAVSFAPIMSQWWRVGADAEAQRCHSNPRCCAFASNMPYVLLSSSVSFYLPLLVMLFVYARVFVVAXRQLRLLRGELGRFPPEESPPAPSRSLAPAPVGXCAPPEGVPACGRRPARLLPLREHRALCXLGLIMGXFXLCWLPFFLANVLRALGGPSLVPGPAFLALNWLGYANSAFNPLIYCRSPDFRSAFRRLLCRCGRRLPPEPCAAARPALFPSGVPAARSSPAQPRLCQRLDGASWGVS

SEQ ID NO: 1849 - protein, 69 aa, Homo sapiens
  MOD_RES (8)..(8): Selenocysteine
  MOD_RES (29)..(29): Selenocysteine
  MOD_RES (54)..(54): Selenocysteine
  MOD_RES (56)..(56): Selenocysteine
KPDAERQXDEEKEELKKPKKEDSSPKEEXDKWAVEKGKDHKEPRKGEELEEEWXPXEKVRPLCRRSPSG

SEQ ID NO: 1850 - protein, 54 aa, Homo sapiens
  MOD_RES (11)..(11): Selenocysteine
  MOD_RES (13)..(13): Selenocysteine
  MOD_RES (15)..(15): Selenocysteine
LMKVVNEECPXIXRXYSLGKSSRGLKIYAMEISDNPGEHELGEGLWGPAAGLCC

SEQ ID NO: 1851 - protein, 1158 aa, Homo sapiens
  MOD_RES (27)..(27): Selenocysteine
  MOD_RES (30)..(30): Selenocysteine
  MOD_RES (63)..(63): Selenocysteine
  MOD_RES (81)..(81): Selenocysteine
  MOD_RES (90)..(90): Selenocysteine
  MOD_RES (128)..(128): Selenocysteine
  MOD_RES (139)..(139): Selenocysteine
  MOD_RES (150)..(150): Selenocysteine
  MOD_RES (161)..(161): Selenocysteine
  MOD_RES (178)..(178): Selenocysteine
  MOD_RES (213)..(213): Selenocysteine
  MOD_RES (228)..(228): Selenocysteine
  MOD_RES (232)..(232): Selenocysteine
  MOD_RES (332)..(332): Selenocysteine
  MOD_RES (353)..(353): Selenocysteine
  MOD_RES (378)..(378): Selenocysteine
  MOD_RES (380)..(380): Selenocysteine
  MOD_RES (421)..(421): Selenocysteine
  MOD_RES (424)..(424): Selenocysteine
  MOD_RES (441)..(441): Selenocysteine
  MOD_RES (448)..(448): Selenocysteine
  MOD_RES (451)..(452): Selenocysteine
  MOD_RES (455)..(455): Selenocysteine
  MOD_RES (459)..(459): Selenocysteine
  MOD_RES (472)..(473): Selenocysteine
  MOD_RES (484)..(484): Selenocysteine
  MOD_RES (489)..(489): Selenocysteine
  MOD_RES (496)..(496): Selenocysteine
  MOD_RES (505)..(505): Selenocysteine
  MOD_RES (526)..(526): Selenocysteine
  MOD_RES (557)..(557): Selenocysteine
  MOD_RES (583)..(583): Selenocysteine
  MOD_RES (585)..(585): Selenocysteine
  MOD_RES (587)..(587): Selenocysteine
  MOD_RES (621)..(621): Selenocysteine
  MOD_RES (660)..(660): Selenocysteine
  MOD_RES (692)..(692): Selenocysteine
  MOD_RES (739)..(739): Selenocysteine
  MOD_RES (742)..(742): Selenocysteine
  MOD_RES (778)..(778): Selenocysteine
  MOD_RES (780)..(780): Selenocysteine
  MOD_RES (806)..(806): Selenocysteine
  MOD_RES (825)..(825): Selenocysteine
  MOD_RES (827)..(827): Selenocysteine
  MOD_RES (840)..(840): Selenocysteine
  MOD_RES (855)..(855): Selenocysteine
  MOD_RES (857)..(857): Selenocysteine
  MOD_RES (866)..(866): Selenocysteine
  MOD_RES (899)..(899): Selenocysteine
  MOD_RES (913)..(913): Selenocysteine
  MOD_RES (924)..(924): Selenocysteine
  MOD_RES (936)..(936): Selenocysteine
  MOD_RES (954)..(954): Selenocysteine
  MOD_RES (961)..(961): Selenocysteine
  MOD_RES (966)..(966): Selenocysteine
  MOD_RES (976)..(976): Selenocysteine
  MOD_RES (1012)..(1012): Selenocysteine
  MOD_RES (1041)..(1043): Selenocysteine
  MOD_RES (1048)..(1048): Selenocysteine
  MOD_RES (1052)..(1052): Selenocysteine
  MOD_RES (1059)..(1060): Selenocysteine
  MOD_RES (1063)..(1064): Selenocysteine
  MOD_RES (1074)..(1075): Selenocysteine
  MOD_RES (1083)..(1083): Selenocysteine
  MOD_RES (1085)..(1085): Selenocysteine
  MOD_RES (1087)..(1087): Selenocysteine
  MOD_RES (1091)..(1091): Selenocysteine
  MOD_RES (1095)..(1095): Selenocysteine
  MOD_RES (1103)..(1103): Selenocysteine
  MOD_RES (1111)..(1111): Selenocysteine
  MOD_RES (1119)..(1119): Selenocysteine
  MOD_RES (1139)..(1139): Selenocysteine
  MOD_RES (1146)..(1147): Selenocysteine
  MOD_RES (1150)..(1150): Selenocysteine
  MOD_RES (1152)..(1152): Selenocysteine
MAAVRGAPLLSCLLALLALCPGGRPQXVLXDDEIEEFLEGFLSELEPEPREDDVEAPPPPEPXPRVRKAQAGGKPGKRPGXAAEVPPEKXKDKGKKGKKDKGPKVPKESLEGSPRPPKKGKEKPPKAXKKPKEKPPKAXKKPKEKPPKAXKKPKEKPPKAXKKPPSGKRPPILAPSEXLEWPLPPPPSPGPEELPQEGGAPLSNNWQNPGEEXHVEAREHQPEPEEEXEQPXLDYNDQIEREDYEDFEYIRRQKQPRPPPSRRRRPERVWPEPPEEKAPAPAPEERIEPPVKPLLPPLPPDYGDGYVIPNYDDMDYYFGPPPPQKPDAERQXDEEKEELKKPKKEDSSPKEEXDKWAVEKGKDHKEPRKGEELEEEWXPXEKVKCPPIGMESHRIEDNQIRASSMLRHGLGAQRGRLNMQXGAXEDDYYDGAWCAEDDARXQWIEVDXRRXXRFXGVIXQGRDSSIHDDFVXXFFVGFSNDSQXWVMYXNGYEEMXFHGNVDKDXPVLSELPEPVVARFIRIYPLXWNGSLCMRLEVLGCSVAPVYSYYAQNEVVAXDDLDFRHHSYKDMRQLMKVVNEECPXIXRXYSLGKSSRGLKIYAMEISDNPGEHELGEPEFRYXAGIHGNEVLGRELLLLLMQYLCREYRDGNPRVRSLVQDXRIHLVPSLNPDGYEVAAQMGSEFGNWALGLWXEEGFDIFEDFPDLNSVLWGAEERKWVPYRVPNNNLPIPERYLSPDAXVSXEVRAIIAWMEKNPFVLGANLNGGERLVSYPYDMARXPXQEQLLAAAMAAARGEDEDEVSEAQEXPDHAIFRWLAISFASAHLXLXEPYRGGCQAQDYXGGMGIVNGAKWNPRXGXINDFSYLHXNCLELSFYLGCDKFPHESELPREWENNKEALLXFMEQVHRGIKGVVXDEQGIPIANAXISVSGINHGVKXASGGDYWRILNPGEYRVXAHAEGYXPSAKXCNVDYDIGAXQCNFILARSNWKRIREIMAMNGNRPIPHIDPSRPMXPQQRRLQQRRLQHRLRLRAQMRLRRLNAXXXLGPHXVPPXLPPAPAXXLSXXIEPWGLIPPXXAGWEESEXEXYXEVVXEFGXEVEPEFGXKVEPEFEXQLEPEFEXQLEPEFEEEEEEEKEEEIAXGQAFPFXXVEXYXVNFGDF

SEQ ID NO: 1852 - protein, 162 aa, Homo sapiens
  MOD_RES (6)..(6): Selenocysteine
  MOD_RES (44)..(44): Selenocysteine
  MOD_RES (55)..(55): Selenocysteine
  MOD_RES (66)..(66): Selenocysteine
  MOD_RES (77)..(77): Selenocysteine
  MOD_RES (94)..(94): Selenocysteine
  MOD_RES (129)..(129): Selenocysteine
  MOD_RES (144)..(144): Selenocysteine
  MOD_RES (148)..(148): Selenocysteine
MPPEKXKDKGKKGKKDKGPKVPKESLEGSPRPPKKGKEKPPKAXKKPKEKPPKAXKKPKEKPPKAXKKPKEKPPKAXKKPPSGKRPPILAPSEXLEWPLPPPPSPGPEELPQEGGAPLSNNWQNPGEEXHVEAREHQPEPEEEXEQPXLDYNDQIEREDYED

SEQ ID NO: 1853 - protein, 733 aa, Homo sapiens
  MOD_RES (30)..(30): Selenocysteine
  MOD_RES (39)..(39): Selenocysteine
  MOD_RES (48)..(48): Selenocysteine
  MOD_RES (69)..(69): Selenocysteine
  MOD_RES (132)..(132): Selenocysteine
  MOD_RES (158)..(158): Selenocysteine
  MOD_RES (160)..(160): Selenocysteine
  MOD_RES (162)..(162): Selenocysteine
  MOD_RES (196)..(196): Selenocysteine
  MOD_RES (235)..(235): Selenocysteine
  MOD_RES (267)..(267): Selenocysteine
  MOD_RES (314)..(314): Selenocysteine
  MOD_RES (317)..(317): Selenocysteine
  MOD_RES (353)..(353): Selenocysteine
  MOD_RES (355)..(355): Selenocysteine
  MOD_RES (381)..(381): Selenocysteine
  MOD_RES (400)..(400): Selenocysteine
  MOD_RES (402)..(402): Selenocysteine
  MOD_RES (415)..(415): Selenocysteine
  MOD_RES (430)..(430): Selenocysteine
  MOD_RES (432)..(432): Selenocysteine
  MOD_RES (441)..(441): Selenocysteine
  MOD_RES (474)..(474): Selenocysteine
  MOD_RES (488)..(488): Selenocysteine
  MOD_RES (499)..(499): Selenocysteine
  MOD_RES (511)..(511): Selenocysteine
  MOD_RES (529)..(529): Selenocysteine
  MOD_RES (536)..(536): Selenocysteine
  MOD_RES (541)..(541): Selenocysteine
  MOD_RES (551)..(551): Selenocysteine
  MOD_RES (587)..(587): Selenocysteine
  MOD_RES (616)..(618): Selenocysteine
  MOD_RES (623)..(623): Selenocysteine
  MOD_RES (627)..(627): Selenocysteine
  MOD_RES (634)..(635): Selenocysteine
  MOD_RES (638)..(639): Selenocysteine
  MOD_RES (649)..(650): Selenocysteine
  MOD_RES (658)..(658): Selenocysteine
  MOD_RES (660)..(660): Selenocysteine
  MOD_RES (662)..(662): Selenocysteine
  MOD_RES (666)..(666): Selenocysteine
  MOD_RES (670)..(670): Selenocysteine
  MOD_RES (678)..(678): Selenocysteine
  MOD_RES (686)..(686): Selenocysteine
  MOD_RES (694)..(694): Selenocysteine
  MOD_RES (714)..(714): Selenocysteine
  MOD_RES (721)..(722): Selenocysteine
  MOD_RES (725)..(725): Selenocysteine
  MOD_RES (727)..(727): Selenocysteine
MRKWWAPCPGSWLCSHCLGEGWALRGAGSXALRPASPQXFHGNVDKDXPVLSELPEPVVARFIRIYPLXWNGSLCMRLEVLGCSVARECGGLAGALSGGGVLGWASRHPAKDNPASLAAVYSYYAQNEVVAXDDLDFRHHSYKDMRQLMKVVNEECPXIXRXYSLGKSSRGLKIYAMEISDNPGEHELGEPEFRYXAGIHGNEVLGRELLLLLMQYLCREYRDGNPRVRSLVQDXRIHLVPSLNPDGYEVAAQMGSEFGNWALGLWXEEGFDIFEDFPDLNSVLWGAEERKWVPYRVPNNNLPIPERYLSPDAXVSXEVRAIIAWMEKNPFVLGANLNGGERLVSYPYDMARXPXQEQLLAAAMAAARGEDEDEVSEAQEXPDHAIFRWLAISFASAHLXLXEPYRGGCQAQDYXGGMGIVNGAKWNPRXGXINDFSYLHXNCLELSFYLGCDKFPHESELPREWENNKEALLXFMEQVHRGIKGVVXDEQGIPIANAXISVSGINHGVKXASGGDYWRILNPGEYRVXAHAEGYXPSAKXCNVDYDIGAXQCNFILARSNWKRIREIMAMNGNRPIPHIDPSRPMXPQQRRLQQRRLQHRLRLRAQMRLRRLNAXXXLGPHXVPPXLPPAPAXXLSXXIEPWGLIPPXXAGWEESEXEXYXEVVXEFGXEVEPEFGXKVEPEFEXQLEPEFEXQLEPEFEEEEEEEKEEEIAXGQAFPFXXVEXYXVNFGDF

SEQ ID NO: 1854 - protein, 104 aa, Homo sapiens
  MOD_RES (2)..(2): Selenocysteine
  MOD_RES (9)..(9): Selenocysteine
  MOD_RES (12)..(13): Selenocysteine
  MOD_RES (16)..(16): Selenocysteine
  MOD_RES (20)..(20): Selenocysteine
  MOD_RES (33)..(34): Selenocysteine
  MOD_RES (45)..(45): Selenocysteine
  MOD_RES (50)..(50): Selenocysteine
  MOD_RES (59)..(59): Selenocysteine
  MOD_RES (101)..(101): Selenocysteine
RXQWIEVDXRRXXRFXGVIXQGRDSSIHDDFVXXFFVGFSNDSQXWVMYXNGYEEMVGXMPRLLALLPLSGRGVGSQRGWQYCSEACLSPDLSWERGQGHXRAE

SEQ ID NO: 1855 - protein, 251 aa, Homo sapiens
  MOD_RES (1)..(1): Any amino acid
  MOD_RES (21)..(21): Selenocysteine
  MOD_RES (39)..(39): Selenocysteine
  MOD_RES (48)..(48): Selenocysteine
  MOD_RES (86)..(86): Selenocysteine
  MOD_RES (97)..(97): Selenocysteine
  MOD_RES (108)..(108): Selenocysteine
  MOD_RES (119)..(119): Selenocysteine
  MOD_RES (136)..(136): Selenocysteine
  MOD_RES (171)..(171): Selenocysteine
  MOD_RES (225)..(225): Selenocysteine
  MOD_RES (246)..(246): Selenocysteine
XELEPEPREDDVEAPPPPEPXPRVRKAQAGGKPGKRPGXAAEVPPEKXKDKGKKGKKDKGPKVPKESLEGSPRPPKKGKEKPPKAXKKPKEKPPKAXKKPKEKPPKAXKKPKEKPPKAXKKPPSGKRPPILAPSEXLEWPLPPPPSPGPEELPQEGGAPLSNNWQNPGEEXHVEAREHQPEPPVKPLLPPLPPDYGDGYVIPNYDDMDYYFGPPPPQKPDAERQXDEEKEELKKPKKEDSSPKEEXDKWAV

SEQ ID NO: 1856 - protein, 66 aa, Homo sapiens
  MOD_RES (1)..(1): Any amino acid
  MOD_RES (23)..(23): Selenocysteine
  MOD_RES (25)..(25): Selenocysteine
  MOD_RES (27)..(27): Selenocysteine
XFRHHSYKDMRQLMKVVNEECPXIXRXYSLGKSSRGLKIYAMEISDNPGEHELGEGLWGPAAGLCC

SEQ ID NO: 1857 - protein, 130 aa, Homo sapiens
  MOD_RES (12)..(12): Selenocysteine
  MOD_RES (43)..(43): Selenocysteine
  MOD_RES (82)..(82): Selenocysteine
  MOD_RES (94)..(94): Selenocysteine
  MOD_RES (105)..(105): Selenocysteine
  MOD_RES (119)..(119): Selenocysteine
LARPHDFFDAQXLDAIRHRAICFNLSAHIESLGKGHSVVFHSXVIAKRKEDSGKIKLLLHWMPEDILPDVWVNESERHQLKXKVVHLSKLPKDXALLLDPNIYRXMPQKRLKRSDKPFXFCHDCEASSAM

SEQ ID NO: 1858 - protein, 140 aa, Homo sapiens
  MOD_RES (31)..(31): Selenocysteine
  MOD_RES (70)..(70): Selenocysteine
  MOD_RES (82)..(82): Selenocysteine
  MOD_RES (93)..(93): Selenocysteine
  MOD_RES (105)..(105): Selenocysteine
LDAIRHRAICFNLSAHIESLGKGHSVVFHSXVIAKRKEDSGKIKLLLHWMPEDILPDVWVNESERHQLKXKVVHLSKLPKDXALLLDPNIYRXMPQKRLKRWSFXLVAQAGVQWRDLGSPQPPLPGFKRFFCLSFLSSWD

SEQ ID NO: 1859 - protein, 503 aa, Homo sapiens
  MOD_RES (6)..(6): Selenocysteine
  MOD_RES (81)..(81): Selenocysteine
  MOD_RES (137)..(137): Selenocysteine
  MOD_RES (191)..(191): Selenocysteine
  MOD_RES (199)..(199): Selenocysteine
  MOD_RES (228)..(228): Selenocysteine
  MOD_RES (235)..(235): Selenocysteine
  MOD_RES (242)..(242): Selenocysteine
  MOD_RES (252)..(253): Selenocysteine
  MOD_RES (307)..(307): Selenocysteine
  MOD_RES (310)..(310): Selenocysteine
  MOD_RES (321)..(321): Selenocysteine
  MOD_RES (351)..(351): Selenocysteine
  MOD_RES (402)..(402): Selenocysteine
  MOD_RES (433)..(433): Selenocysteine
  MOD_RES (472)..(472): Selenocysteine
  MOD_RES (484)..(484): Selenocysteine
  MOD_RES (495)..(495): Selenocysteine
MAAAIXDMADLEELSRLSPLPPGSPGSAARGRAEPPEEEEEEEEEEEEAEAEAVAALLLNGGSGGGGGGGGGGVGGGEAEXMSEPSPESASQAGEDEDEEEDDEEEEDESSSSGGGEEESSAESLVGSSGGSSSDEXRSLSPGAASSSSGDGDGKEGLEEPKGPRGSQGGGGGGSSSSSVVSSGGDEGYGXGGGGSSAXSGGRRGSLEMSSDGEPLSRMDSEDSISSXIMDVDSXISSGRSXPAMMNGQGSXXSSSKNIAYNCCWDQCQACFNSSPDLADHIRSIHVDGQRGGVFVCLWKGCKVYNXPSXSQSWLQRHMLXHSGDKPFKCVVGGCNASFASQGGLARHVPXHFSQQNSSKVSSQPKAKEESPSKAGMNKRRKLKNKRRRSLPRPHDFFDAQXLDAIRHRAICFNLSAHIESLGKGHSVVFHSXVIAKRKEDSGKIKLLLHWMPEDILPDVWVNESERHQLKXKVVHLSKLPKDXALLLDPNIYRXMPQKRLKR

SEQ ID NO: 1860 - protein, 517 aa, Homo sapiens
  MOD_RES (6)..(6): Selenocysteine
  MOD_RES (81)..(81): Selenocysteine
  MOD_RES (137)..(137): Selenocysteine
  MOD_RES (191)..(191): Selenocysteine
  MOD_RES (199)..(199): Selenocysteine
  MOD_RES (228)..(228): Selenocysteine
  MOD_RES (235)..(235): Selenocysteine
  MOD_RES (242)..(242): Selenocysteine
  MOD_RES (252)..(253): Selenocysteine
  MOD_RES (307)..(307): Selenocysteine
  MOD_RES (310)..(310): Selenocysteine
  MOD_RES (321)..(321): Selenocysteine
  MOD_RES (351)..(351): Selenocysteine
  MOD_RES (402)..(402): Selenocysteine
  MOD_RES (433)..(433): Selenocysteine
  MOD_RES (472)..(472): Selenocysteine
  MOD_RES (484)..(484): Selenocysteine
  MOD_RES (495)..(495): Selenocysteine
  MOD_RES (504)..(504): Selenocysteine
MAAAIXDMADLEELSRLSPLPPGSPGSAARGRAEPPEEEEEEEEEEEEAEAEAVAALLLNGGSGGGGGGGGGGVGGGEAEXMSEPSPESASQAGEDEDEEEDDEEEEDESSSSGGGEEESSAESLVGSSGGSSSDEXRSLSPGAASSSSGDGDGKEGLEEPKGPRGSQGGGGGGSSSSSVVSSGGDEGYGXGGGGSSAXSGGRRGSLEMSSDGEPLSRMDSEDSISSXIMDVDSXISSGRSXPAMMNGQGSXXSSSKNIAYNCCWDQCQACFNSSPDLADHIRSIHVDGQRGGVFVCLWKGCKVYNXPSXSQSWLQRHMLXHSGDKPFKCVVGGCNASFASQGGLARHVPXHFSQQNSSKVSSQPKAKEESPSKAGMNKRRKLKNKRRRSLPRPHDFFDAQXLDAIRHRAICFNLSAHIESLGKGHSVVFHSXVIAKRKEDSGKIKLLLHWMPEDILPDVWVNESERHQLKXKVVHLSKLPKDXALLLDPNIYRXMPQKRLKRXLIRKVFNLYLSKQ

SEQ ID NO: 1861 - protein, 110 aa, Homo sapiens
  MOD_RES (6)..(6): Selenocysteine
  MOD_RES (13)..(13): Selenocysteine
  MOD_RES (23)..(24): Selenocysteine
  MOD_RES (78)..(78): Selenocysteine
  MOD_RES (81)..(81): Selenocysteine
  MOD_RES (92)..(92): Selenocysteine
MDVDSXISSGRSXPAMMNGQGSXXSSSKNIAYNCCWDQCQACFNSSPDLADHIRSIHVDGQRGGVFVCLWKGCKVYNXPSXSQSWLQRHMLXHSGDKPFKCVVGGCNASF

SEQ ID NO: 1862 - protein, 274 aa, Homo sapiens
  MOD_RES (6)..(6): Selenocysteine
  MOD_RES (13)..(13): Selenocysteine
  MOD_RES (23)..(24): Selenocysteine
  MOD_RES (78)..(78): Selenocysteine
  MOD_RES (81)..(81): Selenocysteine
  MOD_RES (92)..(92): Selenocysteine
  MOD_RES (122)..(122): Selenocysteine
  MOD_RES (173)..(173): Selenocysteine
  MOD_RES (204)..(204): Selenocysteine
  MOD_RES (243)..(243): Selenocysteine
  MOD_RES (255)..(255): Selenocysteine
  MOD_RES (266)..(266): Selenocysteine
MDVDSXISSGRSXPAMMNGQGSXXSSSKNIAYNCCWDQCQACFNSSPDLADHIRSIHVDGQRGGVFVCLWKGCKVYNXPSXSQSWLQRHMLXHSGDKPFKCVVGGCNASFASQGGLARHVPXHFSQQNSSKVSSQPKAKEESPSKAGMNKRRKLKNKRRRSLPRPHDFFDAQXLDAIRHRAICFNLSAHIESLGKGHSVVFHSXVIAKRKEDSGKIKLLLHWMPEDILPDVWVNESERHQLKXKVVHLSKLPKDXALLLDPNIYRXMPQKRLKR

SEQ ID NO: 1863 - protein, 301 aa, Homo sapiens
  MOD_RES (3)..(3): Selenocysteine
  MOD_RES (12)..(12): Selenocysteine
  MOD_RES (19)..(19): Selenocysteine
  MOD_RES (26)..(26): Selenocysteine
  MOD_RES (36)..(37): Selenocysteine
  MOD_RES (91)..(91): Selenocysteine
  MOD_RES (94)..(94): Selenocysteine
  MOD_RES (105)..(105): Selenocysteine
  MOD_RES (135)..(135): Selenocysteine
  MOD_RES (186)..(186): Selenocysteine
  MOD_RES (217)..(217): Selenocysteine
  MOD_RES (256)..(256): Selenocysteine
  MOD_RES (268)..(268): Selenocysteine
  MOD_RES (279)..(279): Selenocysteine
  MOD_RES (288)..(288): Selenocysteine
MYXRRYSSISSXIMDVDSXISSGRSXPAMMNGQGSXXSSSKNIAYNCCWDQCQACFNSSPDLADHIRSIHVDGQRGGVFVCLWKGCKVYNXPSXSQSWLQRHMLXHSGDKPFKCVVGGCNASFASQGGLARHVPXHFSQQNSSKVSSQPKAKEESPSKAGMNKRRKLKNKRRRSLPRPHDFFDAQXLDAIRHRAICFNLSAHIESLGKGHSVVFHSXVIAKRKEDSGKIKLLLHWMPEDILPDVWVNESERHQLKXKVVHLSKLPKDXALLLDPNIYRXMPQKRLKRXLIRKVFNLYLSKQ

SEQ ID NO: 1864 - protein, 179 aa, Homo sapiens
  MOD_RES (18)..(18): Selenocysteine
  MOD_RES (66)..(66): Selenocysteine
  MOD_RES (72)..(72): Selenocysteine
  MOD_RES (74)..(74): Selenocysteine
  MOD_RES (120)..(120): Selenocysteine
  MOD_RES (158)..(158): Selenocysteine
  MOD_RES (164)..(164): Selenocysteine
MVPREAPESAQCLCPSLXIPNAKDVLRKRHKRRSRQHQRFMARKALLQEQGLLSMPPEPGSSPLPXPFGAAXAXEAASSGKQCLRAGSGSAPCSRRPAPGKASGPLPSKCVAIDCEMVGXGPRGRVSELARCSIVSYHGNVLYDKYIRPEMPIADYRXRWSGIXRQHMRKAVPFQVAQK

SEQ ID NO: 1865 - protein, 325 aa, Homo sapiens
  MOD_RES (18)..(18): Selenocysteine
  MOD_RES (66)..(66): Selenocysteine
  MOD_RES (72)..(72): Selenocysteine
  MOD_RES (74)..(74): Selenocysteine
  MOD_RES (120)..(120): Selenocysteine
  MOD_RES (158)..(158): Selenocysteine
  MOD_RES (164)..(164): Selenocysteine
  MOD_RES (211)..(211): Selenocysteine
  MOD_RES (214)..(215): Selenocysteine
  MOD_RES (228)..(228): Selenocysteine
  MOD_RES (260)..(261): Selenocysteine
  MOD_RES (283)..(283): Selenocysteine
  MOD_RES (294)..(294): Selenocysteine
MVPREAPESAQCLCPSLXIPNAKDVLRKRHKRRSRQHQRFMARKALLQEQGLLSMPPEPGSSPLPXPFGAAXAXEAASSGKQCLRAGSGSAPCSRRPAPGKASGPLPSKCVAIDCEMVGXGPRGRVSELARCSIVSYHGNVLYDKYIRPEMPIADYRXRWSGIXRQHMRKAVPFQVAQKEILKLLKGKVVVGHALHNDFQALKYVHPRSQXRDXXYVPNFLSEPGLHXRARVSLKDLALQLLHKKIQVGQHGHSSVEDAXXAMELYRLVEVQWEQQEARSLWXCPEDREPDSSXDMEQYMEDQYWPDDLAHGSRGGAREAQDRRN

SEQ ID NO: 1866 - protein, 264 aa, Homo sapiens
  MOD_RES (14)..(14): Selenocysteine
  MOD_RES (37)..(37): Selenocysteine
  MOD_RES (43)..(43): Selenocysteine
  MOD_RES (49)..(49): Selenocysteine
  MOD_RES (56)..(56): Selenocysteine
  MOD_RES (88)..(89): Selenocysteine
  MOD_RES (182)..(182): Selenocysteine
  MOD_RES (210)..(210): Selenocysteine
  MOD_RES (228)..(228): Selenocysteine
  MOD_RES (254)..(254): Selenocysteine
MCHKNGFPQEGGIXAAFLQKRKLRLSKNHRPARAKVXEHVRGXRPGRAXAGPAASXRAAGSLFFDRWGNRGPAGCRGSSHLPQQLKFXXSDSCDRIKDEFQLLQAQYHSLKLECDKLASEKSEMQRHYVMYYEMSYGLNIEMHKQAEIVKRLNGICAQVLPYLSQEHQQQVLGAIERAKQVXAPELNSIIRQQLQAHQLSQLQALALPLXPLPVGLQPPSLPAVSAGXGLLSLSALGSQAHLSKEDKNGHDGDXHQEDDGEKSD

SEQ ID NO: 1867 - protein, 48 aa, Homo sapiens
  MOD_RES (21)..(22): Selenocysteine
MMFPQSRHSGSSHLPQQLKFXXSDSCDRIKDEFQLLQAQYHRLRSSKG

SEQ ID NO: 1868 - protein, 197 aa, Homo sapiens
  MOD_RES (21)..(22): Selenocysteine
  MOD_RES (115)..(115): Selenocysteine
  MOD_RES (143)..(143): Selenocysteine
  MOD_RES (161)..(161): Selenocysteine
  MOD_RES (187)..(187): Selenocysteine
MMFPQSRHSGSSHLPQQLKFXXSDSCDRIKDEFQLLQAQYHSLKLECDKLASEKSEMQRHYVMYYEMSYGLNIEMHKQAEIVKRLNGICAQVLPYLSQEHQQQVLGAIERAKQVXAPELNSIIRQQLQAHQLSQLQALALPLXPLPVGLQPPSLPAVSAGXGLLSLSALGSQAHLSKEDKNGHDGDXHQEDDGEKSD

SEQ ID NO: 1869 - protein, 141 aa, Homo sapiens
  MOD_RES (59)..(59): Selenocysteine
  MOD_RES (87)..(87): Selenocysteine
  MOD_RES (105)..(105): Selenocysteine
  MOD_RES (131)..(131): Selenocysteine
MQRHYVMYYEMSYGLNIEMHKQAEIVKRLNGICAQVLPYLSQEHQQQVLGAIERAKQVXAPELNSIIRQQLQAHQLSQLQALALPLXPLPVGLQPPSLPAVSAGXGLLSLSALGSQAHLSKEDKNGHDGDXHQEDDGEKSD

SEQ ID NO: 1870 - protein, 264 aa, Homo sapiens
  MOD_RES (1)..(1): Any amino acid
  MOD_RES (23)..(23): Selenocysteine
  MOD_RES (29)..(29): Selenocysteine
  MOD_RES (35)..(35): Selenocysteine
  MOD_RES (42)..(42): Selenocysteine
  MOD_RES (74)..(75): Selenocysteine
  MOD_RES (168)..(168): Selenocysteine
  MOD_RES (182)..(182): Selenocysteine
  MOD_RES (189)..(189): Selenocysteine
  MOD_RES (224)..(225): Selenocysteine
XAFLQKRKLRLSKNHRPARAKVXEHVRGXRPGRAXAGPAASXRAAGSLFFDRWGNRGPAGCRGSSHLPQQLKFXXSDSCDRIKDEFQLLQAQYHSLKLECDKLASEKSEMQRHYVMYYEMSYGLNIEMHKQAEIVKRLNGICAQVLPYLSQEHQQQVLGAIERAKQVXAPELNSIIRVCMGXWAGGRGXGGPQAANVPLPRPAAAAPSPPAVPAAGPGPALDPXXRGAAAAFAAGGQRRHRPPLAVRAGFPGPPLQGRQERARW

SEQ ID NO: 1871 - protein, 92 aa, Homo sapiens
  MOD_RES (3)..(4): Selenocysteine
  MOD_RES (24)..(24): Selenocysteine
  MOD_RES (29)..(29): Selenocysteine
  MOD_RES (34)..(34): Selenocysteine
  MOD_RES (46)..(46): Selenocysteine
  MOD_RES (50)..(50): Selenocysteine
  MOD_RES (59)..(59): Selenocysteine
  MOD_RES (63)..(63): Selenocysteine
GIXXCNGKEQVKRKKSSKSEAKGXVSKVXGKKIXKIISLGKKKPSXDEQXSSAEEDVPXCGKXALPGDEQRAPKWVSFSPAVVSVPSSSKAR

SEQ ID NO: 1872 - protein, 730 aa, Homo sapiens
  MOD_RES (21)..(21): Selenocysteine
  MOD_RES (23)..(23): Selenocysteine
  MOD_RES (32)..(32): Selenocysteine
  MOD_RES (55)..(55): Selenocysteine
  MOD_RES (86)..(86): Selenocysteine
  MOD_RES (110)..(110): Selenocysteine
  MOD_RES (137)..(137): Selenocysteine
  MOD_RES (170)..(170): Selenocysteine
  MOD_RES (179)..(179): Selenocysteine
  MOD_RES (204)..(204): Selenocysteine
  MOD_RES (220)..(220): Selenocysteine
  MOD_RES (224)..(224): Selenocysteine
  MOD_RES (294)..(295): Selenocysteine
  MOD_RES (315)..(315): Selenocysteine
  MOD_RES (320)..(320): Selenocysteine
  MOD_RES (325)..(325): Selenocysteine
  MOD_RES (337)..(337): Selenocysteine
  MOD_RES (341)..(341): Selenocysteine
  MOD_RES (350)..(350): Selenocysteine
  MOD_RES (381)..(381): Selenocysteine
  MOD_RES (385)..(385): Selenocysteine
  MOD_RES (408)..(408): Selenocysteine
  MOD_RES (440)..(440): Selenocysteine
  MOD_RES (444)..(444): Selenocysteine
  MOD_RES (465)..(465): Selenocysteine
  MOD_RES (469)..(469): Selenocysteine
  MOD_RES (487)..(487): Selenocysteine
  MOD_RES (497)..(497): Selenocysteine
  MOD_RES (524)..(524): Selenocysteine
  MOD_RES (529)..(529): Selenocysteine
  MOD_RES (546)..(546): Selenocysteine
  MOD_RES (569)..(569): Selenocysteine
  MOD_RES (637)..(637): Selenocysteine
  MOD_RES (652)..(652): Selenocysteine
  MOD_RES (663)..(663): Selenocysteine
  MOD_RES (675)..(675): Selenocysteine
  MOD_RES (686)..(686): Selenocysteine
  MOD_RES (689)..(689): Selenocysteine
  MOD_RES (730)..(730): Selenocysteine
MEELIVELRLFLELLDHEYLXSXVREKKAVIXNILLRIQSSKGFDVKDHAQKQEXANSLPAPPQMPLPEIPQPWLPPDSGPPPLPXSSLPEGYYEEAVPLSPGKAPEYIXSNYDSDAMSSSYESYDEEEEDGKGKKXRHQWPSEEASMDLVKDAKICAFLLRKKRFGQWXKLLCVIKDXKLLCYKSSKDQQPQMELPLQGCNIXYIPKDSKKKKHELKIXQQGXDPLVLAVQSKEQAEQWLKVIKEAYSGCSGPVDSECPPPPSSPVHKAELEKKLSSERPSSDGEGVVENGIXXCNGKEQVKRKKSSKSEAKGXVSKVXGKKIXKIISLGKKKPSXDEQXSSAEEDVPXCGYLNVLSNSRWRERWCRVKDNKLIFHKDRXDLKXHIVSIPLRGCEVIPGLDSKHPLXFRLLRNGQEVAVLEASSSEDMGRWIGILLAEXGSSXDPEALHYDYIDVEMSASVIQXAKQXFCFMNRRVISANPYLGGXSNGYAHPSGXALHYDDVPCINGSLKGKKPPVASNGVXGKGKXLSSQPKKADPAAVVKRXGSNAAQYKYGKNRVEADAKRLQXKEEELLKRKEALRNRLAQLRKERKDLRAAIEVNAGRKPQAILEEKLKQLEEECRQKEAERVSLELELXEVKESLKKALAGGVXLGLAIEPKSGXSSPQSPVFRHRXLENSPISSCDXSDXEGPVPVNSAAVLKKSQAAPGSSPCRGHVLRKAKEWELKNGX

SEQ ID NO: 1873 - protein, 814 aa, Homo sapiens
  MOD_RES (21)..(21): Selenocysteine
  MOD_RES (23)..(23): Selenocysteine
  MOD_RES (32)..(32): Selenocysteine
  MOD_RES (55)..(55): Selenocysteine
  MOD_RES (86)..(86): Selenocysteine
  MOD_RES (110)..(110): Selenocysteine
  MOD_RES (137)..(137): Selenocysteine
  MOD_RES (170)..(170): Selenocysteine
  MOD_RES (179)..(179): Selenocysteine
  MOD_RES (204)..(204): Selenocysteine
  MOD_RES (220)..(220): Selenocysteine
  MOD_RES (224)..(224): Selenocysteine
  MOD_RES (294)..(295): Selenocysteine
  MOD_RES (315)..(315): Selenocysteine
  MOD_RES (320)..(320): Selenocysteine
  MOD_RES (325)..(325): Selenocysteine
  MOD_RES (337)..(337): Selenocysteine
  MOD_RES (341)..(341): Selenocysteine
  MOD_RES (350)..(350): Selenocysteine
  MOD_RES (381)..(381): Selenocysteine
  MOD_RES (385)..(385): Selenocysteine
  MOD_RES (408)..(408): Selenocysteine
  MOD_RES (440)..(440): Selenocysteine
  MOD_RES (444)..(444): Selenocysteine
  MOD_RES (465)..(465): Selenocysteine
  MOD_RES (469)..(469): Selenocysteine
  MOD_RES (487)..(487): Selenocysteine
  MOD_RES (497)..(497): Selenocysteine
  MOD_RES (579)..(579): Selenocysteine
  MOD_RES (581)..(581): Selenocysteine
  MOD_RES (608)..(608): Selenocysteine
  MOD_RES (613)..(613): Selenocysteine
  MOD_RES (630)..(630): Selenocysteine
  MOD_RES (653)..(653): Selenocysteine
  MOD_RES (721)..(721): Selenocysteine
  MOD_RES (736)..(736): Selenocysteine
  MOD_RES (747)..(747): Selenocysteine
  MOD_RES (759)..(759): Selenocysteine
  MOD_RES (770)..(770): Selenocysteine
  MOD_RES (773)..(773): Selenocysteine
  MOD_RES (814)..(814): Selenocysteine
MEELIVELRLFLELLDHEYLXSXVREKKAVIXNILLRIQSSKGFDVKDHAQKQEXANSLPAPPQMPLPEIPQPWLPPDSGPPPLPXSSLPEGYYEEAVPLSPGKAPEYIXSNYDSDAMSSSYESYDEEEEDGKGKKXRHQWPSEEASMDLVKDAKICAFLLRKKRFGQWXKLLCVIKDXKLLCYKSSKDQQPQMELPLQGCNIXYIPKDSKKKKHELKIXQQGXDPLVLAVQSKEQAEQWLKVIKEAYSGCSGPVDSECPPPPSSPVHKAELEKKLSSERPSSDGEGVVENGIXXCNGKEQVKRKKSSKSEAKGXVSKVXGKKIXKIISLGKKKPSXDEQXSSAEEDVPXCGYLNVLSNSRWRERWCRVKDNKLIFHKDRXDLKXHIVSIPLRGCEVIPGLDSKHPLXFRLLRNGQEVAVLEASSSEDMGRWIGILLAEXGSSXDPEALHYDYIDVEMSASVIQXAKQXFCFMNRRVISANPYLGGXSNGYAHPSGXALHYDDVPCINGSWEPEDGFPASCSRGLGEEVLYDNAGLYDNLPPPHIFARYSPADRKASRLSADKLSSNHYKYPASAQSVXNXSSVGRASLGLNSQLKGKKPPVASNGVXGKGKXLSSQPKKADPAAVVKRXGSNAAQYKYGKNRVEADAKRLQXKEEELLKRKEALRNRLAQLRKERKDLRAAIEVNAGRKPQAILEEKLKQLEEECRQKEAERVSLELELXEVKESLKKALAGGVXLGLAIEPKSGXSSPQSPVFRHRXLENSPISSCDXSDXEGPVPVNSAAVLKKSQAAPGSSPCRGHVLRKAKEWELKNGX

SEQ ID NO: 1874 - protein, 814 aa, Homo sapiens
  MOD_RES (12)..(12): Selenocysteine
  MOD_RES (29)..(29): Selenocysteine
  MOD_RES (45)..(45): Selenocysteine
  MOD_RES (61)..(61): Selenocysteine
  MOD_RES (117)..(117): Selenocysteine
  MOD_RES (132)..(132): Selenocysteine
  MOD_RES (242)..(242): Selenocysteine
  MOD_RES (284)..(284): Selenocysteine
  MOD_RES (320)..(320): Selenocysteine
  MOD_RES (345)..(345): Selenocysteine
  MOD_RES (356)..(356): Selenocysteine
  MOD_RES (450)..(450): Selenocysteine
  MOD_RES (456)..(456): Selenocysteine
  MOD_RES (488)..(488): Selenocysteine
  MOD_RES (512)..(512): Selenocysteine
  MOD_RES (518)..(518): Selenocysteine
  MOD_RES (522)..(522): Selenocysteine
  MOD_RES (541)..(541): Selenocysteine
  MOD_RES (561)..(561): Selenocysteine
  MOD_RES (569)..(569): Selenocysteine
  MOD_RES (581)..(581): Selenocysteine
  MOD_RES (611)..(612): Selenocysteine
  MOD_RES (617)..(617): Selenocysteine
  MOD_RES (635)..(635): Selenocysteine
  MOD_RES (650)..(650): Selenocysteine
  MOD_RES (661)..(661): Selenocysteine
  MOD_RES (669)..(669): Selenocysteine
  MOD_RES (699)..(699): Selenocysteine
  MOD_RES (704)..(704): Selenocysteine
  MOD_RES (753)..(753): Selenocysteine
  MOD_RES (756)..(757): Selenocysteine
  MOD_RES (760)..(761): Selenocysteine
  MOD_RES (770)..(770): Selenocysteine
  MOD_RES (778)..(778): Selenocysteine
  MOD_RES (784)..(785): Selenocysteine
  MOD_RES (796)..(796): Selenocysteine
  MOD_RES (800)..(800): Selenocysteine
MERYKALEQLLXELDDFLKILDQENLSSXALVKKSCLAELLRLYXKSSSSDEEYIYMNKVXINKQQNAESQGKAPEEQGLLPNGEPSQHSSAPQKSLPDLPPPKMIPERKQLAIPKXESPEGYYEEAEPYDXSLNEDGEAVSSSYESYDEEDGSKGKSAPYQWPSPEAGIELMRDARICAFLWRKKWLGQWAKQLCVIKDNRLLCYKSSKDHSPQLDVNLLGSSVIHKEKQVRKKEHKLKIXPMNADVIVLGLQSKDQAEQWLRVIQEVSGLPSEGASEGNQYXPDAQRFNCQKPDIAEKYLSASEYGSSVDGHPEVPEXKDVKKKCSAGLKLSNLMNLGRKKSXSLEPVERSLEXSSYLNVLVNSQWKSRWCSVRDNHLHFYQDRNRSKVAQQPLSLVGCEVVPDPSPDHLYSFRILHKGEELAKLEAKSSEEMGHWLGLLLSESGSKXDPEEFXYDYVDADRVSCIVSAAKNSLLLMQRKFSEPNXYIDGLPSQDRQEELYDDVDLSELXAAVEPXEEAXPVADDPNERESDRVYLDLXPVKSFLHGPSSAQAQASSPXLSCLDNAXEALPADSGPGPXPDEPCIKCPENLGEQQLESLEPEDPSLRIXXVKIQXEQQRISFPPSCPDAVVAXPPGASPPVKDRLRVXSAEIKLGKNRXEAEVKRYXEEKERLEKKKEEIRGHLAQLRKEKRELKEXLLKCXDKEVLASLEQKLKEIDEECRGEESRRVDLELSIMEVKDNLKKAEAGPVXLGXXVDXXHLENPKAVXPASAPDCXPVNSAXXLKNRPLSVVVXGKGXVLQKAKEWEKKGAS

SEQ ID NO: 1875 - protein, 818 aa, Homo sapiens
  MOD_RES (12)..(12): Selenocysteine
  MOD_RES (29)..(29): Selenocysteine
  MOD_RES (45)..(45): Selenocysteine
  MOD_RES (61)..(61): Selenocysteine
  MOD_RES (117)..(117): Selenocysteine
  MOD_RES (132)..(132): Selenocysteine
  MOD_RES (242)..(242): Selenocysteine
  MOD_RES (284)..(284): Selenocysteine
  MOD_RES (320)..(320): Selenocysteine
  MOD_RES (345)..(345): Selenocysteine
  MOD_RES (356)..(356): Selenocysteine
  MOD_RES (450)..(450): Selenocysteine
  MOD_RES (456)..(456): Selenocysteine
  MOD_RES (488)..(488): Selenocysteine
  MOD_RES (512)..(512): Selenocysteine
  MOD_RES (518)..(518): Selenocysteine
  MOD_RES (522)..(522): Selenocysteine
  MOD_RES (541)..(541): Selenocysteine
  MOD_RES (561)..(561): Selenocysteine
  MOD_RES (569)..(569): Selenocysteine
  MOD_RES (581)..(581): Selenocysteine
  MOD_RES (611)..(612): Selenocysteine
  MOD_RES (617)..(617): Selenocysteine
  MOD_RES (635)..(635): Selenocysteine
  MOD_RES (650)..(650): Selenocysteine
  MOD_RES (661)..(661): Selenocysteine
  MOD_RES (669)..(669): Selenocysteine
  MOD_RES (699)..(699): Selenocysteine
  MOD_RES (704)..(704): Selenocysteine
  MOD_RES (753)..(753): Selenocysteine
  MOD_RES (756)..(757): Selenocysteine
  MOD_RES (760)..(761): Selenocysteine
  MOD_RES (774)..(774): Selenocysteine
  MOD_RES (782)..(782): Selenocysteine
  MOD_RES (788)..(789): Selenocysteine
  MOD_RES (800)..(800): Selenocysteine
  MOD_RES (804)..(804): Selenocysteine
MERYKALEQLLXELDDFLKILDQENLSSXALVKKSCLAELLRLYXKSSSSDEEYIYMNKVXINKQQNAESQGKAPEEQGLLPNGEPSQHSSAPQKSLPDLPPPKMIPERKQLAIPKXESPEGYYEEAEPYDXSLNEDGEAVSSSYESYDEEDGSKGKSAPYQWPSPEAGIELMRDARICAFLWRKKWLGQWAKQLCVIKDNRLLCYKSSKDHSPQLDVNLLGSSVIHKEKQVRKKEHKLKIXPMNADVIVLGLQSKDQAEQWLRVIQEVSGLPSEGASEGNQYXPDAQRFNCQKPDIAEKYLSASEYGSSVDGHPEVPEXKDVKKKCSAGLKLSNLMNLGRKKSXSLEPVERSLEXSSYLNVLVNSQWKSRWCSVRDNHLHFYQDRNRSKVAQQPLSLVGCEVVPDPSPDHLYSFRILHKGEELAKLEAKSSEEMGHWLGLLLSESGSKXDPEEFXYDYVDADRVSCIVSAAKNSLLLMQRKFSEPNXYIDGLPSQDRQEELYDDVDLSELXAAVEPXEEAXPVADDPNERESDRVYLDLXPVKSFLHGPSSAQAQASSPXLSCLDNAXEALPADSGPGPXPDEPCIKCPENLGEQQLESLEPEDPSLRIXXVKIQXEQQRISFPPSCPDAVVAXPPGASPPVKDRLRVXSAEIKLGKNRXEAEVKRYXEEKERLEKKKEEIRGHLAQLRKEKRELKEXLLKCXDKEVLASLEQKLKEIDEECRGEESRRVDLELSIMEVKDNLKKAEAGPVXLGXXVDXXHLENVSPRPKAVXPASAPDCXPVNSAXXLKNRPLSVVVXGKGXVLQKAKEWEKKGAS

SEQ ID NO: 1876 - protein, 312 aa, Homo sapiens
  MOD_RES (30)..(30): Selenocysteine
  MOD_RES (47)..(47): Selenocysteine
  MOD_RES (63)..(63): Selenocysteine
  MOD_RES (79)..(79): Selenocysteine
  MOD_RES (135)..(135): Selenocysteine
  MOD_RES (150)..(150): Selenocysteine
  MOD_RES (260)..(260): Selenocysteine
  MOD_RES (302)..(302): Selenocysteine
MERYKAQGCCCLVVQRRIRQVSASLEQLLXELDDFLKILDQENLSSXALVKKSCLAELLRLYXKSSSSDEEYIYMNKVXINKQQNAESQGKAPEEQGLLPNGEPSQHSSAPQKSLPDLPPPKMIPERKQLAIPKXESPEGYYEEAEPYDXSLNEDGEAVSSSYESYDEEDGSKGKSAPYQWPSPEAGIELMRDARICAFLWRKKWLGQWAKQLCVIKDNRLLCYKSSKDHSPQLDVNLLGSSVIHKEKQVRKKEHKLKIXPMNADVIVLGLQSKDQAEQWLRVIQEVSGLPSEGASEGNQYXPDAQRFNCQK

SEQ ID NO: 1877 - protein, 167 aa, Homo sapiens
  MOD_RES (13)..(14): Selenocysteine
  MOD_RES (17)..(17): Selenocysteine
  MOD_RES (32)..(32): Selenocysteine
  MOD_RES (59)..(59): Selenocysteine
  MOD_RES (67)..(67): Selenocysteine
  MOD_RES (72)..(72): Selenocysteine
  MOD_RES (134)..(134): Selenocysteine
  MOD_RES (139)..(139): Selenocysteine
  MOD_RES (141)..(141): Selenocysteine
  MOD_RES (158)..(158): Selenocysteine
AADCHLSRIVQAXXLLXMDKYAPDDIPNINSXCFKLNSLQLQALLQNYHCAPDEPFIPXDLIENVVXVAENXADELARSDGREVQLEEDPDLQLPFLLPEDGYSCDVVRNIPNGLQEFLDPLCQRGFCRLIPHXRSPGXWXIYFEGADYESHLLRENXELASILRVP

SEQ ID NO: 1878 - protein, 1781 aa, Homo sapiens
  MOD_RES (15)..(15): Selenocysteine
  MOD_RES (23)..(23): Selenocysteine
  MOD_RES (25)..(26): Selenocysteine
  MOD_RES (32)..(32): Selenocysteine
  MOD_RES (119)..(119): Selenocysteine
  MOD_RES (168)..(168): Selenocysteine
  MOD_RES (171)..(171): Selenocysteine
  MOD_RES (173)..(173): Selenocysteine
  MOD_RES (208)..(208): Selenocysteine
  MOD_RES (224)..(224): Selenocysteine
  MOD_RES (229)..(230): Selenocysteine
  MOD_RES (314)..(314): Selenocysteine
  MOD_RES (322)..(322): Selenocysteine
  MOD_RES (337)..(337): Selenocysteine
  MOD_RES (364)..(364): Selenocysteine
  MOD_RES (385)..(385): Selenocysteine
  MOD_RES (389)..(389): Selenocysteine
  MOD_RES (412)..(412): Selenocysteine
  MOD_RES (419)..(419): Selenocysteine
  MOD_RES (421)..(421): Selenocysteine
  MOD_RES (429)..(429): Selenocysteine
  MOD_RES (439)..(440): Selenocysteine
  MOD_RES (491)..(492): Selenocysteine
  MOD_RES (503)..(503): Selenocysteine
  MOD_RES (507)..(507): Selenocysteine
  MOD_RES (511)..(512): Selenocysteine
  MOD_RES (525)..(525): Selenocysteine
  MOD_RES (550)..(550): Selenocysteine
  MOD_RES (582)..(582): Selenocysteine
  MOD_RES (586)..(586): Selenocysteine
  MOD_RES (594)..(594): Selenocysteine
  MOD_RES (616)..(616): Selenocysteine
  MOD_RES (619)..(619): Selenocysteine
  MOD_RES (671)..(671): Selenocysteine
  MOD_RES (724)..(724): Selenocysteine
  MOD_RES (726)..(726): Selenocysteine
  MOD_RES (742)..(742): Selenocysteine
  MOD_RES (763)..(763): Selenocysteine
  MOD_RES (809)..(810): Selenocysteine
  MOD_RES (813)..(813): Selenocysteine
  MOD_RES (828)..(828): Selenocysteine
  MOD_RES (855)..(855): Selenocysteine
  MOD_RES (863)..(863): Selenocysteine
  MOD_RES (868)..(868): Selenocysteine
  MOD_RES (930)..(930): Selenocysteine
  MOD_RES (935)..(935): Selenocysteine
  MOD_RES (937)..(937): Selenocysteine
  MOD_RES (954)..(954): Selenocysteine
  MOD_RES (968)..(968): Selenocysteine
  MOD_RES (970)..(970): Selenocysteine
  MOD_RES (1038)..(1038): Selenocysteine
  MOD_RES (1040)..(1040): Selenocysteine
  MOD_RES (1045)..(1045): Selenocysteine
  MOD_RES (1060)..(1060): Selenocysteine
  MOD_RES (1095)..(1095): Selenocysteine
  MOD_RES (1152)..(1153): Selenocysteine
  MOD_RES (1157)..(1157): Selenocysteine
  MOD_RES (1161)..(1161): Selenocysteine
  MOD_RES (1166)..(1166): Selenocysteine
  MOD_RES (1170)..(1170): Selenocysteine
  MOD_RES (1182)..(1182): Selenocysteine
  MOD_RES (1184)..(1184): Selenocysteine
  MOD_RES (1186)..(1186): Selenocysteine
  MOD_RES (1191)..(1191): Selenocysteine
  MOD_RES (1219)..(1219): Selenocysteine
  MOD_RES (1232)..(1232): Selenocysteine
  MOD_RES (1275)..(1275): Selenocysteine
  MOD_RES (1289)..(1289): Selenocysteine
  MOD_RES (1293)..(1293): Selenocysteine
  MOD_RES (1295)..(1295): Selenocysteine
  MOD_RES (1304)..(1304): Selenocysteine
  MOD_RES (1311)..(1311): Selenocysteine
  MOD_RES (1321)..(1321): Selenocysteine
  MOD_RES (1405)..(1405): Selenocysteine
  MOD_RES (1417)..(1417): Selenocysteine
  MOD_RES (1428)..(1428): Selenocysteine
  MOD_RES (1435)..(1435): Selenocysteine
  MOD_RES (1448)..(1448): Selenocysteine
  MOD_RES (1458)..(1458): Selenocysteine
  MOD_RES (1549)..(1549): Selenocysteine
  MOD_RES (1599)..(1599): Selenocysteine
  MOD_RES (1674)..(1674): Selenocysteine
  MOD_RES (1684)..(1684): Selenocysteine
  MOD_RES (1711)..(1711): Selenocysteine
  MOD_RES (1747)..(1747): Selenocysteine
  MOD_RES (1772)..(1772): Selenocysteine
  MOD_RES (1780)..(1780): Selenocysteine
MRFYFQDKAAGNFAXKCIRVSSXAXXQDVIEXLAEKFRPDMRMLSSPKYSLYEVHVSGEERRLDIDEKPLVVQLNWNKDDREGRFVLKNENDAIPPKKAQSNGPEKQEKEGVIQNFKRXLSKKEKKEKKKREKEALRQASDKDDRPFQGEDVENSRLAAEVYKDMPEXSFXRXISNPEVVMKRRRQQKLEKRMQEFRSSDGRPDSGGXLRIYADSLKPNIPYKXILLSXXDPADFAVAEALEKYGLEKENPKDYCIARVMLPPGAQHSDEKGAKEIILDDDECPLQIFREWPSDKGILVFQLKRRPPDHIPKKXKKHLEGKXPKGKERADGSGYGSXLPPEKLPYLVELSPGRRNHFAYYNYHXYEDGSDSRDKPKLYRLQLSVXEVGXEKLDDNSIQLFGPGIQPHHCDLXNMDGVVXVXPRSMDAEXYVEGQRISEXXMLQSGMKVQFGASHVFKFVDPSQDHALAKRSVDGGLMVKGPRHKPGIVQEXXFDLGGDIHSGXALPXSKSXXRLDSDRVSSASSXAERGMVKPMIRVEQQPDYRRQESRXQDASGPELILPASIEFRESSEDSFLSAIINYXNSSXVHFKLSPXYVLYMACRYVLSNQYRPDISPXERXHKVIAVVNKMVSMMEGVIQKQKNIAGALAFWMANASELLNFIKQDRDLSRIXLDAQDVLAHLVQMAFKYLVHCLQSELNNYMPAFLDDPEENSLQRPKIDDVLHXLXGAMSLLRRCRVNAALXIQLFSQLFHFINMWLFNRLVXDPDSGLCSHYWGAIIRQQLGHIEAWAEKQGLELAADCHLSRIVQAXXLLXMDKYAPDDIPNINSXCFKLNSLQLQALLQNYHCAPDEPFIPXDLIENVVXVAENXADELARSDGREVQLEEDPDLQLPFLLPEDGYSCDVVRNIPNGLQEFLDPLCQRGFCRLIPHXRSPGXWXIYFEGADYESHLLRENXELAQPLRKEPEIIXVXLKKQNGMGLSIVAAKGAGQDKLGIYVKSVVKGGAADVDGRLAAGDQLLSVDGRSLVGLSQERAAELMXRXSSVVXLEVAKQGAIYHGLAXLLNQPSPMMQRISDRRGSGKPRPKSEGFELYNNSXQNGSPESPQLPWAEYSEPKKLPGDDRLMKNRADHRSSPNVANQPPSPGGKSAYASGXXAKIXSVSXGNLCXEEQXPPPRPEAYPIPXQXYXREYFXFPASKSQDRMAPPQNQWPNYEEKPHMHXDSNHSSIAIQRVXRSQEELREDKAYQLERHRIEAAMDRKSDSDMWINQSSSLDSSXSSQEHLNHSSKSVXPASXLXKSGPGRWKXPAAIPAXPVAVSQPIRXDLPPPPPPPPVHYAGDFDGMSMDLPLPPPPSANQIGLPSAQVAAAERRKREEHQRWYEKEKARLEEERERKRREQERKLGQMRXQSLNPAPFSPLXAQQMKPEKPSXLQRPQEXVIRELQPQQQPRXIERRDLQYIXVSKEELSSGDSLSPDPWKRDAKEKLEKQQQMHIVDMLSKEIQELQSKPDRSAEESDRLRKLMLEWQFQKRLQESKQKDEDDEEEEDDDVDXMLIMQRLEAERRARDEERRRQQQLEEMRKREAEDRARQEEERRRQEEERXKRDAEEKRRQEEGYYSRLEAERRRQHDEAARRLLEPEAPGLCRPPLPRDYEPPSPSPAPGAPPPPPQRNASYLKXQVLSPDSLFXAKFVAYNEEEEEEDCSLAGPNSYPGSXGAAVGAHDACRDAKEKRSKSQDADSPGSSGAPENLXFKERQRLFSQGQDVSNKVKASRKLXELENELNXK

SEQ ID NO: 1879 - protein, 250 aa, Homo sapiens
  MOD_RES (34)..(34): Selenocysteine
  MOD_RES (57)..(57): Selenocysteine
  MOD_RES (65)..(65): Selenocysteine
  MOD_RES (67)..(68): Selenocysteine
  MOD_RES (74)..(74): Selenocysteine
  MOD_RES (160)..(160): Selenocysteine
  MOD_RES (209)..(209): Selenocysteine
  MOD_RES (212)..(212): Selenocysteine
  MOD_RES (214)..(214): Selenocysteine
  MOD_RES (249)..(249): Selenocysteine
MSAGGRDEERRKLADIIHHWNANRLDLFEISQPXEDLEFHGVMRFYFQDKAAGNFAXKCIRVSSXAXXQDVIEXLAEKFRPDMRMLSSPKYSLYEVHVSGEERRLDIDEKPLVVQLNWNKDDREGRFVLKNENDAIPPKAQSNGPEKQEKEGVIQNFKRXLSKKEKKEKKKREKEALRQASDKDDRPFQGEDVENSRLAAEVYKDMPEXSFXRXISNPEVVMKRRRQQKLEKRMQEFRSSDGRPDSGGXL

SEQ ID NO: 1880 - protein, 247 aa, Homo sapiens
  MOD_RES (34)..(34): Selenocysteine
  MOD_RES (57)..(57): Selenocysteine
  MOD_RES (65)..(65): Selenocysteine
  MOD_RES (67)..(68): Selenocysteine
  MOD_RES (74)..(74): Selenocysteine
  MOD_RES (161)..(161): Selenocysteine
  MOD_RES (210)..(210): Selenocysteine
  MOD_RES (213)..(213): Selenocysteine
  MOD_RES (215)..(215): Selenocysteine
MSAGGRDEERRKLADIIHHWNANRLDLFEISQPXEDLEFHGVMRFYFQDKAAGNFAXKCIRVSSXAXXQDVIEXLAEKFRPDMRMLSSPKYSLYEVHVSGEERRLDIDEKPLVVQLNWNKDDREGRFVLKNENDAIPPKKAQSNGPEKQEKEGVIQNFKRXLSKKEKKEKKKREKEALRQASDKDDRPFQGEDVENSRLAAEVYKDMPEXSFXRXISNPEVVMKRRRQQKLEKRMQEFRSSDGRPDS

SEQ ID NO: 1881 - protein, 1743 aa, Homo sapiens
  MOD_RES (34)..(34): Selenocysteine
  MOD_RES (57)..(57): Selenocysteine
  MOD_RES (65)..(65): Selenocysteine
  MOD_RES (67)..(68): Selenocysteine
  MOD_RES (74)..(74): Selenocysteine
  MOD_RES (159)..(159): Selenocysteine
  MOD_RES (208)..(208): Selenocysteine
  MOD_RES (211)..(211): Selenocysteine
  MOD_RES (213)..(213): Selenocysteine
  MOD_RES (248)..(248): Selenocysteine
  MOD_RES (264)..(264): Selenocysteine
  MOD_RES (269)..(270): Selenocysteine
  MOD_RES (354)..(354): Selenocysteine
  MOD_RES (362)..(362): Selenocysteine
  MOD_RES (377)..(377): Selenocysteine
  MOD_RES (410)..(410): Selenocysteine
  MOD_RES (414)..(414): Selenocysteine
  MOD_RES (437)..(437): Selenocysteine
  MOD_RES (444)..(444): Selenocysteine
  MOD_RES (446)..(446): Selenocysteine
  MOD_RES (454)..(454): Selenocysteine
  MOD_RES (464)..(465): Selenocysteine
  MOD_RES (516)..(517): Selenocysteine
  MOD_RES (528)..(528): Selenocysteine
  MOD_RES (532)..(532): Selenocysteine
  MOD_RES (536)..(537): Selenocysteine
  MOD_RES (550)..(550): Selenocysteine
  MOD_RES (575)..(575): Selenocysteine
  MOD_RES (607)..(607): Selenocysteine
  MOD_RES (611)..(611): Selenocysteine
  MOD_RES (619)..(619): Selenocysteine
  MOD_RES (641)..(641): Selenocysteine
  MOD_RES (644)..(644): Selenocysteine
  MOD_RES (696)..(696): Selenocysteine
  MOD_RES (749)..(749): Selenocysteine
  MOD_RES (751)..(751): Selenocysteine
  MOD_RES (767)..(767): Selenocysteine
  MOD_RES (788)..(788): Selenocysteine
  MOD_RES (834)..(835): Selenocysteine
  MOD_RES (838)..(838): Selenocysteine
  MOD_RES (853)..(853): Selenocysteine
  MOD_RES (880)..(880): Selenocysteine
  MOD_RES (888)..(888): Selenocysteine
  MOD_RES (893)..(893): Selenocysteine
  MOD_RES (955)..(955): Selenocysteine
  MOD_RES (960)..(960): Selenocysteine
  MOD_RES (962)..(962): Selenocysteine
  MOD_RES (979)..(979): Selenocysteine
  MOD_RES (993)..(993): Selenocysteine
  MOD_RES (995)..(995): Selenocysteine
  MOD_RES (1062)..(1062): Selenocysteine
  MOD_RES (1064)..(1064): Selenocysteine
  MOD_RES (1069)..(1069): Selenocysteine
  MOD_RES (1084)..(1084): Selenocysteine
  MOD_RES (1119)..(1119): Selenocysteine
  MOD_RES (1176)..(1177): Selenocysteine
  MOD_RES (1181)..(1181): Selenocysteine
  MOD_RES (1185)..(1185): Selenocysteine
  MOD_RES (1190)..(1190): Selenocysteine
  MOD_RES (1194)..(1194): Selenocysteine
  MOD_RES (1206)..(1206): Selenocysteine
  MOD_RES (1208)..(1208): Selenocysteine
  MOD_RES (1210)..(1210): Selenocysteine
  MOD_RES (1215)..(1215): Selenocysteine
  MOD_RES (1243)..(1243): Selenocysteine
  MOD_RES (1256)..(1256): Selenocysteine
  MOD_RES (1299)..(1299): Selenocysteine
  MOD_RES (1313)..(1313): Selenocysteine
  MOD_RES (1317)..(1317): Selenocysteine
  MOD_RES (1319)..(1319): Selenocysteine
  MOD_RES (1328)..(1328): Selenocysteine
  MOD_RES (1335)..(1335): Selenocysteine
  MOD_RES (1345)..(1345): Selenocysteine
  MOD_RES (1429)..(1429): Selenocysteine
  MOD_RES (1441)..(1441): Selenocysteine
  MOD_RES (1452)..(1452): Selenocysteine
  MOD_RES (1459)..(1459): Selenocysteine
  MOD_RES (1472)..(1472): Selenocysteine
  MOD_RES (1482)..(1482): Selenocysteine
  MOD_RES (1573)..(1573): Selenocysteine
  MOD_RES (1625)..(1625): Selenocysteine
  MOD_RES (1673)..(1673): Selenocysteine
  MOD_RES (1709)..(1709): Selenocysteine
  MOD_RES (1734)..(1734): Selenocysteine
  MOD_RES (1742)..(1742): Selenocysteine
MSAGGRDEERRKLADIIHHWNANRLDLFEISQPXEDLEFHGVMRFYFQDKAAGNFAXKCIRVSSXAXXQDVIEXLAEKFRPDMRMLSSPKYSLYEVHVSGERRLDIDEKPLVVQLNWNKDDREGRFVLKNENDAIPPKAQSNGPEKQEKEGVIQNFKRXLSKKEKKEKKKREKEALRQASDKDDRPFQGEDVENSRLAAEVYKDMPEXSFXRXISNPEVVMKRRRQQKLEKRMQEFRSSDGRPDSGGXLRIYADSLKPNIPYKXILLSXXDPADFAVAEALEKYGLEKENPKDYCIARVMLPPGAQHSDEKGAKEIILDDDECPLQIFREWPSDKGILVFQLKRRPPDHIPKKXKKHLEGKXPKGKERADGSGYGSXLPPEKLPYLVELSPDGSDSRDKPKLYRLQLSVXEVGXEKLDDNSIQLFGPGIQPHHCDLXNMDGVVXVXPRSMDAEXYVEGQRISEXXMLQSGMKVQFGASHVFKFVDPSQDHALAKRSVDGGLMVKGPRHKPGIVQEXXFDLGGDIHSGXALPXSKSXXRLDSDRVSSASSXAERGMVKPMIRVEQQPDYRRQESRXQDASGPELILPASIEFRESSEDSFLSAIINYXNSSXVHFKLSPXYVLYMACRYVLSNQYRPDISPXERXHKVIAVVNKMVSMMEGVIQKQKNIAGALAFWMANASELLNFIKQDRDLSRIXLDAQDVLAHLVQMAFKYLVHCLQSELNNYMPAFLDDPEENSLQRPKIDDVLHXLXGAMSLLRRCRVNAALXIQLFSQLFHFINMWLFNRLVXDPDSGLCSHYWGAIIRQQLGHIEAWAEKQGLELAADCHLSRIVQAXXLLXMDKYAPDDIPNINSXCFKLNSLQLQALLQNYHCAPDEPFIPXDLIENVVXVAENXADELARSDGREVQLEEDPDLQLPFLLPEDGYSCDVVRNIPNGLQEFLDPLCQRGFCRLIPHXRSPGXWXIYFEGADYESHLLRENXELAQPLRKEPEIIXVXLKKQNGMGLSIVAAKGAGQDKLGIYVKSVVKGGAADDGRLAAGDQLLSVDGRSLVGLSQERAAELMXRXSSVVXLEVAKQGAIYHGLAXLLNQPSPMMQRISDRRGSGKPRPKSEGFELYNNSXQNGSPESPQLPWAEYSEPKKLPGDDRLMKNRADHRSSPNVANQPPSPGGKSAYASGXXAKIXSVSXGNLCXEEQXPPPRPEAYPIPXQXYXREYFXFPASKSQDRMAPPQNQWPNYEEKPHMHXDSNHSSIAIQRVXRSQEELREDKAYQLERHRIEAAMDRKSDSDMWINQSSSLDSSXSSQEHLNHSSKSVXPASXLXKSGPGRWKXPAAIPAXPVAVSQPIRXDLPPPPPPPPVHYAGDFDGMSMDLPLPPPPSANQIGLPSAQVAAAERRKREEHQRWYEKEKARLEEERERKRREQERKLGQMRXQSLNPAPFSPLXAQQMKPEKPSXLQRPQEXVIRELQPQQQPRXIERRDLQYIXVSKEELSSGDSLSPDPWKRDAKEKLEKQQQMHIVDMLSKEIQELQSKPDRSAEESDRLRKLMLEWQFQKRLQESKQKDEDDEEEEDDDVDXMLIMQRLEAERRARLQDEERRRQQQLEEMRKREAEDRARQEEERRRQEEERXKRDAEEKRRQEEGYYSRLEAERRRQHDEAARRLLEPEAPGPNSYPGSXGAAVGAHDACRDAKEKRSKSQDADSPGSSGAPENLXFKERQRLFSQGQDVSNKVKASRKLXELENELNXK

SEQ ID NO: 1882 - protein, 1834 aa, Homo sapiens
  MOD_RES (34)..(34): Selenocysteine
  MOD_RES (57)..(57): Selenocysteine
  MOD_RES (65)..(65): Selenocysteine
  MOD_RES (67)..(68): Selenocysteine
  MOD_RES (74)..(74): Selenocysteine
  MOD_RES (159)..(159): Selenocysteine
  MOD_RES (208)..(208): Selenocysteine
  MOD_RES (211)..(211): Selenocysteine
  MOD_RES (213)..(213): Selenocysteine
  MOD_RES (248)..(248): Selenocysteine
  MOD_RES (264)..(264): Selenocysteine
  MOD_RES (269)..(270): Selenocysteine
  MOD_RES (354)..(354): Selenocysteine
  MOD_RES (362)..(362): Selenocysteine
  MOD_RES (377)..(377): Selenocysteine
  MOD_RES (404)..(404): Selenocysteine
  MOD_RES (425)..(425): Selenocysteine
  MOD_RES (429)..(429): Selenocysteine
  MOD_RES (452)..(452): Selenocysteine
  MOD_RES (459)..(459): Selenocysteine
  MOD_RES (461)..(461): Selenocysteine
  MOD_RES (469)..(469): Selenocysteine
  MOD_RES (479)..(480): Selenocysteine
  MOD_RES (531)..(532): Selenocysteine
  MOD_RES (543)..(543): Selenocysteine
  MOD_RES (547)..(547): Selenocysteine
  MOD_RES (551)..(552): Selenocysteine
  MOD_RES (565)..(565): Selenocysteine
  MOD_RES (590)..(590): Selenocysteine
  MOD_RES (622)..(622): Selenocysteine
  MOD_RES (626)..(626): Selenocysteine
  MOD_RES (634)..(634): Selenocysteine
  MOD_RES (656)..(656): Selenocysteine
  MOD_RES (659)..(659): Selenocysteine
  MOD_RES (711)..(711): Selenocysteine
  MOD_RES (764)..(764): Selenocysteine
  MOD_RES (766)..(766): Selenocysteine
  MOD_RES (782)..(782): Selenocysteine
  MOD_RES (803)..(803): Selenocysteine
  MOD_RES (849)..(850): Selenocysteine
  MOD_RES (853)..(853): Selenocysteine
  MOD_RES (868)..(868): Selenocysteine
  MOD_RES (895)..(895): Selenocysteine
  MOD_RES (903)..(903): Selenocysteine
  MOD_RES (908)..(908): Selenocysteine
  MOD_RES (970)..(970): Selenocysteine
  MOD_RES (975)..(975): Selenocysteine
  MOD_RES (977)..(977): Selenocysteine
  MOD_RES (994)..(994): Selenocysteine
  MOD_RES (1008)..(1008): Selenocysteine
  MOD_RES (1010)..(1010): Selenocysteine
  MOD_RES (1078)..(1078): Selenocysteine
  MOD_RES (1080)..(1080): Selenocysteine
  MOD_RES (1085)..(1085): Selenocysteine
  MOD_RES (1100)..(1100): Selenocysteine
  MOD_RES (1135)..(1135): Selenocysteine
  MOD_RES (1192)..(1193): Selenocysteine
  MOD_RES (1197)..(1197): Selenocysteine
  MOD_RES (1201)..(1201): Selenocysteine
  MOD_RES (1206)..(1206): Selenocysteine
  MOD_RES (1210)..(1210): Selenocysteine
  MOD_RES (1222)..(1222): Selenocysteine
  MOD_RES (1224)..(1224): Selenocysteine
  MOD_RES (1226)..(1226): Selenocysteine
  MOD_RES (1231)..(1231): Selenocysteine
  MOD_RES (1259)..(1259): Selenocysteine
  MOD_RES (1272)..(1272): Selenocysteine
  MOD_RES (1315)..(1315): Selenocysteine
  MOD_RES (1329)..(1329): Selenocysteine
  MOD_RES (1333)..(1333): Selenocysteine
  MOD_RES (1335)..(1335): Selenocysteine
  MOD_RES (1344)..(1344): Selenocysteine
  MOD_RES (1351)..(1351): Selenocysteine
  MOD_RES (1361)..(1361): Selenocysteine
  MOD_RES (1445)..(1445): Selenocysteine
  MOD_RES (1457)..(1457): Selenocysteine
  MOD_RES (1468)..(1468): Selenocysteine
  MOD_RES (1475)..(1475): Selenocysteine
  MOD_RES (1488)..(1488): Selenocysteine
  MOD_RES (1498)..(1498): Selenocysteine
  MOD_RES (1589)..(1589): Selenocysteine
  MOD_RES (1604)..(1604): Selenocysteine
  MOD_RES (1652)..(1652): Selenocysteine
  MOD_RES (1727)..(1727): Selenocysteine
  MOD_RES (1737)..(1737): Selenocysteine
  MOD_RES (1764)..(1764): Selenocysteine
  MOD_RES (1800)..(1800): Selenocysteine
  MOD_RES (1825)..(1825): Selenocysteine
  MOD_RES (1833)..(1833): Selenocysteine
MSAGGRDEERRKLADIIHHWNANRLDLFEISQPXEDLEFHGVMRFYFQDKAAGNFAXKCIRVSSXAXXQDVIEXLAEKFRPDMRMLSSPKYSLYEVHVSGERRLDIDEKPLVVQLNWNKDDREGRFVLKNENDAIPPKAQSNGPEKQEKEGVIQNFKRXLSKKEKKEKKKREKEALRQASDKDDRPFQGEDVENSRLAAEVYKDMPEXSFXRXISNPEVVMKRRRQQKLEKRMQEFRSSDGRPDSGGXLRIYADSLKPNIPYKXILLSXXDPADFAVAEALEKYGLEKENPKDYCIARVMLPPGAQHSDEKGAKEIILDDDECPLQIFREWPSDKGILVFQLKRRPPDHIPKKXKKHLEGKXPKGKERADGSGYGSXLPPEKLPYLVELSPGRRNHFAYYNYHXYEDGSDSRDKPKLYRLQLSVXEVGXEKLDDNSIQLFGPGIQPHHCDLXNMDGVVXVXPRSMDAEXYVEGQRISEXXMLQSGMKVQFGASHVFKFVDPSQDHALAKRSVDGGLMVKGPRHKPGIVQEXXFDLGGDIHSGXALPXSKSXXRLDSDRVSSASSXAERGMVKPMIRVEQQPDYRRQESRXQDASGPELILPASIEFRESSEDSFLSAIINYXNSSXVHFKLSPXYVLYMACRYVLSNQYRPDISPXERXHKVIAVVNKMVSMMEGVIQKQKNIAGALAFWMANASELLNFIKQDRDLSRIXLDAQDVLAHLVQMAFKYLVHCLQSELNNYMPAFLDDPEENSLQRPKIDDVLHXLXGAMSLLRRCRVNAALXIQLFSQLFHFINMWLFNRLVXDPDSGLCSHYWGAIIRQQLGHIEAWAEKQGLELAADCHLSRIVQAXXLLXMDKYAPDDIPNINSXCFKLNSLQLQALLQNYHCAPDEPFIPXDLIENVVXVAENXADELARSDGREVQLEEDPDLQLPFLLPEDGYSCDVVRNIPNGLQEFLDPLCQRGFCRLIPHXRSPGXWXIYFEGADYESHLLRENXELAQPLRKEPEIIXVXLKKQNGMGLSIVAAKGAGQDKLGIYVKSVVKGGAADVDGRLAAGDQLLSVDGRSLVGLSQERAAELMXRXSSVVXLEVAKQGAIYHGLAXLLNQPSPMMQRISDRRGSGKPRPKSEGFELYNNSXQNGSPESPQLPWAEYSEPKKLPGDDRLMKNRADHRSSPNVANQPPSPGGKSAYASGXXAKIXSVSXGNLCXEEQXPPPRPEAYPIPXQXYXREYFXFPASKSQDRMAPPQNQWPNYEEKPHMHXDSNHSSIAIQRVXRSQEELREDKAYQLERHRIEAAMDRKSDSDMWINQSSSLDSSXSSQEHLNHSSKSVXPASXLXKSGPGRWKXPAAIPAXPVAVSQPIRXDLPPPPPPPPVHYAGDFDGMSMDLPLPPPPSANQIGLPSAQVAAAERRKREEHQRWYEKEKARLEEERERKRREQERKLGQMRXQSLNPAPFSPLXAQQMKPEKPSXLQRPQEXVIRELQPQQQPRXIERRDLQYIXVSKEELSSGDSLSPDPWKRDAKEKLEKQQQMHIVDMLSKEIQELQSKPDRSAEESDRLRKLMLEWQFQKRLQESKQKDEDDEEEEDDDVDXMLIMQRLEAERRARXAMPAISVLDLLQDEERRRQQQLEEMRKREAEDRARQEEERRRQEEERXKRDAEEKRRQEEGYYSRLEAERRRQHDEAARRLLEPEAPGLCRPPLPRDYEPPSPSPAPGAPPPPPQRNASYLKXQVLSPDSLFXAKFVAYNEEEEEEDCSLAGPNSYPGSXGAAVGAHDACRDAKEKRSKSQDADSPGSSGAPENLXFKERQRLFSQGQDVSNKVKASRKLXELENELNXK

SEQ ID NO: 1883 - protein, 1651 aa, Homo sapiens
  MOD_RES (34)..(34): Selenocysteine
  MOD_RES (57)..(57): Selenocysteine
  MOD_RES (65)..(65): Selenocysteine
  MOD_RES (67)..(68): Selenocysteine
  MOD_RES (74)..(74): Selenocysteine
  MOD_RES (160)..(160): Selenocysteine
  MOD_RES (209)..(209): Selenocysteine
  MOD_RES (212)..(212): Selenocysteine
  MOD_RES (214)..(214): Selenocysteine
  MOD_RES (249)..(249): Selenocysteine
  MOD_RES (265)..(265): Selenocysteine
  MOD_RES (270)..(271): Selenocysteine
  MOD_RES (355)..(355): Selenocysteine
  MOD_RES (363)..(363): Selenocysteine
  MOD_RES (378)..(378): Selenocysteine
  MOD_RES (405)..(405): Selenocysteine
  MOD_RES (426)..(426): Selenocysteine
  MOD_RES (430)..(430): Selenocysteine
  MOD_RES (453)..(453): Selenocysteine
  MOD_RES (460)..(460): Selenocysteine
  MOD_RES (462)..(462): Selenocysteine
  MOD_RES (470)..(470): Selenocysteine
  MOD_RES (480)..(481): Selenocysteine
  MOD_RES (532)..(533): Selenocysteine
  MOD_RES (544)..(544): Selenocysteine
  MOD_RES (548)..(548): Selenocysteine
  MOD_RES (552)..(553): Selenocysteine
  MOD_RES (566)..(566): Selenocysteine
  MOD_RES (591)..(591): Selenocysteine
  MOD_RES (623)..(623): Selenocysteine
  MOD_RES (627)..(627): Selenocysteine
  MOD_RES (635)..(635): Selenocysteine
  MOD_RES (657)..(657): Selenocysteine
  MOD_RES (660)..(660): Selenocysteine
  MOD_RES (712)..(712): Selenocysteine
  MOD_RES (765)..(765): Selenocysteine
  MOD_RES (767)..(767): Selenocysteine
  MOD_RES (783)..(783): Selenocysteine
  MOD_RES (804)..(804): Selenocysteine
  MOD_RES (850)..(851): Selenocysteine
  MOD_RES (854)..(854): Selenocysteine
  MOD_RES (869)..(869): Selenocysteine
  MOD_RES (896)..(896): Selenocysteine
  MOD_RES (904)..(904): Selenocysteine
  MOD_RES (909)..(909): Selenocysteine
  MOD_RES (971)..(971): Selenocysteine
  MOD_RES (976)..(976): Selenocysteine
  MOD_RES (978)..(978): Selenocysteine
  MOD_RES (995)..(995): Selenocysteine
  MOD_RES (1009)..(1009): Selenocysteine
  MOD_RES (1011)..(1011): Selenocysteine
  MOD_RES (1079)..(1079): Selenocysteine
  MOD_RES (1081)..(1081): Selenocysteine
  MOD_RES (1086)..(1086): Selenocysteine
  MOD_RES (1101)..(1101): Selenocysteine
  MOD_RES (1136)..(1136): Selenocysteine
  MOD_RES (1193)..(1194): Selenocysteine
  MOD_RES (1198)..(1198): Selenocysteine
  MOD_RES (1202)..(1202): Selenocysteine
  MOD_RES (1207)..(1207): Selenocysteine
  MOD_RES (1211)..(1211): Selenocysteine
  MOD_RES (1223)..(1223): Selenocysteine
  MOD_RES (1225)..(1225): Selenocysteine
  MOD_RES (1227)..(1227): Selenocysteine
  MOD_RES (1232)..(1232): Selenocysteine
  MOD_RES (1260)..(1260): Selenocysteine
  MOD_RES (1273)..(1273): Selenocysteine
  MOD_RES (1316)..(1316): Selenocysteine
  MOD_RES (1330)..(1330): Selenocysteine
  MOD_RES (1334)..(1334): Selenocysteine
  MOD_RES (1336)..(1336): Selenocysteine
  MOD_RES (1345)..(1345): Selenocysteine
  MOD_RES (1352)..(1352): Selenocysteine
  MOD_RES (1362)..(1362): Selenocysteine
  MOD_RES (1446)..(1446): Selenocysteine
  MOD_RES (1458)..(1458): Selenocysteine
  MOD_RES (1469)..(1469): Selenocysteine
  MOD_RES (1476)..(1476): Selenocysteine
  MOD_RES (1489)..(1489): Selenocysteine
  MOD_RES (1499)..(1499): Selenocysteine
  MOD_RES (1590)..(1590): Selenocysteine
  MOD_RES (1640)..(1640): Selenocysteine
MSAGGRDEERRKLADIIHHWNANRLDLFEISQPXEDLEFHGVMRFYFQDKAAGNFAXKCIRVSSXAXXQDVIEXLAEKFRPDMRMLSSPKYSLYEVHVSGERRLDIDEKPLVVQLNWNKDDREGRFVLKNENDAIPPKKAQSNGPEKQEKEGVIQNFKRXLSKKEKKEKKKREKEALRQASDKDDRPFQGEDVENSRLAAEVYKDMPEXSFXRXISNPEVVMKRRRQQKLEKRMQEFRSSDGRPDSGGXLRIYADSLKPNIPYKXILLSXXDPADFAVAEALEKYGLEKENPKDYCIARVMLPPGAQHSDEKGAKEIILDDDECPLQIFREWPSDKGILVFQLKRRPPDHIPKKXKKHLEGKXPKGKERADGSGYGSXLPPEKLPYLVELSPGRRNHFAYYNYHXYEDGSDSRDKPKLYRLQLSVXEVGXEKLDDNSIQLFGPGIQPHHCDLXNMDGVVXVXPRSMDAEXYVEGQRISEXXMLQSGMKVQFGASHVFKFVDPSQDHALAKRSVDGGLMVKGPRHKPGIVQEXXFDLGGDIHSGXALPXSKSXXRLDSDRVSSASSXAERGMVKPMIRVEQQPDYRRQESRXQDASGPELILPASIEFRESSEDSFLSAIINYXNSSXVHFKLSPXYVLYMACRYVLSNQYRPDISPXERXHKVIAVVNKMVSMMEGVIQKQKNIAGALAFWMANASELLNFIKQDRDLSRIXLDAQDVLAHLVQMAFKYLVHCLQSELNNYMPAFLDDPEENSLQRPKIDDVLHXLXGAMSLLRRCRVNAALXIQLFSQLFHFINMWLFNRLVXDPDSGLCSHYWGAIIRQQLGHIEAWAEKQGLELAADCHLSRIVQAXXLLXMDKYAPDDIPNINSXCFKLNSLQLQALLQNYHCAPDEPFIPXDLIENVVXVAENXADELARSDGREVQLEEDPDLQLPFLLPEDGYSCDVVRNIPNGLQEFLDPLCQRGFCRLIPHXRSPGXWXIYFEGADYESHLLRENXELAQPLRKEPEIIXVXLKKQNGMGLSIVAAKGAGQDKLGIYVKSVVKGGAADVDGRLAAGDQLLSVDGRSLVGLSQERAAELMXRXSSVVXLEVAKQGAIYHGLAXLLNQPSPMMQRISDRRGSGKPRPKSEGFELYNNSXQNGSPESPQLPWAEYSEPKKLPGDDRLMKNRADHRSSPNVANQPPSPGGKSAYASGXXAKIXSVSXGNLCXEEQXPPPRPEAYPIPXQXYXREYFXFPASKSQDRMAPPQNQWPNYEEKPHMHXDSNHSSIAIQRVXRSQEELREDKAYQLERHRIEAAMDRKSDSDMWINQSSSLDSSXSSQEHLNHSSKSVXPASXLXKSGPGRWKXPAAIPAXPVAVSQPIRXDLPPPPPPPPVHYAGDFDGMSMDLPLPPPPSANQIGLPSAQVAAAERRKREEHQRWYEKEKARLEEERERKRREQERKLGQMRXQSLNPAPFSPLXAQQMKPEKPSXLQRPQEXVIRELQPQQQPRXIERRDLQYIXVSKEELSSGDSLSPDPWKRDAKEKLEKQQQMHIVDMLSKEIQELQSKPDRSAEESDRLRKLMLEWQFQKRLQESKQKDEDDEEEEDDDVDXMLIMQRLEAERRARDEERRRQQQLEEMRKREAEDRARQEEERRRQEEERXKRDAEEKVMVL

SEQ ID NO: 1884 - protein, 1665 aa, Homo sapiens
  MOD_RES (34)..(34): Selenocysteine
  MOD_RES (57)..(57): Selenocysteine
  MOD_RES (65)..(65): Selenocysteine
  MOD_RES (67)..(68): Selenocysteine
  MOD_RES (74)..(74): Selenocysteine
  MOD_RES (160)..(160): Selenocysteine
  MOD_RES (209)..(209): Selenocysteine
  MOD_RES (212)..(212): Selenocysteine
  MOD_RES (214)..(214): Selenocysteine
  MOD_RES (249)..(249): Selenocysteine
  MOD_RES (265)..(265): Selenocysteine
  MOD_RES (270)..(271): Selenocysteine
  MOD_RES (355)..(355): Selenocysteine
  MOD_RES (363)..(363): Selenocysteine
  MOD_RES (378)..(378): Selenocysteine
  MOD_RES (405)..(405): Selenocysteine
  MOD_RES (426)..(426): Selenocysteine
  MOD_RES (430)..(430): Selenocysteine
  MOD_RES (453)..(453): Selenocysteine
  MOD_RES (460)..(460): Selenocysteine
  MOD_RES (462)..(462): Selenocysteine
  MOD_RES (470)..(470): Selenocysteine
  MOD_RES (480)..(481): Selenocysteine
  MOD_RES (532)..(533): Selenocysteine
  MOD_RES (544)..(544): Selenocysteine
  MOD_RES (548)..(548): Selenocysteine
  MOD_RES (552)..(553): Selenocysteine
  MOD_RES (566)..(566): Selenocysteine
  MOD_RES (591)..(591): Selenocysteine
  MOD_RES (623)..(623): Selenocysteine
  MOD_RES (627)..(627): Selenocysteine
  MOD_RES (635)..(635): Selenocysteine
  MOD_RES (657)..(657): Selenocysteine
  MOD_RES (660)..(660): Selenocysteine
  MOD_RES (712)..(712): Selenocysteine
  MOD_RES (765)..(765): Selenocysteine
  MOD_RES (767)..(767): Selenocysteine
  MOD_RES (783)..(783): Selenocysteine
  MOD_RES (804)..(804): Selenocysteine
  MOD_RES (850)..(851): Selenocysteine
  MOD_RES (854)..(854): Selenocysteine
  MOD_RES (869)..(869): Selenocysteine
  MOD_RES (896)..(896): Selenocysteine
  MOD_RES (904)..(904): Selenocysteine
  MOD_RES (909)..(909): Selenocysteine
  MOD_RES (971)..(971): Selenocysteine
  MOD_RES (976)..(976): Selenocysteine
  MOD_RES (978)..(978): Selenocysteine
  MOD_RES (995)..(995): Selenocysteine
  MOD_RES (1009)..(1009): Selenocysteine
  MOD_RES (1011)..(1011): Selenocysteine
  MOD_RES (1079)..(1079): Selenocysteine
  MOD_RES (1081)..(1081): Selenocysteine
  MOD_RES (1086)..(1086): Selenocysteine
  MOD_RES (1101)..(1101): Selenocysteine
  MOD_RES (1136)..(1136): Selenocysteine
  MOD_RES (1193)..(1194): Selenocysteine
  MOD_RES (1198)..(1198): Selenocysteine
  MOD_RES (1202)..(1202): Selenocysteine
  MOD_RES (1207)..(1207): Selenocysteine
  MOD_RES (1211)..(1211): Selenocysteine
  MOD_RES (1223)..(1223): Selenocysteine
  MOD_RES (1225)..(1225): Selenocysteine
  MOD_RES (1227)..(1227): Selenocysteine
  MOD_RES (1232)..(1232): Selenocysteine
  MOD_RES (1260)..(1260): Selenocysteine
  MOD_RES (1273)..(1273): Selenocysteine
  MOD_RES (1316)..(1316): Selenocysteine
  MOD_RES (1330)..(1330): Selenocysteine
  MOD_RES (1334)..(1334): Selenocysteine
  MOD_RES (1336)..(1336): Selenocysteine
  MOD_RES (1345)..(1345): Selenocysteine
  MOD_RES (1352)..(1352): Selenocysteine
  MOD_RES (1362)..(1362): Selenocysteine
  MOD_RES (1446)..(1446): Selenocysteine
  MOD_RES (1458)..(1458): Selenocysteine
  MOD_RES (1469)..(1469): Selenocysteine
  MOD_RES (1476)..(1476): Selenocysteine
  MOD_RES (1489)..(1489): Selenocysteine
  MOD_RES (1499)..(1499): Selenocysteine
  MOD_RES (1590)..(1590): Selenocysteine
  MOD_RES (1606)..(1606): Selenocysteine
  MOD_RES (1654)..(1654): Selenocysteine
MSAGGRDEERRKLADIIHHWNANRLDLFEISQPXEDLEFHGVMRFYFQDKAAGNFAXKCIRVSSXAXXQDVIEXLAEKFRPDMRMLSSPKYSLYEVHVSGERRLDIDEKPLVVQLNWNKDDREGRFVLKNENDAIPPKKAQSNGPEKQEKEGVIQNFKRXLSKKEKKEKKKREKEALRQASDKDDRPFQGEDVENSRLAAEVYKDMPEXSFXRXISNPEVVMKRRRQQKLEKRMQEFRSSDGRPDSGGXLRIYADSLKPNIPYKXILLSXXDPADFAVAEALEKYGLEKENPKDYCIARVMLPPGAQHSDEKGAKEIILDDDECPLQIFREWPSDKGILVFQLKRRPPDHIPKKXKKHLEGKXPKGKERADGSGYGSXLPPEKLPYLVELSPGRRNHFAYYNYHXYEDGSDSRDKPKLYRLQLSVXEVGXEKLDDNSIQLFGPGIQPHHCDLXNMDGVVXVXPRSMDAEXYVEGQRISEXXMLQSGMKVQFGASHVFKFVDPSQDHALAKRSVDGGLMVKGPRHKPGIVQEXXFDLGGDIHSGXALPXSKSXXRLDSDRVSSASSXAERGMVKPMIRVEQQPDYRRQESRXQDASGPELILPASIEFRESSEDSFLSAIINYXNSSXVHFKLSPXYVLYMACRYVLSNQYRPDISPXERXHKVIAVVNKMVSMMEGVIQKQKNIAGALAFWMANASELLNFIKQDRDLSRIXLDAQDVLAHLVQMAFKYLVHCLQSELNNYMPAFLDDPEENSLQRPKIDDVLHXLXGAMSLLRRCRVNAALXIQLFSQLFHFINMWLFNRLVXDPDSGLCSHYWGAIIRQQLGHIEAWAEKQGLELAADCHLSRIVQAXXLLXMDKYAPDDIPNINSXCFKLNSLQLQALLQNYHCAPDEPFIPXDLIENVVXVAENXADELARSDGREVQLEEDPDLQLPFLLPEDGYSCDVVRNIPNGLQEFLDPLCQRGFCRLIPHXRSPGXWXIYFEGADYESHLLRENXELAQPLRKEPEIIXVXLKKQNGMGLSIVAAKGAGQDKLGIYVKSVVKGGAADVDGRLAAGDQLLSVDGRSLVGLSQERAAELMXRXSSVVXLEVAKQGAIYHGLAXLLNQPSPMMQRISDRRGSGKPRPKSEGFELYNNSXQNGSPESPQLPWAEYSEPKKLPGDDRLMKNRADHRSSPNVANQPPSPGGKSAYASGXXAKIXSVSXGNLCXEEQXPPPRPEAYPIPXQXYXREYFXFPASKSQDRMAPPQNQWPNYEEKPHMHXDSNHSSIAIQRVXRSQEELREDKAYQLERHRIEAAMDRKSDSDMWINQSSSLDSSXSSQEHLNHSSKSVXPASXLXKSGPGRWKXPAAIPAXPVAVSQPIRXDLPPPPPPPPVHYAGDFDGMSMDLPLPPPPSANQIGLPSAQVAAAERRKREEHQRWYEKEKARLEEERERKRREQERKLGQMRXQSLNPAPFSPLXAQQMKPEKPSXLQRPQEXVIRELQPQQQPRXIERRDLQYIXVSKEELSSGDSLSPDPWKRDAKEKLEKQQQMHIVDMLSKEIQELQSKPDRSAEESDRLRKLMLEWQFQKRLQESKQKDEDDEEEEDDDVDXMLIMQRLEAERRARQXAMPAISVLDLLQDEERRRQQQLEEMRKREAEDRARQEEERRRQEEERXKRDAEEKVMVL

SEQ ID NO: 1885 - protein, 1824 aa, Homo sapiens
  MOD_RES (34)..(34): Selenocysteine
  MOD_RES (57)..(57): Selenocysteine
  MOD_RES (65)..(65): Selenocysteine
  MOD_RES (67)..(68): Selenocysteine
  MOD_RES (74)..(74): Selenocysteine
  MOD_RES (160)..(160): Selenocysteine
  MOD_RES (209)..(209): Selenocysteine
  MOD_RES (212)..(212): Selenocysteine
  MOD_RES (214)..(214): Selenocysteine
  MOD_RES (249)..(249): Selenocysteine
  MOD_RES (265)..(265): Selenocysteine
  MOD_RES (270)..(271): Selenocysteine
  MOD_RES (355)..(355): Selenocysteine
  MOD_RES (363)..(363): Selenocysteine
  MOD_RES (378)..(378): Selenocysteine
  MOD_RES (405)..(405): Selenocysteine
  MOD_RES (426)..(426): Selenocysteine
  MOD_RES (430)..(430): Selenocysteine
  MOD_RES (453)..(453): Selenocysteine
  MOD_RES (460)..(460): Selenocysteine
  MOD_RES (462)..(462): Selenocysteine
  MOD_RES (470)..(470): Selenocysteine
  MOD_RES (480)..(481): Selenocysteine
  MOD_RES (532)..(533): Selenocysteine
  MOD_RES (544)..(544): Selenocysteine
  MOD_RES (548)..(548): Selenocysteine
  MOD_RES (552)..(553): Selenocysteine
  MOD_RES (566)..(566): Selenocysteine
  MOD_RES (591)..(591): Selenocysteine
  MOD_RES (623)..(623): Selenocysteine
  MOD_RES (627)..(627): Selenocysteine
  MOD_RES (635)..(635): Selenocysteine
  MOD_RES (657)..(657): Selenocysteine
  MOD_RES (660)..(660): Selenocysteine
  MOD_RES (712)..(712): Selenocysteine
  MOD_RES (765)..(765): Selenocysteine
  MOD_RES (767)..(767): Selenocysteine
  MOD_RES (783)..(783): Selenocysteine
  MOD_RES (804)..(804): Selenocysteine
  MOD_RES (850)..(851): Selenocysteine
  MOD_RES (854)..(854): Selenocysteine
  MOD_RES (869)..(869): Selenocysteine
  MOD_RES (896)..(896): Selenocysteine
  MOD_RES (904)..(904): Selenocysteine
  MOD_RES (909)..(909): Selenocysteine
  MOD_RES (971)..(971): Selenocysteine
  MOD_RES (976)..(976): Selenocysteine
  MOD_RES (978)..(978): Selenocysteine
  MOD_RES (995)..(995): Selenocysteine
  MOD_RES (1009)..(1009): Selenocysteine
  MOD_RES (1011)..(1011): Selenocysteine
  MOD_RES (1079)..(1079): Selenocysteine
  MOD_RES (1081)..(1081): Selenocysteine
  MOD_RES (1086)..(1086): Selenocysteine
  MOD_RES (1101)..(1101): Selenocysteine
  MOD_RES (1136)..(1136): Selenocysteine
  MOD_RES (1193)..(1194): Selenocysteine
  MOD_RES (1198)..(1198): Selenocysteine
  MOD_RES (1202)..(1202): Selenocysteine
  MOD_RES (1207)..(1207): Selenocysteine
  MOD_RES (1211)..(1211): Selenocysteine
  MOD_RES (1223)..(1223): Selenocysteine
  MOD_RES (1225)..(1225): Selenocysteine
  MOD_RES (1227)..(1227): Selenocysteine
  MOD_RES (1232)..(1232): Selenocysteine
  MOD_RES (1260)..(1260): Selenocysteine
  MOD_RES (1273)..(1273): Selenocysteine
  MOD_RES (1316)..(1316): Selenocysteine
  MOD_RES (1330)..(1330): Selenocysteine
  MOD_RES (1334)..(1334): Selenocysteine
  MOD_RES (1336)..(1336): Selenocysteine
  MOD_RES (1345)..(1345): Selenocysteine
  MOD_RES (1352)..(1352): Selenocysteine
  MOD_RES (1362)..(1362): Selenocysteine
  MOD_RES (1446)..(1446): Selenocysteine
  MOD_RES (1458)..(1458): Selenocysteine
  MOD_RES (1469)..(1469): Selenocysteine
  MOD_RES (1476)..(1476): Selenocysteine
  MOD_RES (1489)..(1489): Selenocysteine
  MOD_RES (1499)..(1499): Selenocysteine
  MOD_RES (1590)..(1590): Selenocysteine
  MOD_RES (1642)..(1642): Selenocysteine
  MOD_RES (1717)..(1717): Selenocysteine
  MOD_RES (1727)..(1727): Selenocysteine
  MOD_RES (1754)..(1754): Selenocysteine
  MOD_RES (1790)..(1790): Selenocysteine
  MOD_RES (1815)..(1815): Selenocysteine
  MOD_RES (1823)..(1823): Selenocysteine
MSAGGRDEERRKLADIIHHWNANRLDLFEISQPXEDLEFHGVMRFYFQDKAAGNFAXKCIRVSSXAXXQDVIEXLAEKFRPDMRMLSSPKYSLYEVHVSGERRLDIDEKPLVVQLNWNKDDREGRFVLKNENDAIPPKKAQSNGPEKQEKEGVIQNFKRXLSKKEKKEKKKREKEALRQASDKDDRPFQGEDVENSRLAAEVYKDMPEXSFXRXISNPEVVMKRRRQQKLEKRMQEFRSSDGRPDSGGXLRIYADSLKPNIPYKXILLSXXDPADFAVAEALEKYGLEKENPKDYCIARVMLPPGAQHSDEKGAKEIILDDDECPLQIFREWPSDKGILVFQLKRRPPDHIPKKXKKHLEGKXPKGKERADGSGYGSXLPPEKLPYLVELSPGRRNHFAYYNYHXYEDGSDSRDKPKLYRLQLSVXEVGXEKLDDNSIQLFGPGIQPHHCDLXNMDGVVXVXPRSMDAEXYVEGQRISEXXMLQSGMKVQFGASHVFKFVDPSQDHALAKRSVDGGLMVKGPRHKPGIVQEXXFDLGGDIHSGXALPXSKSXXRLDSDRVSSASSXAERGMVKPMIRVEQQPDYRRQESRXQDASGPELILPASIEFRESSEDSFLSAIINYXNSSXVHFKLSPXYVLYMACRYVLSNQYRPDISPXERXHKVIAVVNKMVSMMEGVIQKQKNIAGALAFWMANASELLNFIKQDRDLSRIXLDAQDVLAHLVQMAFKYLVHCLQSELNNYMPAFLDDPEENSLQRPKIDDVLHXLXGAMSLLRRCRVNAALXIQLFSQLFHFINMWLFNRLVXDPDSGLCSHYWGAIIRQQLGHIEAWAEKQGLELAADCHLSRIVQAXXLLXMDKYAPDDIPNINSXCFKLNSLQLQALLQNYHCAPDEPFIPXDLIENVVXVAENXADELARSDGREVQLEEDPDLQLPFLLPEDGYSCDVVRNIPNGLQEFLDPLCQRGFCRLIPHXRSPGXWXIYFEGADYESHLLRENXELAQPLRKEPEIIXVXLKKQNGMGLSIVAAKGAGQDKLGIYVKSVVKGGAADVDGRLAAGDQLLSVDGRSLVGLSQERAAELMXRXSSVVXLEVAKQGAIYHGLAXLLNQPSPMMQRISDRRGSGKPRPKSEGFELYNNSXQNGSPESPQLPWAEYSEPKKLPGDDRLMKNRADHRSSPNVANQPPSPGGKSAYASGXXAKIXSVSXGNLCXEEQXPPPRPEAYPIPXQXYXREYFXFPASKSQDRMAPPQNQWPNYEEKPHMHXDSNHSSIAIQRVXRSQEELREDKAYQLERHRIEAAMDRKSDSDMWINQSSSLDSSXSSQEHLNHSSKSVXPASXLXKSGPGRWKXPAAIPAXPVAVSQPIRXDLPPPPPPPPVHYAGDFDGMSMDLPLPPPPSANQIGLPSAQVAAAERRKREEHQRWYEKEKARLEEERERKRREQERKLGQMRXQSLNPAPFSPLXAQQMKPEKPSXLQRPQEXVIRELQPQQQPRXIERRDLQYIXVSKEELSSGDSLSPDPWKRDAKEKLEKQQQMHIVDMLSKEIQELQSKPDRSAEESDRLRKLMLEWQFQKRLQESKQKDEDDEEEEDDDVDXMLIMQRLEAERRARLQDEERRRQQQLEEMRKREAEDRARQEEERRRQEEERXKRDAEEKRRQEEGYYSRLEAERRRQHDEAARRLLEPEAPGLCRPPLPRDYEPPSPSPAPGAPPPPPQRNASYLKXQVLSPDSLFXAKFVAYNEEEEEEDCSLAGPNSYPGSXGAAVGAHDACRDAKEKRSKSQDADSPGSSGAPENLXFKERQRLFSQGQDVSNKVKASRKLXELENELNXK

SEQ ID NO: 1886 - protein, 1831 aa, Homo sapiens
  MOD_RES (34)..(34): Selenocysteine
  MOD_RES (57)..(57): Selenocysteine
  MOD_RES (65)..(65): Selenocysteine
  MOD_RES (67)..(68): Selenocysteine
  MOD_RES (74)..(74): Selenocysteine
  MOD_RES (160)..(160): Selenocysteine
  MOD_RES (209)..(209): Selenocysteine
  MOD_RES (212)..(212): Selenocysteine
  MOD_RES (214)..(214): Selenocysteine
  MOD_RES (249)..(249): Selenocysteine
  MOD_RES (265)..(265): Selenocysteine
  MOD_RES (270)..(271): Selenocysteine
  MOD_RES (355)..(355): Selenocysteine
  MOD_RES (363)..(363): Selenocysteine
  MOD_RES (378)..(378): Selenocysteine
  MOD_RES (405)..(405): Selenocysteine
  MOD_RES (426)..(426): Selenocysteine
  MOD_RES (430)..(430): Selenocysteine
  MOD_RES (453)..(453): Selenocysteine
  MOD_RES (460)..(460): Selenocysteine
  MOD_RES (462)..(462): Selenocysteine
  MOD_RES (470)..(470): Selenocysteine
  MOD_RES (480)..(481): Selenocysteine
  MOD_RES (532)..(533): Selenocysteine
  MOD_RES (544)..(544): Selenocysteine
  MOD_RES (548)..(548): Selenocysteine
  MOD_RES (552)..(553): Selenocysteine
  MOD_RES (566)..(566): Selenocysteine
  MOD_RES (591)..(591): Selenocysteine
  MOD_RES (623)..(623): Selenocysteine
  MOD_RES (627)..(627): Selenocysteine
  MOD_RES (635)..(635): Selenocysteine
  MOD_RES (657)..(657): Selenocysteine
  MOD_RES (660)..(660): Selenocysteine
  MOD_RES (719)..(719): Selenocysteine
  MOD_RES (772)..(772): Selenocysteine
  MOD_RES (774)..(774): Selenocysteine
  MOD_RES (790)..(790): Selenocysteine
  MOD_RES (811)..(811): Selenocysteine
  MOD_RES (857)..(858): Selenocysteine
  MOD_RES (861)..(861): Selenocysteine
  MOD_RES (876)..(876): Selenocysteine
  MOD_RES (903)..(903): Selenocysteine
  MOD_RES (911)..(911): Selenocysteine
  MOD_RES (916)..(916): Selenocysteine
  MOD_RES (978)..(978): Selenocysteine
  MOD_RES (983)..(983): Selenocysteine
  MOD_RES (985)..(985): Selenocysteine
  MOD_RES (1002)..(1002): Selenocysteine
  MOD_RES (1016)..(1016): Selenocysteine
  MOD_RES (1018)..(1018): Selenocysteine
  MOD_RES (1086)..(1086): Selenocysteine
  MOD_RES (1088)..(1088): Selenocysteine
  MOD_RES (1093)..(1093): Selenocysteine
  MOD_RES (1108)..(1108): Selenocysteine
  MOD_RES (1143)..(1143): Selenocysteine
  MOD_RES (1200)..(1201): Selenocysteine
  MOD_RES (1205)..(1205): Selenocysteine
  MOD_RES (1209)..(1209): Selenocysteine
  MOD_RES (1214)..(1214): Selenocysteine
  MOD_RES (1218)..(1218): Selenocysteine
  MOD_RES (1230)..(1230): Selenocysteine
  MOD_RES (1232)..(1232): Selenocysteine
  MOD_RES (1234)..(1234): Selenocysteine
  MOD_RES (1239)..(1239): Selenocysteine
  MOD_RES (1267)..(1267): Selenocysteine
  MOD_RES (1280)..(1280): Selenocysteine
  MOD_RES (1323)..(1323): Selenocysteine
  MOD_RES (1337)..(1337): Selenocysteine
  MOD_RES (1341)..(1341): Selenocysteine
  MOD_RES (1343)..(1343): Selenocysteine
  MOD_RES (1352)..(1352): Selenocysteine
  MOD_RES (1359)..(1359): Selenocysteine
  MOD_RES (1369)..(1369): Selenocysteine
  MOD_RES (1453)..(1453): Selenocysteine
  MOD_RES (1465)..(1465): Selenocysteine
  MOD_RES (1476)..(1476): Selenocysteine
  MOD_RES (1483)..(1483): Selenocysteine
  MOD_RES (1496)..(1496): Selenocysteine
  MOD_RES (1506)..(1506): Selenocysteine
  MOD_RES (1597)..(1597): Selenocysteine
  MOD_RES (1649)..(1649): Selenocysteine
  MOD_RES (1724)..(1724): Selenocysteine
  MOD_RES (1734)..(1734): Selenocysteine
  MOD_RES (1761)..(1761): Selenocysteine
  MOD_RES (1797)..(1797): Selenocysteine
  MOD_RES (1822)..(1822): Selenocysteine
  MOD_RES (1830)..(1830): Selenocysteine
MSAGGRDEERRKLADIIHHWNANRLDLFEISQPXEDLEFHGVMRFYFQDKAAGNFAXKCIRVSSXAXXQDVIEXLAEKFRPDMRMLSSPKYSLYEVHVSGERRLDIDEKPLVVQLNWNKDDREGRFVLKNENDAIPPKKAQSNGPEKQEKEGVIQNFKRXLSKKEKKEKKKREKEALRQASDKDDRPFQGEDVENSRLAAEVYKDMPEXSFXRXISNPEVVMKRRRQQKLEKRMQEFRSSDGRPDSGGXLRIYADSLKPNIPYKXILLSXXDPADFAVAEALEKYGLEKENPKDYCIARVMLPPGAQHSDEKGAKEIILDDDECPLQIFREWPSDKGILVFQLKRRPPDHIPKKXKKHLEGKXPKGKERADGSGYGSXLPPEKLPYLVELSPGRRNHFAYYNYHXYEDGSDSRDKPKLYRLQLSVXEVGXEKLDDNSIQLFGPGIQPHHCDLXNMDGVVXVXPRSMDAEXYVEGQRISEXXMLQSGMKVQFGASHVFKFVDPSQDHALAKRSVDGGLMVKGPRHKPGIVQEXXFDLGGDIHSGXALPXSKSXXRLDSDRVSSASSXAERGMVKPMIRVEQQPDYRRQESRXQDASGPELILPASIEFRESSEDSFLSAIINYXNSSXVHFKLSPXYVLYMACRYVLSNQYRPDISPXERXHKVIAVVNKMVSMMEGVIQEVDQVDQKQKNIAGALAFWMANASELLNFIKQDRDLSRIXLDAQDVLAHLVQMAFKYLVHCLQSELNNYMPAFLDDPEENSLQRPKIDDVLHXLXGAMSLLRRCRVNAALXIQLFSQLFHFINMWLFNRLVXDPDSGLCSHYWGAIIRQQLGHIEAWAEKQGLELAADCHLSRIVQAXXLLXMDKYAPDDIPNINSXCFKLNSLQLQALLQNYHCAPDEPFIPXDLIENVVXVAENXADELARSDGREVQLEEDPDLQLPFLLPEDGYSCDVVRNIPNGLQEFLDPLCQRGFCRLIPHXRSPGXWXIYFEGADYESHLLRENXELAQPLRKEPEIIXVXLKKQNGMGLSIVAAKGAGQDKLGIYVKSVVKGGAADVDGRLAAGDQLLSVDGRSLVGLSQERAAELMXRXSSVVXLEVAKQGAIYHGLAXLLNQPSPMMQRISDRRGSGKPRPKSEGFELYNNSXQNGSPESPQLPWAEYSEPKKLPGDDRLMKNRADHRSSPNVANQPPSPGGKSAYASGXXAKIXSVSXGNLCXEEQXPPPRPEAYPIPXQXYXREYFXFPASKSQDRMAPPQNQWPNYEEKPHMHXDSNHSSIAIQRVXRSQEELREDKAYQLERHRIEAAMDRKSDSDMWINQSSSLDSSXSSQEHLNHSSKSVXPASXLXKSGPGRWKXPAAIPAXPVAVSQPIRXDLPPPPPPPPVHYAGDFDGMSMDLPLPPPPSANQIGLPSAQVAAAERRKREEHQRWYEKEKARLEEERERKRREQERKLGQMRXQSLNPAPFSPLXAQQMKPEKPSXLQRPQEXVIRELQPQQQPRXIERRDLQYIXVSKEELSSGDSLSPDPWKRDAKEKLEKQQQMHIVDMLSKEIQELQSKPDRSAEESDRLRKLMLEWQFQKRLQESKQKDEDDEEEEDDDVDXMLIMQRLEAERRARLQDEERRRQQQLEEMRKREAEDRARQEEERRRQEEERXKRDAEEKRRQEEGYYSRLEAERRRQHDEAARRLLEPEAPGLCRPPLPRDYEPPSPSPAPGAPPPPPQRNASYLKXQVLSPDSLFXAKFVAYNEEEEEEDCSLAGPNSYPGSXGAAVGAHDACRDAKEKRSKSQDADSPGSSGAPENLXFKERQRLFSQGQDVSNKVKASRKLXELENELNXK

SEQ ID NO: 1887 - protein, 124 aa, Homo sapiens
  MOD_RES (1)..(1): Any amino acid
  MOD_RES (20)..(20): Selenocysteine
  MOD_RES (54)..(54): Selenocysteine
  MOD_RES (90)..(90): Selenocysteine
  MOD_RES (115)..(115): Selenocysteine
  MOD_RES (123)..(123): Selenocysteine
XDGVFLSNSFQPPSAKANSXAHKKGQPLPPPKKSSSYHPSHCKGRGPNSYPGSXGAAVGAHDACRDAKEKRSKSQDADSPGSSGAPENLXFKERQRLFSQGQDVSNKVKASRKLXELENELNXK

SEQ ID NO: 1888 - protein, 389 aa, Homo sapiens
  MOD_RES (1)..(1): Any amino acid
  MOD_RES (69)..(69): Selenocysteine
  MOD_RES (77)..(77): Selenocysteine
  MOD_RES (92)..(92): Selenocysteine
  MOD_RES (125)..(125): Selenocysteine
  MOD_RES (129)..(129): Selenocysteine
  MOD_RES (152)..(152): Selenocysteine
  MOD_RES (159)..(159): Selenocysteine
  MOD_RES (161)..(161): Selenocysteine
  MOD_RES (169)..(169): Selenocysteine
  MOD_RES (179)..(180): Selenocysteine
  MOD_RES (231)..(232): Selenocysteine
  MOD_RES (243)..(243): Selenocysteine
  MOD_RES (247)..(247): Selenocysteine
  MOD_RES (251)..(252): Selenocysteine
  MOD_RES (265)..(265): Selenocysteine
  MOD_RES (290)..(290): Selenocysteine
  MOD_RES (322)..(322): Selenocysteine
  MOD_RES (326)..(326): Selenocysteine
  MOD_RES (334)..(334): Selenocysteine
  MOD_RES (356)..(356): Selenocysteine
  MOD_RES (359)..(359): Selenocysteine
XEKENPKDYCIARVMLPPGAQHSDEKGAKEIILDDDECPLQIFREWPSDKGILVFQLKRRPPDHIPKKXKKHLEGKXPKGKERADGSGYGSXLPPEKLPYLVELSPDGSDSRDKPKLYRLQLSVXEVGXEKLDDNSIQLFGPGIQPHHCDLXNMDGVVXVXPRSMDAEXYVEGQRISEXXMLQSGMKVQFGASHVFKFVDPSQDHALAKRSVDGGLMVKGPRHKPGIVQEXXFDLGGDIHSGXALPXSKSXXRLDSDRVSSASSXAERGMVKPMIRVEQQPDYRRQESRXQDASGPELILPASIEFRESSEDSFLSAIINYXNSSXVHFKLSPXYVLYMACRYVLSNQYRPDISPXERXHKVIAVVNKMVSMMEGVIQVRSSRPAMLLQ

SEQ ID NO: 1889 - protein, 129 aa, Homo sapiens
  MOD_RES (1)..(1): Any amino acid
  MOD_RES (66)..(66): Selenocysteine
  MOD_RES (118)..(118): Selenocysteine
XKQQQMHIVDMLSKEIQELQSKPDRSAEESDRLRKLMLEWQFQKRLQESKQKDEDDEEEEDDDVDXMLIMQRLEAERRARLQDEERRRQQQLEEMRKREAEDRARQEEERRRQEEERXKRDAEEKVMVL

SEQ ID NO: 1890 - protein, 313 aa, Homo sapiens
  MOD_RES (1)..(1): Any amino acid
  MOD_RES (81)..(81): Selenocysteine
  MOD_RES (131)..(131): Selenocysteine
  MOD_RES (206)..(206): Selenocysteine
  MOD_RES (216)..(216): Selenocysteine
  MOD_RES (243)..(243): Selenocysteine
  MOD_RES (279)..(279): Selenocysteine
  MOD_RES (304)..(304): Selenocysteine
  MOD_RES (312)..(312): Selenocysteine
XLSPDPWKRDAKEKLEKQQQMHIVDMLSKEIQELQSKPDRSAEESDRLRKLMLEWQFQKRLQESKQKDEDDEEEEDDDVDXMLIMQRLEAERRARDEERRRQQQLEEMRKREAEDRARQEEERRRQEEERXKRDAEEKRRQEEGYYSRLEAERRRQHDEAARRLLEPEAPGLCRPPLPRDYEPPSPSPAPGAPPPPPQRNASYLKXQVLSPDSLFXAKFVAYNEEEEEEDCSLAGPNSYPGSXGAAVGAHDACRDAKEKRSKSQDADSPGSSGAPENLXFKERQRLFSQGQDVSNKVKASRKLXELENELNXK

SEQ ID NO: 1891 - protein, 191 aa, Homo sapiens
  MOD_RES (1)..(1): Any amino acid
  MOD_RES (9)..(9): Selenocysteine
  MOD_RES (19)..(19): Selenocysteine
  MOD_RES (45)..(45): Selenocysteine
  MOD_RES (89)..(89): Selenocysteine
  MOD_RES (121)..(121): Selenocysteine
  MOD_RES (157)..(157): Selenocysteine
  MOD_RES (182)..(182): Selenocysteine
  MOD_RES (190)..(190): Selenocysteine
XRNASYLKXQVLSPDSLFXAKFVAYNEEEEEEDCSLAGQDKYSSXRKSHGDLLPAPLKPRPPPCQPRPASDGVFLSNSFQPPSAKANSXAHKKGQPLPPPKKSSSYHPSHCKGPNSYPGSXGAAVGAHDACRDAKEKRSKSQDADSPGSSGAPENLXFKERQRLFSQGQDVSNKVKASRKLXELENELNXK

SEQ ID NO: 1892 - protein, 1205 aa, Homo sapiens
  MOD_RES (47)..(47): Selenocysteine
  MOD_RES (73)..(73): Selenocysteine
  MOD_RES (77)..(77): Selenocysteine
  MOD_RES (109)..(109): Selenocysteine
  MOD_RES (118)..(118): Selenocysteine
  MOD_RES (140)..(140): Selenocysteine
  MOD_RES (160)..(160): Selenocysteine
  MOD_RES (190)..(190): Selenocysteine
  MOD_RES (220)..(220): Selenocysteine
  MOD_RES (224)..(224): Selenocysteine
  MOD_RES (258)..(258): Selenocysteine
  MOD_RES (273)..(273): Selenocysteine
  MOD_RES (291)..(291): Selenocysteine
  MOD_RES (321)..(321): Selenocysteine
  MOD_RES (325)..(325): Selenocysteine
  MOD_RES (336)..(336): Selenocysteine
  MOD_RES (348)..(348): Selenocysteine
  MOD_RES (364)..(364): Selenocysteine
  MOD_RES (372)..(372): Selenocysteine
  MOD_RES (376)..(376): Selenocysteine
  MOD_RES (379)..(379): Selenocysteine
  MOD_RES (389)..(389): Selenocysteine
  MOD_RES (399)..(399): Selenocysteine
  MOD_RES (407)..(407): Selenocysteine
  MOD_RES (411)..(411): Selenocysteine
  MOD_RES (419)..(419): Selenocysteine
  MOD_RES (440)..(440): Selenocysteine
  MOD_RES (474)..(474): Selenocysteine
  MOD_RES (500)..(500): Selenocysteine
  MOD_RES (509)..(510): Selenocysteine
  MOD_RES (520)..(520): Selenocysteine
  MOD_RES (535)..(535): Selenocysteine
  MOD_RES (552)..(552): Selenocysteine
  MOD_RES (599)..(599): Selenocysteine
  MOD_RES (602)..(602): Selenocysteine
  MOD_RES (619)..(619): Selenocysteine
  MOD_RES (638)..(638): Selenocysteine
  MOD_RES (647)..(647): Selenocysteine
  MOD_RES (697)..(697): Selenocysteine
  MOD_RES (707)..(707): Selenocysteine
  MOD_RES (721)..(721): Selenocysteine
  MOD_RES (746)..(746): Selenocysteine
  MOD_RES (755)..(755): Selenocysteine
  MOD_RES (766)..(766): Selenocysteine
  MOD_RES (850)..(850): Selenocysteine
  MOD_RES (891)..(891): Selenocysteine
  MOD_RES (906)..(907): Selenocysteine
  MOD_RES (935)..(935): Selenocysteine
  MOD_RES (981)..(981): Selenocysteine
  MOD_RES (1004)..(1004): Selenocysteine
  MOD_RES (1021)..(1021): Selenocysteine
  MOD_RES (1038)..(1038): Selenocysteine
  MOD_RES (1041)..(1041): Selenocysteine
  MOD_RES (1075)..(1075): Selenocysteine
  MOD_RES (1098)..(1098): Selenocysteine
  MOD_RES (1100)..(1100): Selenocysteine
  MOD_RES (1131)..(1131): Selenocysteine
  MOD_RES (1134)..(1134): Selenocysteine
  MOD_RES (1137)..(1137): Selenocysteine
  MOD_RES (1142)..(1142): Selenocysteine
  MOD_RES (1147)..(1147): Selenocysteine
  MOD_RES (1149)..(1149): Selenocysteine
  MOD_RES (1154)..(1154): Selenocysteine
  MOD_RES (1166)..(1166): Selenocysteine
  MOD_RES (1186)..(1186): Selenocysteine
  MOD_RES (1191)..(1191): Selenocysteine
  MOD_RES (1194)..(1194): Selenocysteine
MAAQSSLYNDDRNLLRIREKERRNQEAHQEKEAFPEKIPLFGEPYKXAKGDELSSRIQNMLGNYEEVKEFLSXKSHXHRLDASENRLGKPKYPLIPDKGSSIPSSSFHXSVHHQSIHXPASGPLSVGNISHNPKMAQPRXEPMPSLHAKSCGPPDSQHLXQDRLGQEGFGSSHHKKGDRRADGDHCASVXDSAPERELSPLISLPSPVPPLSPIHSNQQXLPRXQGSSKVHGSSNNSKGYCPAKSPKDLAVKVHDKEXPQDSLVAPAQPPSQXFPPPSLPSKSVAMQQKPXAYVRPMDGQDQAPSESPELKPLPEDYRQQXFEKXDLKVPAKAKLXKLKMPSQSVEQXYSNEVHCVEEILKEMXHSWPPPLXAIHXPSXAEPSKFPFPXKDSQHVSSVXQNQKQYDXSSKXHSNSQQGXSSMLEDDLQLSDSEDSDSEQXPEKPPSSSAPPSAPQSLPEPVASAHSSSAESESXSDSDSSSDSESESSSSDSEENEPLEXPAPEPEPPXXNKWQLDNWLXKVSQPAAPPEGPRSXEPPRRHPESKGSSDSAXSQEHSESKDPPPKSSSKAPRAPPEAPHPGKRSCQKSPAQQEPPQRQXVGXKQPKKPVKASARAGSRXSLQGEREPGLLPYGSRDQXSKDKPKVKXKGRPRAAASNEPKPAVPPSSEKKKHKSSLPAPSKALSGPEPAKDNVEDRXPEHFALVPLXESQGPPHSGSGSRXSGCRQAVVVQEDSRKDRLPLPLRDXKLLSPLRDXPPPQSLMVKIXLDLLSRIPQPPGKGSRQRKAEDKQPPAGKKHSSEKRSSDSSSKLAKKRKGEAERDCDNKKIRLEKEIKSQSSSSSSSHKESSKXKPSRPSSQSSKKEMLPPPPVSSSSQKPAKPALKRSRREADXCGQDPPKVPAVPRAXXDSSIPKQRRVEGKGSRSSSEHKGSSGDXANPFPVPSLPNGNSKPGKPQVKFDKQQADLHMREAKKMKQKAELMXDRVGKAFKYLEAVLSFIECGIAXESESQSSKSAYSVYSEXVDLIKFIMSLKSFSDAXAPXQEKIFAVLCMRCQSILNMAMFRCKKDIAIKYSRXLNKHFESSSKVAQAPSPCIARSXGXPSPLSPMPSPASSVGSQSSAGSVGSSGVAAXISXPVXIQNMXSSYVXIXSHVLXAFDLWEQAEALXRKNKEFFARLSQMCAPWPSXAVWWXWCXIHDRVFSSYKN

SEQ ID NO: 1893 - protein, 1210 aa, Homo sapiens
  MOD_RES (47)..(47): Selenocysteine
  MOD_RES (73)..(73): Selenocysteine
  MOD_RES (77)..(77): Selenocysteine
  MOD_RES (109)..(109): Selenocysteine
  MOD_RES (118)..(118): Selenocysteine
  MOD_RES (140)..(140): Selenocysteine
  MOD_RES (160)..(160): Selenocysteine
  MOD_RES (190)..(190): Selenocysteine
  MOD_RES (220)..(220): Selenocysteine
  MOD_RES (224)..(224): Selenocysteine
  MOD_RES (258)..(258): Selenocysteine
  MOD_RES (273)..(273): Selenocysteine
  MOD_RES (291)..(291): Selenocysteine
  MOD_RES (321)..(321): Selenocysteine
  MOD_RES (325)..(325): Selenocysteine
  MOD_RES (336)..(336): Selenocysteine
  MOD_RES (348)..(348): Selenocysteine
  MOD_RES (364)..(364): Selenocysteine
  MOD_RES (372)..(372): Selenocysteine
  MOD_RES (376)..(376): Selenocysteine
  MOD_RES (379)..(379): Selenocysteine
  MOD_RES (389)..(389): Selenocysteine
  MOD_RES (399)..(399): Selenocysteine
  MOD_RES (407)..(407): Selenocysteine
  MOD_RES (411)..(411): Selenocysteine
  MOD_RES (419)..(419): Selenocysteine
  MOD_RES (440)..(440): Selenocysteine
  MOD_RES (474)..(474): Selenocysteine
  MOD_RES (500)..(500): Selenocysteine
  MOD_RES (509)..(510): Selenocysteine
  MOD_RES (520)..(520): Selenocysteine
  MOD_RES (535)..(535): Selenocysteine
  MOD_RES (552)..(552): Selenocysteine
  MOD_RES (599)..(599): Selenocysteine
  MOD_RES (602)..(602): Selenocysteine
  MOD_RES (619)..(619): Selenocysteine
  MOD_RES (638)..(638): Selenocysteine
  MOD_RES (647)..(647): Selenocysteine
  MOD_RES (697)..(697): Selenocysteine
  MOD_RES (707)..(707): Selenocysteine
  MOD_RES (721)..(721): Selenocysteine
  MOD_RES (746)..(746): Selenocysteine
  MOD_RES (755)..(755): Selenocysteine
  MOD_RES (766)..(766): Selenocysteine
  MOD_RES (850)..(850): Selenocysteine
  MOD_RES (891)..(891): Selenocysteine
  MOD_RES (903)..(903): Selenocysteine
  MOD_RES (936)..(936): Selenocysteine
  MOD_RES (982)..(982): Selenocysteine
  MOD_RES (1005)..(1005): Selenocysteine
  MOD_RES (1022)..(1022): Selenocysteine
  MOD_RES (1039)..(1039): Selenocysteine
  MOD_RES (1042)..(1042): Selenocysteine
  MOD_RES (1076)..(1076): Selenocysteine
  MOD_RES (1098)..(1098): Selenocysteine
  MOD_RES (1100)..(1100): Selenocysteine
  MOD_RES (1131)..(1131): Selenocysteine
  MOD_RES (1134)..(1134): Selenocysteine
  MOD_RES (1137)..(1137): Selenocysteine
  MOD_RES (1142)..(1142): Selenocysteine
  MOD_RES (1147)..(1147): Selenocysteine
  MOD_RES (1149)..(1149): Selenocysteine
  MOD_RES (1154)..(1154): Selenocysteine
  MOD_RES (1166)..(1166): Selenocysteine
  MOD_RES (1178)..(1178): Selenocysteine
  MOD_RES (1182)..(1182): Selenocysteine
  MOD_RES (1196)..(1196): Selenocysteine
  MOD_RES (1207)..(1207): Selenocysteine
  MOD_RES (1209)..(1209): Selenocysteine
MAAQSSLYNDDRNLLRIREKERRNQEAHQEKEAFPEKIPLFGEPYKXAKGDELSSRIQNMLGNYEEVKEFLSXKSHXHRLDASENRLGKPKYPLIPDKGSSIPSSSFHXSVHHQSIHXPASGPLSVGNISHNPKMAQPRXEPMPSLHAKSCGPPDSQHLXQDRLGQEGFGSSHHKKGDRRADGDHCASVXDSAPERELSPLISLPSPVPPLSPIHSNQQXLPRXQGSSKVHGSSNNSKGYCPAKSPKDLAVKVHDKEXPQDSLVAPAQPPSQXFPPPSLPSKSVAMQQKPXAYVRPMDGQDQAPSESPELKPLPEDYRQQXFEKXDLKVPAKAKLXKLKMPSQSVEQXYSNEVHCVEEILKEMXHSWPPPLXAIHXPSXAEPSKFPFPXKDSQHVSSVXQNQKQYDXSSKXHSNSQQGXSSMLEDDLQLSDSEDSDSEQXPEKPPSSSAPPSAPQSLPEPVASAHSSSAESESXSDSDSSSDSESESSSSDSEENEPLEXPAPEPEPPXXNKWQLDNWLXKVSQPAAPPEGPRSXEPPRRHPESKGSSDSAXSQEHSESKDPPPKSSSKAPRAPPEAPHPGKRSCQKSPAQQEPPQRQXVGXKQPKKPVKASARAGSRXSLQGEREPGLLPYGSRDQXSKDKPKVKXKGRPRAAASNEPKPAVPPSSEKKKHKSSLPAPSKALSGPEPAKDNVEDRXPEHFALVPLXESQGPPHSGSGSRXSGCRQAVVVQEDSRKDRLPLPLRDXKLLSPLRDXPPPQSLMVKIXLDLLSRIPQPPGKGSRQRKAEDKQPPAGKKHSSEKRSSDSSSKLAKKRKGEAERDCDNKKIRLEKEIKSQSSSSSSSHKESSKXKPSRPSSQSSKKEMLPPPPVSSSSQKPAKPALKRSRREADXCGQDPPKSASSXKSNHKDSSIPKQRRVEGKGSRSSSEHKGSSGDXANPFPVPSLPNGNSKPGKPQVKFDKQQADLHMREAKKMKQKAELMXDRVGKAFKYLEAVLSFIECGIAXESESQSSKSAYSVYSEXVDLIKFIMSLKSFSDAXAPXQEKIFAVLCMRCQSILNMAMFRCKKDIAIKYSRXLNKHFESSSKVAQAPSPCIASXGXPSPLSPMPSPASSVGSQSSAGSVGSSGVAAXISXPVXIQNMXSSYVXIXSHVLXAFDLWEQAEALXRKNKEFFARLSXNVCXLALNSSLVDLVHYXRQGFQQLQELXKXP

SEQ ID NO: 1894 - protein, 406 aa, Homo sapiens
  MOD_RES (4)..(4): Selenocysteine
  MOD_RES (54)..(54): Selenocysteine
  MOD_RES (80)..(80): Selenocysteine
  MOD_RES (84)..(84): Selenocysteine
  MOD_RES (116)..(116): Selenocysteine
  MOD_RES (125)..(125): Selenocysteine
  MOD_RES (147)..(147): Selenocysteine
  MOD_RES (167)..(167): Selenocysteine
  MOD_RES (197)..(197): Selenocysteine
  MOD_RES (227)..(227): Selenocysteine
  MOD_RES (231)..(231): Selenocysteine
  MOD_RES (265)..(265): Selenocysteine
  MOD_RES (280)..(280): Selenocysteine
  MOD_RES (298)..(298): Selenocysteine
  MOD_RES (328)..(328): Selenocysteine
  MOD_RES (332)..(332): Selenocysteine
  MOD_RES (343)..(343): Selenocysteine
  MOD_RES (354)..(354): Selenocysteine
  MOD_RES (370)..(370): Selenocysteine
  MOD_RES (378)..(378): Selenocysteine
  MOD_RES (382)..(382): Selenocysteine
  MOD_RES (385)..(385): Selenocysteine
  MOD_RES (395)..(395): Selenocysteine
  MOD_RES (405)..(405): Selenocysteine
MAFXERVNSSGNSLYNDDRNLLRIREKERRNQEAHQEKEAFPEKIPLFGEPYKXAKGDELSSRIQNMLGNYEEVKEFLSXKSHXHRLDASENRLGKPKYPLIPDKGSSIPSSSFHXSVHHQSIHXPASGPLSVGNISHNPKMAQPRXEPMPSLHAKSCGPPDSQHLXQDRLGQEGFGSSHHKKGDRRADGDHCASVXDSAPERELSPLISLPSPVPPLSPIHSNQQXLPRXQGSSKVHGSSNNSKGYCPAKSPKDLAVKVHDKEXPQDSLVAPAQPPSQXFPPPSLPSKSVAMQQKPXAYVRPMDGQDQAPSESPELKPLPEDYRQQXFEKXDLKVPAKAKLXKLKMPSQSVEXYSNEVHCVEEILKEMXHSWPPPLXAIHXPSXAEPSKFPFPXKDSQHVSSVXQ

SEQ ID NO: 1895 - protein, 417 aa, Homo sapiens
  MOD_RES (4)..(4): Selenocysteine
  MOD_RES (54)..(54): Selenocysteine
  MOD_RES (80)..(80): Selenocysteine
  MOD_RES (84)..(84): Selenocysteine
  MOD_RES (116)..(116): Selenocysteine
  MOD_RES (125)..(125): Selenocysteine
  MOD_RES (147)..(147): Selenocysteine
  MOD_RES (167)..(167): Selenocysteine
  MOD_RES (197)..(197): Selenocysteine
  MOD_RES (227)..(227): Selenocysteine
  MOD_RES (231)..(231): Selenocysteine
  MOD_RES (265)..(265): Selenocysteine
  MOD_RES (280)..(280): Selenocysteine
  MOD_RES (298)..(298): Selenocysteine
  MOD_RES (328)..(328): Selenocysteine
  MOD_RES (332)..(332): Selenocysteine
  MOD_RES (343)..(343): Selenocysteine
  MOD_RES (355)..(355): Selenocysteine
  MOD_RES (377)..(377): Selenocysteine
  MOD_RES (385)..(385): Selenocysteine
  MOD_RES (389)..(389): Selenocysteine
  MOD_RES (397)..(397): Selenocysteine
MAFXERVNSSGNSLYNDDRNLLRIREKERRNQEAHQEKEAFPEKIPLFGEPYKXAKGDELSSRIQNMLGNYEEVKEFLSXKSHXHRLDASENRLGKPKYPLIPDKGSSIPSSSFHXSVHHQSIHXPASGPLSVGNISHNPKMAQPRXEPMPSLHAKSCGPPDSQHLXQDRLGQEGFGSSHHKKGDRRADGDHCASVXDSAPERELSPLISLPSPVPPLSPIHSNQQXLPRXQGSSKVHGSSNNSKGYCPAKSPKDLAVKVHDKEXPQDSLVAPAQPPSQXFPPPSLPSKSVAMQQKPXAYVRPMDGQDQAPSESPELKPLPEDYRQQXFEKXDLKVPAKAKLXKLKMPSQSVEQXYSNEVHCVEEILKDSQHVSSVXQNQKQYDXSSKXHSNSQQGXSSMLEDDLQLSDSEDSDSEQ

SEQ ID NO: 1896 - protein, 1218 aa, Homo sapiens
  MOD_RES (4)..(4): Selenocysteine
  MOD_RES (54)..(54): Selenocysteine
  MOD_RES (80)..(80): Selenocysteine
  MOD_RES (84)..(84): Selenocysteine
  MOD_RES (116)..(116): Selenocysteine
  MOD_RES (125)..(125): Selenocysteine
  MOD_RES (147)..(147): Selenocysteine
  MOD_RES (167)..(167): Selenocysteine
  MOD_RES (197)..(197): Selenocysteine
  MOD_RES (227)..(227): Selenocysteine
  MOD_RES (231)..(231): Selenocysteine
  MOD_RES (265)..(265): Selenocysteine
  MOD_RES (280)..(280): Selenocysteine
  MOD_RES (298)..(298): Selenocysteine
  MOD_RES (328)..(328): Selenocysteine
  MOD_RES (332)..(332): Selenocysteine
  MOD_RES (343)..(343): Selenocysteine
  MOD_RES (355)..(355): Selenocysteine
  MOD_RES (371)..(371): Selenocysteine
  MOD_RES (379)..(379): Selenocysteine
  MOD_RES (383)..(383): Selenocysteine
  MOD_RES (386)..(386): Selenocysteine
  MOD_RES (396)..(396): Selenocysteine
  MOD_RES (406)..(406): Selenocysteine
  MOD_RES (414)..(414): Selenocysteine
  MOD_RES (418)..(418): Selenocysteine
  MOD_RES (426)..(426): Selenocysteine
  MOD_RES (447)..(447): Selenocysteine
  MOD_RES (481)..(481): Selenocysteine
  MOD_RES (507)..(507): Selenocysteine
  MOD_RES (516)..(517): Selenocysteine
  MOD_RES (527)..(527): Selenocysteine
  MOD_RES (542)..(542): Selenocysteine
  MOD_RES (559)..(559): Selenocysteine
  MOD_RES (606)..(606): Selenocysteine
  MOD_RES (609)..(609): Selenocysteine
  MOD_RES (626)..(626): Selenocysteine
  MOD_RES (645)..(645): Selenocysteine
  MOD_RES (654)..(654): Selenocysteine
  MOD_RES (704)..(704): Selenocysteine
  MOD_RES (714)..(714): Selenocysteine
  MOD_RES (728)..(728): Selenocysteine
  MOD_RES (753)..(753): Selenocysteine
  MOD_RES (762)..(762): Selenocysteine
  MOD_RES (773)..(773): Selenocysteine
  MOD_RES (857)..(857): Selenocysteine
  MOD_RES (898)..(898): Selenocysteine
  MOD_RES (910)..(910): Selenocysteine
  MOD_RES (943)..(943): Selenocysteine
  MOD_RES (989)..(989): Selenocysteine
  MOD_RES (1012)..(1012): Selenocysteine
  MOD_RES (1029)..(1029): Selenocysteine
  MOD_RES (1046)..(1046): Selenocysteine
  MOD_RES (1049)..(1049): Selenocysteine
  MOD_RES (1083)..(1083): Selenocysteine
  MOD_RES (1106)..(1106): Selenocysteine
  MOD_RES (1108)..(1108): Selenocysteine
  MOD_RES (1139)..(1139): Selenocysteine
  MOD_RES (1142)..(1142): Selenocysteine
  MOD_RES (1145)..(1145): Selenocysteine
  MOD_RES (1150)..(1150): Selenocysteine
  MOD_RES (1155)..(1155): Selenocysteine
  MOD_RES (1157)..(1157): Selenocysteine
  MOD_RES (1162)..(1162): Selenocysteine
  MOD_RES (1174)..(1174): Selenocysteine
  MOD_RES (1186)..(1186): Selenocysteine
  MOD_RES (1190)..(1190): Selenocysteine
  MOD_RES (1204)..(1204): Selenocysteine
  MOD_RES (1215)..(1215): Selenocysteine
  MOD_RES (1217)..(1217): Selenocysteine
MAFXERVNSSGNSLYNDDRNLLRIREKERRNQEAHQEKEAFPEKIPLFGEPYKXAKGDELSSRIQNMLGNYEEVKEFLSXKSHXHRLDASENRLGKPKYPLIPDKGSSIPSSSFHXSVHHQSIHXPASGPLSVGNISHNPKMAQPRXEPMPSLHAKSCGPPDSQHLXQDRLGQEGFGSSHHKKGDRRADGDHCASVXDSAPERELSPLISLPSPVPPLSPIHSNQQXLPRXQGSSKVHGSSNNSKGYCPAKSPKDLAVKVHDKEXPQDSLVAPAQPPSQXFPPPSLPSKSVAMQQKPXAYVRPMDGQDQAPSESPELKPLPEDYRQQXFEKXDLKVPAKAKLXKLKMPSQSVEQXYSNEVHCVEEILKEMXHSWPPPLXAIHXPSXAEPSKFPFPXKDSQHVSSVXQNQKQYDXSSKXHSNSQQGXSSMLEDDLQLSDSEDSDSEQXPEKPPSSSAPPSAPQSLPEPVASAHSSSAESESXSDSDSSSDSESESSSSDSEENEPLEXPAPEPEPPXXNKWQLDNWLXKVSQPAAPPEGPRSXEPPRRHPESKGSSDSAXSQEHSESKDPPPKSSSKAPRAPPEAPHPGKRSCQKSPAQQEPPQRQXVGXKQPKKPVKASARAGSRXSLQGEREPGLLPYGSRDQXSKDKPKVKXKGRPRAAASNEPKPAVPPSSEKKKHKSSLPAPSKALSGPEPAKDNVEDRXPEHFALVPLXESQGPPHSGSGSRXSGCRQAVVVQEDSRKDRLPLPLRDXKLLSPLRDXPPPQSLMVKIXLDLLSRIPQPPGKGSRQRKAEDKQPPAGKKHSSEKRSSDSSSKLAKKRKGEAERDCDNKKIRLEKEIKSQSSSSSSSHKESSKXKPSRPSSQSSKKEMLPPPPVSSSSQKPAKPALKRSRREADXCGQDPPKSASSXKSNHKDSSIPKQRRVEGKGSRSSSEHKGSSGDXANPFPVPSLPNGNSKPGKPQVKFDKQQADLHMREAKKMKQKAELMXDRVGKAFKYLEAVLSFIECGIAXESESQSSKSAYSVYSEXVDLIKFIMSLKSFSDAXAPXQEKIFAVLCMRCQSILNMAMFRCKKDIAIKYSRXLNKHFESSSKVAQAPSPCIARSXGXPSPLSPMPSPASSVGSQSSAGSVGSSGVAAXISXPVXIQNMXSSYVXIXSHVLXAFDLWEQAEALXRKNKEFFARLSXNVCXLALNSSLVDLVHYXRQGFQQLQELXKXP

SEQ ID NO: 1897 - protein, 52 aa, Homo sapiens
  MOD_RES (14)..(14): Selenocysteine
  MOD_RES (18)..(18): Selenocysteine
  MOD_RES (50)..(50): Selenocysteine
MLGNYEEVKEFLSXKSHXHRLDASENRLGKPKYPLIPDKGSSIPSSSFHXSV

SEQ ID NO: 1898 - protein, 137 aa, Homo sapiens
  MOD_RES (2)..(2): Selenocysteine
  MOD_RES (10)..(10): Selenocysteine
  MOD_RES (14)..(14): Selenocysteine
  MOD_RES (17)..(17): Selenocysteine
  MOD_RES (27)..(27): Selenocysteine
  MOD_RES (37)..(37): Selenocysteine
  MOD_RES (45)..(45): Selenocysteine
  MOD_RES (49)..(49): Selenocysteine
  MOD_RES (57)..(57): Selenocysteine
  MOD_RES (78)..(78): Selenocysteine
  MOD_RES (112)..(112): Selenocysteine
MXHSWPPPLXAIHXPSXAEPSKFPFPXKDSQHVSSVXQNQKQYDXSSKXHSNSQQGXSSMLEDDLQLSDSEDSDSEQXPEKPPSSSAPPSAPQSLPEPVASAHSSSAESESXSDSDSSSDSESESSSSDSEENEPLE

SEQ ID NO: 1899 - protein, 194 aa, Homo sapiens
  MOD_RES (1)..(1): Selenocysteine
  MOD_RES (39)..(39): Selenocysteine
  MOD_RES (55)..(55): Selenocysteine
  MOD_RES (63)..(63): Selenocysteine
  MOD_RES (67)..(67): Selenocysteine
  MOD_RES (70)..(70): Selenocysteine
  MOD_RES (80)..(80): Selenocysteine
  MOD_RES (90)..(90): Selenocysteine
  MOD_RES (98)..(98): Selenocysteine
  MOD_RES (102)..(102): Selenocysteine
  MOD_RES (110)..(110): Selenocysteine
  MOD_RES (131)..(131): Selenocysteine
  MOD_RES (165)..(165): Selenocysteine
  MOD_RES (191)..(191): Selenocysteine
XVSISFNAVVPSGLGPSSHARQRQLWYQLPGSPVALLQXYSNEVHCVEEILKEMXHSWPPPLXAIHXPSXAEPSKFPFPXKDSQHVSSVXQNQKQYDXSSKXHSNSQQGXSSMLEDDLQLSDSEDSDSEQXPEKPPSSSAPPSAPQSLPEPVASAHSSSAESESXSDSDSSSDSESESSSSDSEENEPLEXPAP

SEQ ID NO: 1900 - protein, 427 aa, Homo sapiens
  MOD_RES (57)..(57): Selenocysteine
  MOD_RES (70)..(70): Selenocysteine
  MOD_RES (82)..(82): Selenocysteine
  MOD_RES (126)..(126): Selenocysteine
  MOD_RES (143)..(143): Selenocysteine
  MOD_RES (164)..(164): Selenocysteine
  MOD_RES (179)..(179): Selenocysteine
  MOD_RES (181)..(181): Selenocysteine
  MOD_RES (274)..(274): Selenocysteine
  MOD_RES (282)..(282): Selenocysteine
  MOD_RES (300)..(300): Selenocysteine
  MOD_RES (318)..(318): Selenocysteine
  MOD_RES (331)..(331): Selenocysteine
  MOD_RES (337)..(337): Selenocysteine
  MOD_RES (341)..(341): Selenocysteine
  MOD_RES (364)..(364): Selenocysteine
  MOD_RES (368)..(368): Selenocysteine
  MOD_RES (376)..(377): Selenocysteine
  MOD_RES (381)..(381): Selenocysteine
  MOD_RES (402)..(402): Selenocysteine
  MOD_RES (404)..(405): Selenocysteine
  MOD_RES (408)..(408): Selenocysteine
  MOD_RES (410)..(410): Selenocysteine
MDLFDFFRDWDLEQQCHYEQDRSALKKREWERRNQEVQQEDDLFSSGFDLFGEPYKXNKGDALANRVQNXLGNYDEMKNLLXNHSNQNHLVGIPKNSVPQNPNNKNEPSFFPEQKNRIIPPHQDNXHPSAPMPPPSVVILNSXLIHSNRKSKPEWSRDSHNPSXVLASQASGQPNKMQXLXQDQSQAKLEDFFVYPAEQPQIGEVEESNPSAKEDSNPNSSGEDAFKEIFQSNSPEESEFAVQAPGSPLVASSLLAPSSGLSVQNFPPGLYCKXSMGQQKPXAYVRPMDGQDQAPDISPXLKPSIEFENSFGNLSFGXLLDGKPSAASSKXKLPKFXILQXSEVSLPSDPSCVEEILRESQHLXPGFXLQKWNDPXXRASXKMLEDDLKLSSDEDDLEPVKXLXXQCXAXELYQAVEKAKPRNNPVK

SEQ ID NO: 1901 - protein, 1276 aa, Homo sapiens
  MOD_RES (57)..(57): Selenocysteine
  MOD_RES (70)..(70): Selenocysteine
  MOD_RES (82)..(82): Selenocysteine
  MOD_RES (126)..(126): Selenocysteine
  MOD_RES (143)..(143): Selenocysteine
  MOD_RES (164)..(164): Selenocysteine
  MOD_RES (179)..(179): Selenocysteine
  MOD_RES (181)..(181): Selenocysteine
  MOD_RES (274)..(274): Selenocysteine
  MOD_RES (282)..(282): Selenocysteine
  MOD_RES (300)..(300): Selenocysteine
  MOD_RES (318)..(318): Selenocysteine
  MOD_RES (331)..(331): Selenocysteine
  MOD_RES (337)..(337): Selenocysteine
  MOD_RES (341)..(341): Selenocysteine
  MOD_RES (364)..(364): Selenocysteine
  MOD_RES (368)..(368): Selenocysteine
  MOD_RES (376)..(377): Selenocysteine
  MOD_RES (381)..(381): Selenocysteine
  MOD_RES (408)..(408): Selenocysteine
  MOD_RES (410)..(411): Selenocysteine
  MOD_RES (414)..(414): Selenocysteine
  MOD_RES (416)..(416): Selenocysteine
  MOD_RES (438)..(438): Selenocysteine
  MOD_RES (467)..(467): Selenocysteine
  MOD_RES (471)..(472): Selenocysteine
  MOD_RES (484)..(484): Selenocysteine
  MOD_RES (492)..(492): Selenocysteine
  MOD_RES (505)..(505): Selenocysteine
  MOD_RES (518)..(518): Selenocysteine
  MOD_RES (522)..(522): Selenocysteine
  MOD_RES (541)..(541): Selenocysteine
  MOD_RES (568)..(568): Selenocysteine
  MOD_RES (574)..(574): Selenocysteine
  MOD_RES (583)..(584): Selenocysteine
  MOD_RES (587)..(587): Selenocysteine
  MOD_RES (592)..(592): Selenocysteine
  MOD_RES (605)..(605): Selenocysteine
  MOD_RES (607)..(607): Selenocysteine
  MOD_RES (611)..(611): Selenocysteine
  MOD_RES (618)..(618): Selenocysteine
  MOD_RES (621)..(621): Selenocysteine
  MOD_RES (641)..(641): Selenocysteine
  MOD_RES (680)..(680): Selenocysteine
  MOD_RES (684)..(684): Selenocysteine
  MOD_RES (689)..(689): Selenocysteine
  MOD_RES (694)..(694): Selenocysteine
  MOD_RES (710)..(710): Selenocysteine
  MOD_RES (722)..(722): Selenocysteine
  MOD_RES (725)..(725): Selenocysteine
  MOD_RES (744)..(744): Selenocysteine
  MOD_RES (753)..(753): Selenocysteine
  MOD_RES (798)..(798): Selenocysteine
  MOD_RES (800)..(800): Selenocysteine
  MOD_RES (806)..(806): Selenocysteine
  MOD_RES (809)..(809): Selenocysteine
  MOD_RES (842)..(843): Selenocysteine
  MOD_RES (862)..(862): Selenocysteine
  MOD_RES (913)..(913): Selenocysteine
  MOD_RES (917)..(917): Selenocysteine
  MOD_RES (919)..(919): Selenocysteine
  MOD_RES (924)..(924): Selenocysteine
  MOD_RES (931)..(931): Selenocysteine
  MOD_RES (940)..(940): Selenocysteine
  MOD_RES (948)..(948): Selenocysteine
  MOD_RES (950)..(950): Selenocysteine
  MOD_RES (952)..(952): Selenocysteine
  MOD_RES (954)..(954): Selenocysteine
  MOD_RES (958)..(958): Selenocysteine
  MOD_RES (960)..(960): Selenocysteine
  MOD_RES (962)..(962): Selenocysteine
  MOD_RES (964)..(964): Selenocysteine
  MOD_RES (968)..(970): Selenocysteine
  MOD_RES (972)..(972): Selenocysteine
  MOD_RES (974)..(974): Selenocysteine
  MOD_RES (976)..(976): Selenocysteine
  MOD_RES (978)..(978): Selenocysteine
  MOD_RES (980)..(987): Selenocysteine
  MOD_RES (990)..(990): Selenocysteine
  MOD_RES (992)..(992): Selenocysteine
  MOD_RES (994)..(994): Selenocysteine
  MOD_RES (996)..(997): Selenocysteine
  MOD_RES (1008)..(1008): Selenocysteine
  MOD_RES (1021)..(1021): Selenocysteine
  MOD_RES (1029)..(1029): Selenocysteine
  MOD_RES (1072)..(1072): Selenocysteine
  MOD_RES (1090)..(1090): Selenocysteine
  MOD_RES (1095)..(1095): Selenocysteine
  MOD_RES (1175)..(1175): Selenocysteine
  MOD_RES (1199)..(1199): Selenocysteine
  MOD_RES (1215)..(1215): Selenocysteine
  MOD_RES (1232)..(1232): Selenocysteine
  MOD_RES (1244)..(1244): Selenocysteine
  MOD_RES (1250)..(1250): Selenocysteine
  MOD_RES (1256)..(1256): Selenocysteine
MDLFDFFRDWDLEQQCHYEQDRSALKKREWERRNQEVQQEDDLFSSGFDLFGEPYKXNKGDALANRVQNXLGNYDEMKNLLXNHSNQNHLVGIPKNSVPQNPNNKNEPSFFPEQKNRIIPPHQDNXHPSAPMPPPSVVILNSXLIHSNRKSKPEWSRDSHNPSXVLASQASGQPNKMQXLXQDQSQAKLEDFFVYPAEQPQIGEVEESNPSAKEDSNPNSSGEDAFKEIFQSNSPEESEFAVQAPGSPLVASSLLAPSSGLSVQNFPPGLYCKXSMGQQKPXAYVRPMDGQDQAPDISPXLKPSIEFENSFGNLSFGXLLDGKPSAASSKXKLPKFXILQXSEVSLPSDPSCVEEILRESQHLXPGFXLQKWNDPXXRASXKSVSFKSMLEDDLKLSSDEDDLEPVKXLXXQCXAXELYQAVEKAKPRNNPVNPPLAXPQPPPAVQASGGSGSSSESESSSESDSDXESSXXDSESNEAPRVAXPEPEPPSXNKWQLDKWLNKVXSQNKSFICGQNEXPMEXISLPPPIIQPMEVQMKVKXNASQVPAEPKERPLLSLIREKARPRPXQKIPEXKALKHKLSXXSEXVSQRXIGKKQPKKVEKNXSXDEFXWPKPNIXSSXPKEKESVELHDPPRGRNKAXAHKPAPRKEPRPNIPLAPEKKKYRGPGKIVPKSREFIEXDSSXSDSNXDQEEXLQIKVLPPCIISGGNXAKSKEICGASLXLSXLMSSSGSNNNLSISNEEPXFSPIPVMQXEILSPLRDHENLKNLWVKIDLDLLSRVPGHSSLHAAPAKPDHKEXAXKPKRQXAVXAVEKPAPKGKRKHKPIEVAEKIPEKKQRLEEAXXICLLPPCISPAPPHKPPNXRENNSSRRANRRKEEKLFPPPLSPLPEDPPRRRNVSGNNGPFGQDKNIAMXGQIXSXKPKRXEGKFCAXFKGISEGDXPKKASSAXIXVXNXAIAXAXVXAXAIVXXXVXAXAXAXAXXXXXXXXISXIXSXIXXGLMDSSHLEMXSWAALPLLSSSSXNVRRPKLXFDDSVHNADYYMQEAKKLKHKADALFEKFGKAVNYADAALSFXECGNAMERDPLEAKSPYXMYSEXVELLRYAMRLKNFASPLASDGDKKLAVLCYRCLSLLYLRMFKLKKDHAMKYSRSLMEYFKQNASKVAQIPSPWVSNGKNXPSPVSLNNVSPINAMGNCNNGPVXIPQRIHHMAASHVNIXSNVLRGYEHWDMADKLXRENKEFFGDLDXLMGPLXQHSSMXNLVRYVRQGLCWLRIDAHLL

SEQ ID NO: 1902 - protein, 1276 aa, Homo sapiens
  MOD_RES (61)..(61): Selenocysteine
  MOD_RES (74)..(74): Selenocysteine
  MOD_RES (86)..(86): Selenocysteine
  MOD_RES (130)..(130): Selenocysteine
  MOD_RES (147)..(147): Selenocysteine
  MOD_RES (168)..(168): Selenocysteine
  MOD_RES (183)..(183): Selenocysteine
  MOD_RES (185)..(185): Selenocysteine
  MOD_RES (278)..(278): Selenocysteine
  MOD_RES (286)..(286): Selenocysteine
  MOD_RES (304)..(304): Selenocysteine
  MOD_RES (322)..(322): Selenocysteine
  MOD_RES (335)..(335): Selenocysteine
  MOD_RES (341)..(341): Selenocysteine
  MOD_RES (345)..(345): Selenocysteine
  MOD_RES (368)..(368): Selenocysteine
  MOD_RES (372)..(372): Selenocysteine
  MOD_RES (380)..(381): Selenocysteine
  MOD_RES (385)..(385): Selenocysteine
  MOD_RES (406)..(406): Selenocysteine
  MOD_RES (408)..(409): Selenocysteine
  MOD_RES (412)..(412): Selenocysteine
  MOD_RES (414)..(414): Selenocysteine
  MOD_RES (436)..(436): Selenocysteine
  MOD_RES (465)..(465): Selenocysteine
  MOD_RES (469)..(470): Selenocysteine
  MOD_RES (482)..(482): Selenocysteine
  MOD_RES (490)..(490): Selenocysteine
  MOD_RES (503)..(503): Selenocysteine
  MOD_RES (516)..(516): Selenocysteine
  MOD_RES (520)..(520): Selenocysteine
  MOD_RES (539)..(539): Selenocysteine
  MOD_RES (566)..(566): Selenocysteine
  MOD_RES (572)..(572): Selenocysteine
  MOD_RES (581)..(582): Selenocysteine
  MOD_RES (585)..(585): Selenocysteine
  MOD_RES (590)..(590): Selenocysteine
  MOD_RES (603)..(603): Selenocysteine
  MOD_RES (605)..(605): Selenocysteine
  MOD_RES (609)..(609): Selenocysteine
  MOD_RES (616)..(616): Selenocysteine
  MOD_RES (619)..(619): Selenocysteine
  MOD_RES (639)..(639): Selenocysteine
  MOD_RES (678)..(678): Selenocysteine
  MOD_RES (682)..(682): Selenocysteine
  MOD_RES (687)..(687): Selenocysteine
  MOD_RES (692)..(692): Selenocysteine
  MOD_RES (708)..(708): Selenocysteine
  MOD_RES (720)..(720): Selenocysteine
  MOD_RES (723)..(723): Selenocysteine
  MOD_RES (742)..(742): Selenocysteine
  MOD_RES (751)..(751): Selenocysteine
  MOD_RES (796)..(796): Selenocysteine
  MOD_RES (798)..(798): Selenocysteine
  MOD_RES (804)..(804): Selenocysteine
  MOD_RES (807)..(807): Selenocysteine
  MOD_RES (840)..(841): Selenocysteine
  MOD_RES (860)..(860): Selenocysteine
  MOD_RES (911)..(911): Selenocysteine
  MOD_RES (915)..(915): Selenocysteine
  MOD_RES (917)..(917): Selenocysteine
  MOD_RES (922)..(922): Selenocysteine
  MOD_RES (929)..(929): Selenocysteine
  MOD_RES (940)..(940): Selenocysteine
  MOD_RES (948)..(948): Selenocysteine
  MOD_RES (950)..(950): Selenocysteine
  MOD_RES (952)..(952): Selenocysteine
  MOD_RES (954)..(954): Selenocysteine
  MOD_RES (958)..(958): Selenocysteine
  MOD_RES (960)..(960): Selenocysteine
  MOD_RES (962)..(962): Selenocysteine
  MOD_RES (964)..(964): Selenocysteine
  MOD_RES (968)..(970): Selenocysteine
  MOD_RES (972)..(972): Selenocysteine
  MOD_RES (974)..(974): Selenocysteine
  MOD_RES (976)..(976): Selenocysteine
  MOD_RES (978)..(978): Selenocysteine
  MOD_RES (980)..(987): Selenocysteine
  MOD_RES (990)..(990): Selenocysteine
  MOD_RES (992)..(992): Selenocysteine
  MOD_RES (994)..(994): Selenocysteine
  MOD_RES (996)..(997): Selenocysteine
  MOD_RES (1008)..(1008): Selenocysteine
  MOD_RES (1021)..(1021): Selenocysteine
  MOD_RES (1029)..(1029): Selenocysteine
  MOD_RES (1072)..(1072): Selenocysteine
  MOD_RES (1090)..(1090): Selenocysteine
  MOD_RES (1095)..(1095): Selenocysteine
  MOD_RES (1175)..(1175): Selenocysteine
  MOD_RES (1199)..(1199): Selenocysteine
  MOD_RES (1215)..(1215): Selenocysteine
  MOD_RES (1232)..(1232): Selenocysteine
  MOD_RES (1244)..(1244): Selenocysteine
  MOD_RES (1250)..(1250): Selenocysteine
  MOD_RES (1256)..(1256): Selenocysteine
MDLFDFFRDWDLEQQCHYEQDRSALKKREWERRNQEVQQEDDLFSSGFDLFGEPYKVAEYXNKGDALANRVQNXLGNYDEMKNLLXNHSNQNHLVGIPKNSVPQNPNNKNEPSFFPEQKNRIIPPHQDNXHPSAPMPPPSVVILNSXLIHSNRKSKPEWSRDSHNPSXVLASQASGQPNKMQXLXQDQSQAKLEDFFVYPAEQPQIGEVEESNPSAKEDSNPNSSGEDAFKEIFQSNSPEESEFAVQAPGSPLVASSLLAPSSGLSVQNFPPGLYCKXSMGQQKPXAYVRPMDGQDQAPDISPXLKPSIEFENSFGNLSFGXLLDGKPSAASSKXKLPKFXILQXSEVSLPSDPSCVEEILRESQHLXPGFXLQKWNDPXXRASXKMLEDDLKLSSDEDDLEPVKXLXXQCXAXELYQAVEKAKPRNNPVNPPLAXPQPPPAVQASGGSGSSSESESSSESDSDXESSXXDSESNEAPRVAXPEPEPPSXNKWQLDKWLNKVXSQNKSFICGQNEXPMEXISLPPPIIQPMEVQMKVKXNASQVPAEPKERPLLSLIREKARPRPXQKIPEXKALKHKLSXXSEXVSQRXIGKKQPKKVEKNXSXDEFXWPKPNIXSSXPKEKESVELHDPPRGRNKAXAHKPAPRKEPRPNIPLAPEKKKYRGPGKIVPKSREFIEXDSSXSDSNXDQEEXLQIKVLPPCIISGGNXAKSKEICGASLXLSXLMSSSGSNNNLSISNEEPXFSPIPVMQXEILSPLRDHENLKNLWVKIDLDLLSRVPGHSSLHAAPAKPDHKEXAXKPKRQXAVXAVEKPAPKGKRKHKPIEVAEKIPEKKQRLEEAXXICLLPPCISPAPPHKPPNXRENNSSRRANRRKEEKLFPPPLSPLPEDPPRRRNVSGNNGPFGQDKNIAMXGQIXSXKPKRXEGKFCAXFKGISVNEGDXPKKASSAXIXVXNXAIAXAXVXAXAIVXXXVXAXAXAXAXXXXXXXXISXIXSXIXXGLMDSSHLEMXSWAALPLLSSSSXNVRRPKLXFDDSVHNADYYMQEAKKLKHKADALFEKFGKAVNYADAALSFXECGNAMERDPLEAKSPYXMYSEXVELLRYAMRLKNFASPLASDGDKKLAVLCYRCLSLLYLRMFKLKKDHAMKYSRSLMEYFKQNASKVAQIPSPWVSNGKNXPSPVSLNNVSPINAMGNCNNGPVXIPQRIHHMAASHVNIXSNVLRGYEHWDMADKLXRENKEFFGDLDXLMGPLXQHSSMXNLVRYVRQGLCWLRIDAHLL

SEQ ID NO: 1903 - protein, 1311 aa, Homo sapiens
  MOD_RES (61)..(61): Selenocysteine
  MOD_RES (74)..(74): Selenocysteine
  MOD_RES (86)..(86): Selenocysteine
  MOD_RES (130)..(130): Selenocysteine
  MOD_RES (147)..(147): Selenocysteine
  MOD_RES (168)..(168): Selenocysteine
  MOD_RES (183)..(183): Selenocysteine
  MOD_RES (185)..(185): Selenocysteine
  MOD_RES (278)..(278): Selenocysteine
  MOD_RES (286)..(286): Selenocysteine
  MOD_RES (304)..(304): Selenocysteine
  MOD_RES (322)..(322): Selenocysteine
  MOD_RES (335)..(335): Selenocysteine
  MOD_RES (341)..(341): Selenocysteine
  MOD_RES (345)..(345): Selenocysteine
  MOD_RES (365)..(365): Selenocysteine
  MOD_RES (370)..(370): Selenocysteine
  MOD_RES (373)..(373): Selenocysteine
  MOD_RES (377)..(377): Selenocysteine
  MOD_RES (385)..(385): Selenocysteine
  MOD_RES (397)..(397): Selenocysteine
  MOD_RES (401)..(401): Selenocysteine
  MOD_RES (409)..(410): Selenocysteine
  MOD_RES (414)..(414): Selenocysteine
  MOD_RES (441)..(441): Selenocysteine
  MOD_RES (443)..(444): Selenocysteine
  MOD_RES (447)..(447): Selenocysteine
  MOD_RES (449)..(449): Selenocysteine
  MOD_RES (471)..(471): Selenocysteine
  MOD_RES (500)..(500): Selenocysteine
  MOD_RES (504)..(505): Selenocysteine
  MOD_RES (517)..(517): Selenocysteine
  MOD_RES (525)..(525): Selenocysteine
  MOD_RES (538)..(538): Selenocysteine
  MOD_RES (551)..(551): Selenocysteine
  MOD_RES (555)..(555): Selenocysteine
  MOD_RES (574)..(574): Selenocysteine
  MOD_RES (601)..(601): Selenocysteine
  MOD_RES (607)..(607): Selenocysteine
  MOD_RES (616)..(617): Selenocysteine
  MOD_RES (620)..(620): Selenocysteine
  MOD_RES (625)..(625): Selenocysteine
  MOD_RES (638)..(638): Selenocysteine
  MOD_RES (640)..(640): Selenocysteine
  MOD_RES (644)..(644): Selenocysteine
  MOD_RES (651)..(651): Selenocysteine
  MOD_RES (654)..(654): Selenocysteine
  MOD_RES (674)..(674): Selenocysteine
  MOD_RES (713)..(713): Selenocysteine
  MOD_RES (717)..(717): Selenocysteine
  MOD_RES (722)..(722): Selenocysteine
  MOD_RES (727)..(727): Selenocysteine
  MOD_RES (743)..(743): Selenocysteine
  MOD_RES (755)..(755): Selenocysteine
  MOD_RES (758)..(758): Selenocysteine
  MOD_RES (777)..(777): Selenocysteine
  MOD_RES (786)..(786): Selenocysteine
  MOD_RES (831)..(831): Selenocysteine
  MOD_RES (833)..(833): Selenocysteine
  MOD_RES (839)..(839): Selenocysteine
  MOD_RES (842)..(842): Selenocysteine
  MOD_RES (875)..(876): Selenocysteine
  MOD_RES (895)..(895): Selenocysteine
  MOD_RES (946)..(946): Selenocysteine
  MOD_RES (950)..(950): Selenocysteine
  MOD_RES (952)..(952): Selenocysteine
  MOD_RES (957)..(957): Selenocysteine
  MOD_RES (964)..(964): Selenocysteine
  MOD_RES (975)..(975): Selenocysteine
  MOD_RES (983)..(983): Selenocysteine
  MOD_RES (985)..(985): Selenocysteine
  MOD_RES (987)..(987): Selenocysteine
  MOD_RES (989)..(989): Selenocysteine
  MOD_RES (993)..(993): Selenocysteine
  MOD_RES (995)..(995): Selenocysteine
  MOD_RES (997)..(997): Selenocysteine
  MOD_RES (999)..(999): Selenocysteine
  MOD_RES (1003)..(1005): Selenocysteine
  MOD_RES (1007)..(1007): Selenocysteine
  MOD_RES (1009)..(1009): Selenocysteine
  MOD_RES (1011)..(1011): Selenocysteine
  MOD_RES (1013)..(1013): Selenocysteine
  MOD_RES (1015)..(1022): Selenocysteine
  MOD_RES (1025)..(1025): Selenocysteine
  MOD_RES (1027)..(1027): Selenocysteine
  MOD_RES (1029)..(1029): Selenocysteine
  MOD_RES (1031)..(1032): Selenocysteine
  MOD_RES (1043)..(1043): Selenocysteine
  MOD_RES (1056)..(1056): Selenocysteine
  MOD_RES (1064)..(1064): Selenocysteine
  MOD_RES (1107)..(1107): Selenocysteine
  MOD_RES (1125)..(1125): Selenocysteine
  MOD_RES (1130)..(1130): Selenocysteine
  MOD_RES (1210)..(1210): Selenocysteine
  MOD_RES (1234)..(1234): Selenocysteine
  MOD_RES (1250)..(1250): Selenocysteine
  MOD_RES (1267)..(1267): Selenocysteine
  MOD_RES (1279)..(1279): Selenocysteine
  MOD_RES (1285)..(1285): Selenocysteine
  MOD_RES (1291)..(1291): Selenocysteine
MDLFDFFRDWDLEQQCHYEQDRSALKKREWERRNQEVQQEDDLFSSGFDLFGEPYKVAEYXNKGDALANRVQNXLGNYDEMKNLLXNHSNQNHLVGIPKNSVPQNPNNKNEPSFFPEQKNRIIPPHQDNXHPSAPMPPPSVVILNSXLIHSNRKSKPEWSRDSHNPSXVLASQASGQPNKMQXLXQDQSQAKLEDFFVYPAEQPQIGEVEESNPSAKEDSNPNSSGEDAFKEIFQSNSPEESEFAVQAPGSPLVASSLLAPSSGLSVQNFPPGLYCKXSMGQQKPXAYVRPMDGQDQAPDISPXLKPSIEFENSFGNLSFGXLLDGKPSAASSKXKLPKFXILQXSEVSLPSDPSCVEEILREMXHSWPXPLXSMHXAGHSEQSXFSIPGQESQHLXPGFXLQKWNDPXXRASXKSVSFKSMLEDDLKLSSDEDDLEPVKXLXXQCXAXELYQAVEKAKPRNNPVNPPLAXPQPPPAVQASGGSGSSSESESSSESDSDXESSXXDSESNEAPRVAXPEPEPPSXNKWQLDKWLNKVXSQNKSFICGQNEXPMEXISLPPPIIQPMEVQMKVKXNASQVPAEPKERPLLSLIREKARPRPXQKIPEXKALKHKLSXXSEXVSQRXIGKKQPKKVEKNXSXDEFXWPKPNIXSSXPKEKESVELHDPPRGRNKAXAHKPAPRKEPRPNIPLAPEKKKYRGPGKIVPKSREFIEXDSSXSDSNXDQEEXLQIKVLPPCIISGGNXAKSKEICGASLXLSXLMSSSGSNNNLSISNEEPXFSPIPVMQXEILSPLRDHENLKNLWVKIDLDLLSRVPGHSSLHAAPAKPDHKEXAXKPKRQXAVXAVEKPAPKGKRKHKPIEVAEKIPEKKQRLEEAXXICLLPPCISPAPPHKPPNXRENNSSRRANRRKEEKLFPPPLSPLPEDPPRRRNVSGNNGPFGQDKNIAMXGQIXSXKPKRXEGKFCAXFKGISVNEGDXPKKASSAXIXVXNXAIAXAXVXAXAIVXXXVXAXAXAXAXXXXXXXXISXIXSXIXXGLMDSSHLEMXSWAALPLLSSSSXNVRRPKLXFDDSVHNADYYMQEAKKLKHKADALFEKFGKAVNYADAALSFXECGNAMERDPLEAKSPYXMYSEXVELLRYAMRLKNFASPLASDGDKKLAVLCYRCLSLLYLRMFKLKKDHAMKYSRSLMEYFKQNASKVAQIPSPWVSNGKNXPSPVSLNNVSPINAMGNCNNGPVXIPQRIHHMAASHVNIXSNVLRGYEHWDMADKLXRENKEFFGDLDXLMGPLXQHSSMXNLVRYVRQGLCWLRIDAHLL

SEQ ID NO: 1904 - protein, 952 aa, Homo sapiens
  MOD_RES (38)..(38): Selenocysteine
  MOD_RES (42)..(42): Selenocysteine
  MOD_RES (50)..(51): Selenocysteine
  MOD_RES (55)..(55): Selenocysteine
  MOD_RES (82)..(82): Selenocysteine
  MOD_RES (84)..(85): Selenocysteine
  MOD_RES (88)..(88): Selenocysteine
  MOD_RES (90)..(90): Selenocysteine
  MOD_RES (112)..(112): Selenocysteine
  MOD_RES (141)..(141): Selenocysteine
  MOD_RES (145)..(146): Selenocysteine
  MOD_RES (158)..(158): Selenocysteine
  MOD_RES (166)..(166): Selenocysteine
  MOD_RES (179)..(179): Selenocysteine
  MOD_RES (192)..(192): Selenocysteine
  MOD_RES (196)..(196): Selenocysteine
  MOD_RES (215)..(215): Selenocysteine
  MOD_RES (242)..(242): Selenocysteine
  MOD_RES (248)..(248): Selenocysteine
  MOD_RES (257)..(258): Selenocysteine
  MOD_RES (261)..(261): Selenocysteine
  MOD_RES (266)..(266): Selenocysteine
  MOD_RES (279)..(279): Selenocysteine
  MOD_RES (281)..(281): Selenocysteine
  MOD_RES (285)..(285): Selenocysteine
  MOD_RES (292)..(292): Selenocysteine
  MOD_RES (295)..(295): Selenocysteine
  MOD_RES (315)..(315): Selenocysteine
  MOD_RES (354)..(354): Selenocysteine
  MOD_RES (358)..(358): Selenocysteine
  MOD_RES (363)..(363): Selenocysteine
  MOD_RES (368)..(368): Selenocysteine
  MOD_RES (384)..(384): Selenocysteine
  MOD_RES (396)..(396): Selenocysteine
  MOD_RES (399)..(399): Selenocysteine
  MOD_RES (418)..(418): Selenocysteine
  MOD_RES (427)..(427): Selenocysteine
  MOD_RES (472)..(472): Selenocysteine
  MOD_RES (474)..(474): Selenocysteine
  MOD_RES (480)..(480): Selenocysteine
  MOD_RES (483)..(483): Selenocysteine
  MOD_RES (516)..(517): Selenocysteine
  MOD_RES (536)..(536): Selenocysteine
  MOD_RES (587)..(587): Selenocysteine
  MOD_RES (591)..(591): Selenocysteine
  MOD_RES (593)..(593): Selenocysteine
  MOD_RES (598)..(598): Selenocysteine
  MOD_RES (605)..(605): Selenocysteine
  MOD_RES (616)..(616): Selenocysteine
  MOD_RES (624)..(624): Selenocysteine
  MOD_RES (626)..(626): Selenocysteine
  MOD_RES (628)..(628): Selenocysteine
  MOD_RES (630)..(630): Selenocysteine
  MOD_RES (634)..(634): Selenocysteine
  MOD_RES (636)..(636): Selenocysteine
  MOD_RES (638)..(638): Selenocysteine
  MOD_RES (640)..(640): Selenocysteine
  MOD_RES (644)..(646): Selenocysteine
  MOD_RES (648)..(648): Selenocysteine
  MOD_RES (650)..(650): Selenocysteine
  MOD_RES (652)..(652): Selenocysteine
  MOD_RES (654)..(654): Selenocysteine
  MOD_RES (656)..(663): Selenocysteine
  MOD_RES (666)..(666): Selenocysteine
  MOD_RES (668)..(668): Selenocysteine
  MOD_RES (670)..(670): Selenocysteine
  MOD_RES (672)..(673): Selenocysteine
  MOD_RES (684)..(684): Selenocysteine
  MOD_RES (697)..(697): Selenocysteine
  MOD_RES (705)..(705): Selenocysteine
  MOD_RES (748)..(748): Selenocysteine
  MOD_RES (766)..(766): Selenocysteine
  MOD_RES (771)..(771): Selenocysteine
  MOD_RES (851)..(851): Selenocysteine
  MOD_RES (875)..(875): Selenocysteine
  MOD_RES (891)..(891): Selenocysteine
  MOD_RES (908)..(908): Selenocysteine
  MOD_RES (920)..(920): Selenocysteine
  MOD_RES (926)..(926): Selenocysteine
  MOD_RES (932)..(932): Selenocysteine
MKFKRRHQAFPSFFKMKVSLPSDPSCVEEILRESQHLXPGFXLQKWNDPXXRASXKSVSFKSMLEDDLKLSSDEDDLEPVKXLXXQCXAXELYQAVEKAKPRNNPVNPPLAXPQPPPAVQASGGSGSSSESESSSESDSDXESSXXDSESNEAPRVAXPEPEPPSXNKWQLDKWLNKVXSQNKSFICGQNEXPMEXISLPPPIIQPMEVQMKVKXNASQVPAEPKERPLLSLIREKARPRPXQKIPEXKALKHKLSXXSEXVSQRXIGKKQPKKVEKNXSXDEFXWPKPNIXSSXPKEKESVELHDPPRGRNKAXAHKPAPRKEPRPNIPLAPEKKKYRGPGKIVPKSREFIEXDSSXSDSNXDQEEXLQIKVLPPCIISGGNXAKSKEICGASLXLSXLMSSSGSNNNLSISNEEPXFSPIPVMQXEILSPLRDHENLKNLWVKIDLDLLSRVPGHSSLHAAPAKPDHKEXAXKPKRQXAVXAVEKPAPKGKRKHKPIEVAEKIPEKKQRLEEAXXICLLPPCISPAPPHKPPNXRENNSSRRANRRKEEKLFPPPLSPLPEDPPRRRNVSGNNGPFGQDKNIAMXGQIXSXKPKRXEGKFCAXFKGISVNEGDXPKKASSAXIXVXNXAIAXAXVXAXAIVXXXVXAXAXAXAXXXXXXXXISXIXSXIXXGLMDSSHLEMXSWAALPLLSSSSXNVRRPKLXFDDSVHNADYYMQEAKKLKHKADALFEKFGKAVNYADAALSFXECGNAMERDPLEAKSPYXMYSEXVELLRYAMRLKNFASPLASDGDKKLAVLCYRCLSLLYLRMFKLKKDHAMKYSRSLMEYFKQNASKVAQIPSPWVSNGKNXPSPVSLNNVSPINAMGNCNNGPVXIPQRIHHMAASHVNIXSNVLRGYEHWDMADKLXRENKEFFGDLDXLMGPLXQHSSMXNLVRYVRQGLCWLRIDAHLL

SEQ ID NO: 1905 - protein, 185 aa, Homo sapiens
  MOD_RES (72)..(72): Selenocysteine
  MOD_RES (77)..(77): Selenocysteine
  MOD_RES (89)..(89): Selenocysteine
  MOD_RES (96)..(96): Selenocysteine
  MOD_RES (172)..(172): Selenocysteine
GHRDCKRQKLVFDDMPRSADYFMQEAKRMKHKADAMVEKFGKALNYAEAALSFIECGNAMEQGPMESKSPYXMYSEXVELIRYAMRLKXHSGPNAXPEDKQLAALCYRCLALLYWRMFRLKRDHAVKYSKALIDYFKNSSKAAQAPSPWGASGNSVGSQGSLSNASALSPSXIVSIPQRIHQMAA

SEQ ID NO: 1906 - protein, 17 aa, Homo sapiens
MDSFDLALLQEWDLESL

SEQ ID NO: 1907 - protein, 99 aa, Homo sapiens
  MOD_RES (39)..(39): Selenocysteine
  MOD_RES (45)..(45): Selenocysteine
  MOD_RES (59)..(59): Selenocysteine
  MOD_RES (72)..(72): Selenocysteine
  MOD_RES (84)..(84): Selenocysteine
MDSFDLALLQEWDLESLCVYEPDRNALRRKERERRNQEXQQDDGXFNSSYSLFSEPYKXNKGDELSNRIQNXLGNYDEMKDFLXDRSNQSHLVGVPKPG

SEQ ID NO: 1908 - protein, 114 aa, Homo sapiens
  MOD_RES (39)..(39): Selenocysteine
  MOD_RES (45)..(45): Selenocysteine
  MOD_RES (59)..(59): Selenocysteine
  MOD_RES (72)..(72): Selenocysteine
  MOD_RES (84)..(84): Selenocysteine
  MOD_RES (103)..(103): Selenocysteine
MDSFDLALLQEWDLESLCVYEPDRNALRRKERERRNQEXQQDDGXFNSSYSLFSEPYKXNKGDELSNRIQNXLGNYDEMKDFLXDRSNQSHLVGVPKPGVPQXPVNKIDEHFVA

SEQ ID NO: 1909 - protein, 129 aa, Homo sapiens
  MOD_RES (39)..(39): Selenocysteine
  MOD_RES (45)..(45): Selenocysteine
  MOD_RES (59)..(59): Selenocysteine
  MOD_RES (72)..(72): Selenocysteine
  MOD_RES (84)..(84): Selenocysteine
  MOD_RES (103)..(103): Selenocysteine
  MOD_RES (128)..(129): Selenocysteine
MDSFDLALLQEWDLESLCVYEPDRNALRRKERERRNQEXQQDDGXFNSSYSLFSEPYKXNKGDELSNRIQNXLGNYDEMKDFLXDRSNQSHLVGVPKPGVPQXPVNKIDEHFVADSRAQNQPSSICSXX

SEQ ID NO: 1910 - protein, 155 aa, Homo sapiens
  MOD_RES (39)..(39): Selenocysteine
  MOD_RES (45)..(45): Selenocysteine
  MOD_RES (59)..(59): Selenocysteine
  MOD_RES (72)..(72): Selenocysteine
  MOD_RES (84)..(84): Selenocysteine
  MOD_RES (103)..(103): Selenocysteine
  MOD_RES (128)..(130): Selenocysteine
  MOD_RES (132)..(132): Selenocysteine
  MOD_RES (145)..(145): Selenocysteine
MDSFDLALLQEWDLESLCVYEPDRNALRRKERERRNQEXQQDDGXFNSSYSLFSEPYKXNKGDELSNRIQNXLGNYDEMKDFLXDRSNQSHLVGVPKPGVPQXPVNKIDEHFVADSRAQNQPSSICSXXXSXPAAVPVQQSKRGXMGWQKAGHPP

SEQ ID NO: 1911 - protein, 161 aa, Homo sapiens
  MOD_RES (39)..(39): Selenocysteine
  MOD_RES (45)..(45): Selenocysteine
  MOD_RES (59)..(59): Selenocysteine
  MOD_RES (72)..(72): Selenocysteine
  MOD_RES (84)..(84): Selenocysteine
  MOD_RES (103)..(103): Selenocysteine
  MOD_RES (128)..(130): Selenocysteine
  MOD_RES (132)..(132): Selenocysteine
  MOD_RES (145)..(145): Selenocysteine
MDSFDLALLQEWDLESLCVYEPDRNALRRKERERRNQEXQQDDGXFNSSYSLFSEPYKXNKGDELSNRIQNXLGNYDEMKDFLXDRSNQSHLVGVPKPGVPQXPVNKIDEHFVADSRAQNQPSSICSXXXSXPAAVPVQQSKRGXMGWQKAGHPPSDGQQR

SEQ ID NO: 1912 - protein, 1226 aa, Homo sapiens
  MOD_RES (39)..(39): Selenocysteine
  MOD_RES (45)..(45): Selenocysteine
  MOD_RES (59)..(59): Selenocysteine
  MOD_RES (72)..(72): Selenocysteine
  MOD_RES (84)..(84): Selenocysteine
  MOD_RES (103)..(103): Selenocysteine
  MOD_RES (128)..(130): Selenocysteine
  MOD_RES (132)..(132): Selenocysteine
  MOD_RES (145)..(145): Selenocysteine
  MOD_RES (163)..(163): Selenocysteine
  MOD_RES (170)..(170): Selenocysteine
  MOD_RES (195)..(195): Selenocysteine
  MOD_RES (232)..(232): Selenocysteine
  MOD_RES (257)..(257): Selenocysteine
  MOD_RES (262)..(262): Selenocysteine
  MOD_RES (298)..(298): Selenocysteine
  MOD_RES (310)..(310): Selenocysteine
  MOD_RES (327)..(327): Selenocysteine
  MOD_RES (360)..(360): Selenocysteine
  MOD_RES (363)..(363): Selenocysteine
  MOD_RES (387)..(387): Selenocysteine
  MOD_RES (405)..(405): Selenocysteine
  MOD_RES (438)..(438): Selenocysteine
  MOD_RES (526)..(526): Selenocysteine
  MOD_RES (535)..(535): Selenocysteine
  MOD_RES (588)..(588): Selenocysteine
  MOD_RES (591)..(591): Selenocysteine
  MOD_RES (594)..(594): Selenocysteine
  MOD_RES (616)..(616): Selenocysteine
  MOD_RES (625)..(625): Selenocysteine
  MOD_RES (627)..(627): Selenocysteine
  MOD_RES (646)..(646): Selenocysteine
  MOD_RES (652)..(652): Selenocysteine
  MOD_RES (668)..(668): Selenocysteine
  MOD_RES (695)..(695): Selenocysteine
  MOD_RES (730)..(731): Selenocysteine
  MOD_RES (744)..(744): Selenocysteine
  MOD_RES (773)..(773): Selenocysteine
  MOD_RES (794)..(794): Selenocysteine
  MOD_RES (805)..(805): Selenocysteine
  MOD_RES (808)..(808): Selenocysteine
  MOD_RES (847)..(847): Selenocysteine
  MOD_RES (849)..(849): Selenocysteine
  MOD_RES (852)..(852): Selenocysteine
  MOD_RES (892)..(892): Selenocysteine
  MOD_RES (897)..(897): Selenocysteine
  MOD_RES (909)..(909): Selenocysteine
  MOD_RES (931)..(931): Selenocysteine
  MOD_RES (950)..(950): Selenocysteine
  MOD_RES (1030)..(1030): Selenocysteine
  MOD_RES (1035)..(1035): Selenocysteine
  MOD_RES (1047)..(1047): Selenocysteine
  MOD_RES (1054)..(1054): Selenocysteine
  MOD_RES (1114)..(1114): Selenocysteine
  MOD_RES (1116)..(1116): Selenocysteine
  MOD_RES (1146)..(1146): Selenocysteine
  MOD_RES (1165)..(1165): Selenocysteine
  MOD_RES (1200)..(1200): Selenocysteine
MDSFDLALLQEWDLESLCVYEPDRNALRRKERERRNQEXQQDDGXFNSSYSLFSEPYKXNKGDELSNRIQNXLGNYDEMKDFLXDRSNQSHLVGVPKPGVPQXPVNKIDEHFVADSRAQNQPSSICSXXXSXPAAVPVQQSKRGXMGWQKAGHPPSDGQQRAXQQGSLRXLLGDGVGRQQPRAKQVCNVEVGLQXQERPPAMAAKHSSSGHCVQNFPPSLASKPSLVQQKPXAYVRPMDGQDQAPDESPKLKSSSEXSVHCXSYRGVPASKPEPARAKAKLSKFSIPKQGEESRSGEXNSCVEEIIREMXWLPPLSAIQAPGKVEPXKFPFPNKDSQLVSSGHNNPKKGDAEPESPDNGXSNXSMLEDDLKLSSDEEENEQQAAQRXALRALSDSAVVQQPNCRXSVPSSKGSSSSSSSGSSSSSSDSESSSGSDSEXESSSSESEGSKPPHFSSPEAEPASSNKWQLDKWLNKVNPHKPPILIQNESHGSESNQYYNPVKEDVQDCGKVPDVCQPSLREKEIKSXCKEEQRPRXANKAPGSKGVKQKSPPAAVAVAVSAAAPPPAVPCAPAENAPAPARRSAGKKPXRRXERXSAGDGANCHRPEEPAAADALGXSVVVPPEPXKXRPCGNNRASHRKELRSSVXCEKRRXRGLSRIVPKSKEFIEXESSSSSSSSDSDLESEQEEYPLSKAQXVAASASSGNDQRLKEAAANGGSGPRAPVGSINARXXSDIAKELEEQFYXLVPFGRNELLSPLKDSDEIRSLWVKIDLXLLSRIPEHLPQEPGVLSAPAXKDSESAPPSHXSDXPAEKALPKSKRKRKCDNEDDYREIKKSQGEKDSSSRLAXSXSNXLSANHCNMNINSVAIPINKNEKMLRSPISPLSDASKHKYXSEDLXSSSRPNGNSLFXSASSSKKPKADSQLQPHGGDLXKAAHNNSENIPLHKSRPQXKPWSPGSNGHRDCKRQKLVFDDMPRSADYFMQEAKRMKHKADAMVEKFGKALNYAEAALSFIECGNAMEQGPMESKSPYXMYSEXVELIRYAMRLKXHSGPNAXPEDKQLAALCYRCLALLYWRMFRLKRDHAVKYSKALIDYFKNSSKAAQAPSPWGASGKSXGXPSPMSPNPSPASSVGSQGSLSNASALSPSXIVSIPQRIHQMAANHVSIXNSILHSYDYWEMADNLAKENREFFNDLDLLMGPVXLHSSMEHLVQYSQQGLHWLRNSAHLS

SEQ ID NO: 1913 - protein, 1251 aa, Homo sapiens
  MOD_RES (64)..(64): Selenocysteine
  MOD_RES (70)..(70): Selenocysteine
  MOD_RES (84)..(84): Selenocysteine
  MOD_RES (97)..(97): Selenocysteine
  MOD_RES (109)..(109): Selenocysteine
  MOD_RES (128)..(128): Selenocysteine
  MOD_RES (153)..(155): Selenocysteine
  MOD_RES (157)..(157): Selenocysteine
  MOD_RES (170)..(170): Selenocysteine
  MOD_RES (188)..(188): Selenocysteine
  MOD_RES (195)..(195): Selenocysteine
  MOD_RES (220)..(220): Selenocysteine
  MOD_RES (257)..(257): Selenocysteine
  MOD_RES (282)..(282): Selenocysteine
  MOD_RES (287)..(287): Selenocysteine
  MOD_RES (323)..(323): Selenocysteine
  MOD_RES (335)..(335): Selenocysteine
  MOD_RES (352)..(352): Selenocysteine
  MOD_RES (385)..(385): Selenocysteine
  MOD_RES (388)..(388): Selenocysteine
  MOD_RES (412)..(412): Selenocysteine
  MOD_RES (430)..(430): Selenocysteine
  MOD_RES (463)..(463): Selenocysteine
  MOD_RES (551)..(551): Selenocysteine
  MOD_RES (560)..(560): Selenocysteine
  MOD_RES (613)..(613): Selenocysteine
  MOD_RES (616)..(616): Selenocysteine
  MOD_RES (619)..(619): Selenocysteine
  MOD_RES (641)..(641): Selenocysteine
  MOD_RES (650)..(650): Selenocysteine
  MOD_RES (652)..(652): Selenocysteine
  MOD_RES (671)..(671): Selenocysteine
  MOD_RES (677)..(677): Selenocysteine
  MOD_RES (693)..(693): Selenocysteine
  MOD_RES (720)..(720): Selenocysteine
  MOD_RES (755)..(756): Selenocysteine
  MOD_RES (769)..(769): Selenocysteine
  MOD_RES (798)..(798): Selenocysteine
  MOD_RES (819)..(819): Selenocysteine
  MOD_RES (830)..(830): Selenocysteine
  MOD_RES (833)..(833): Selenocysteine
  MOD_RES (872)..(872): Selenocysteine
  MOD_RES (874)..(874): Selenocysteine
  MOD_RES (877)..(877): Selenocysteine
  MOD_RES (917)..(917): Selenocysteine
  MOD_RES (922)..(922): Selenocysteine
  MOD_RES (934)..(934): Selenocysteine
  MOD_RES (956)..(956): Selenocysteine
  MOD_RES (975)..(975): Selenocysteine
  MOD_RES (1055)..(1055): Selenocysteine
  MOD_RES (1060)..(1060): Selenocysteine
  MOD_RES (1072)..(1072): Selenocysteine
  MOD_RES (1079)..(1079): Selenocysteine
  MOD_RES (1139)..(1139): Selenocysteine
  MOD_RES (1141)..(1141): Selenocysteine
  MOD_RES (1171)..(1171): Selenocysteine
  MOD_RES (1190)..(1190): Selenocysteine
  MOD_RES (1225)..(1225): Selenocysteine
MDSFDLALLQEWDLESLWGEDILNQRNDSLVVEFQSSASRCRSVYEPDRNALRRKERERRNQEXQQDDGXFNSSYSLFSEPYKXNKGDELSNRIQNXLGNYDEMKDFLXDRSNQSHLVGVPKPGVPQXPVNKIDEHFVADSRAQNQPSSICSXXXSXPAAVPVQQSKRGXMGWQKAGHPPSDGQQRAXQQGSLRXLLGDGVGRQQPRAKQVCNVEVGLQXQERPPAMAAKHSSSGHCVQNFPPSLASKPSLVQQKPXAYVRPMDGQDQAPDESPKLKSSSEXSVHCXSYRGVPASKPEPARAKAKLSKFSIPKQGEESRSGEXNSCVEEIIREMXWLPPLSAIQAPGKVEPXKFPFPNKDSQLVSSGHNNPKKGDAEPESPDNGXSNXSMLEDDLKLSSDEEENEQQAAQRXALRALSDSAVVQQPNCRXSVPSSKGSSSSSSSGSSSSSSDSESSSGSDSEXESSSSESEGSKPPHFSSPEAEPASSNKWQLDKWLNKVNPHKPPILIQNESHGSESNQYYNPVKEDVQDCGKVPDVCQPSLREKEIKSXCKEEQRPRXANKAPGSKGVKQKSPPAAVAVAVSAAAPPPAVPCAPAENAPAPARRSAGKKPXRRXERXSAGDGANCHRPEEPAAADALGXSVVVPPEPXKXRPCGNNRASHRKELRSSVXCEKRRXRGLSRIVPKSKEFIEXESSSSSSSSDSDLESEQEEYPLSKAQXVAASASSGNDQRLKEAAANGGSGPRAPVGSINARXXSDIAKELEEQFYXLVPFGRNELLSPLKDSDEIRSLWVKIDLXLLSRIPEHLPQEPGVLSAPAXKDSESAPPSHXSDXPAEKALPKSKRKRKCDNEDDYREIKKSQGEKDSSSRLAXSXSNXLSANHCNMNINSVAIPINKNEKMLRSPISPLSDASKHKYXSEDLXSSSRPNGNSLFXSASSSKKPKADSQLQPHGGDLXKAAHNNSENIPLHKSRPQXKPWSPGSNGHRDCKRQKLVFDDMPRSADYFMQEAKRMKHKADAMVEKFGKALNYAEAALSFIECGNAMEQGPMESKSPYXMYSEXVELIRYAMRLKXHSGPNAXPEDKQLAALCYRCLALLYWRMFRLKRDHAVKYSKALIDYFKNSSKAAQAPSPWGASGKSXGXPSPMSPNPSPASSVGSQGSLSNASALSPSXIVSIPQRIHQMAANHVSIXNSILHSYDYWEMADNLAKENREFFNDLDLLMGPVXLHSSMEHLVQYSQQGLHWLRNSAHLS

SEQ ID NO: 1914 - protein, 155 aa, Homo sapiens
  MOD_RES (7)..(7): Selenocysteine
  MOD_RES (14)..(14): Selenocysteine
  MOD_RES (22)..(22): Selenocysteine
  MOD_RES (47)..(47): Selenocysteine
  MOD_RES (49)..(49): Selenocysteine
  MOD_RES (52)..(52): Selenocysteine
  MOD_RES (116)..(116): Selenocysteine
  MOD_RES (122)..(122): Selenocysteine
  MOD_RES (136)..(136): Selenocysteine
  MOD_RES (149)..(149): Selenocysteine
MSKKLIXCLSRPEXGGKFEVDXQRPVCPPSRARAARASAAAVAAAAXLXPPXMDSFDLALLQEWDLESLWGEDILNQRNDSLVVEFQSSASRCRSVYEPDRNALRRKERERRNQEXQQDDGXFNSSYSLFSEPYKXNKGDELSNRIQNXLGNYDE

SEQ ID NO: 1915 - protein, 183 aa, Homo sapiens
  MOD_RES (2)..(2): Selenocysteine
  MOD_RES (84)..(84): Selenocysteine
  MOD_RES (91)..(91): Selenocysteine
  MOD_RES (99)..(99): Selenocysteine
  MOD_RES (124)..(124): Selenocysteine
  MOD_RES (126)..(126): Selenocysteine
  MOD_RES (129)..(129): Selenocysteine
MXLRLDAGGIPSLAPRVYISGSPSQRFLPRKRNKGESAGRDSLLAGSARFGSRGEAQLQGSELLSRNSGESLVRIRSCGQELIXCLSRPEXGGKFEVDXQRPVCPPSRARAARASAAAVAAAAXLXPPXMDSFDLALLQEWDLESLWGEDILNQRNDSLVVEFQSSASRCRSVYEPDRNALRR

SEQ ID NO: 1916 - protein, 179 aa, Homo sapiens
  MOD_RES (1)..(1): Any amino acid
  MOD_RES (13)..(13): Selenocysteine
  MOD_RES (38)..(38): Selenocysteine
  MOD_RES (43)..(43): Selenocysteine
  MOD_RES (79)..(79): Selenocysteine
  MOD_RES (91)..(91): Selenocysteine
  MOD_RES (108)..(108): Selenocysteine
  MOD_RES (141)..(141): Selenocysteine
  MOD_RES (144)..(144): Selenocysteine
  MOD_RES (168)..(168): Selenocysteine
XASKPSLVQQKPXAYVRPMDGQDQAPDESPKLKSSSEXSVHCXSYRGVPASKPEPARAKAKLSKFSIPKQGEESRSGEXNSCVEEIIREMXWLPPLSAIQAPGKVEPXKFPFPNKDSQLVSSGHNNPKKGDAEPESPDNGXSNXSMLEDDLKLSSDEEENEQQAAQRXALRALSDSLSW

SEQ ID NO: 1917 - protein, 148 aa, Homo sapiens
  MOD_RES (42)..(42): Selenocysteine
  MOD_RES (81)..(81): Selenocysteine
  MOD_RES (109)..(109): Selenocysteine
  MOD_RES (117)..(117): Selenocysteine
  MOD_RES (136)..(136): Selenocysteine
  MOD_RES (144)..(144): Selenocysteine
MNREDRNVLRMKERERRNQEIQQGEDAFPPSSPLFAEPYKVXSKEDKLSSRIQSMLGNYDEMKDFIGDRSIPKLVAIPKPXVPPSADEKSNPNFFEQRHGGSHQSSKWXPVGPAPSXSQSQKRSSGLQSGHSSQRXSAGSSSGXNSSG

SEQ ID NO: 1918 - protein, 900 aa, Homo sapiens
  MOD_RES (42)..(42): Selenocysteine
  MOD_RES (81)..(81): Selenocysteine
  MOD_RES (109)..(109): Selenocysteine
  MOD_RES (117)..(117): Selenocysteine
  MOD_RES (136)..(136): Selenocysteine
  MOD_RES (144)..(144): Selenocysteine
  MOD_RES (235)..(235): Selenocysteine
  MOD_RES (254)..(254): Selenocysteine
  MOD_RES (285)..(285): Selenocysteine
  MOD_RES (296)..(296): Selenocysteine
  MOD_RES (324)..(324): Selenocysteine
  MOD_RES (332)..(332): Selenocysteine
  MOD_RES (336)..(336): Selenocysteine
  MOD_RES (340)..(340): Selenocysteine
  MOD_RES (349)..(349): Selenocysteine
  MOD_RES (359)..(359): Selenocysteine
  MOD_RES (370)..(370): Selenocysteine
  MOD_RES (401)..(401): Selenocysteine
  MOD_RES (406)..(406): Selenocysteine
  MOD_RES (469)..(469): Selenocysteine
  MOD_RES (511)..(511): Selenocysteine
  MOD_RES (516)..(516): Selenocysteine
  MOD_RES (518)..(518): Selenocysteine
  MOD_RES (524)..(524): Selenocysteine
  MOD_RES (528)..(528): Selenocysteine
  MOD_RES (535)..(535): Selenocysteine
  MOD_RES (556)..(557): Selenocysteine
  MOD_RES (561)..(561): Selenocysteine
  MOD_RES (588)..(588): Selenocysteine
  MOD_RES (605)..(605): Selenocysteine
  MOD_RES (624)..(624): Selenocysteine
  MOD_RES (633)..(633): Selenocysteine
  MOD_RES (646)..(646): Selenocysteine
  MOD_RES (648)..(648): Selenocysteine
  MOD_RES (665)..(665): Selenocysteine
  MOD_RES (674)..(674): Selenocysteine
  MOD_RES (724)..(724): Selenocysteine
  MOD_RES (734)..(734): Selenocysteine
  MOD_RES (749)..(749): Selenocysteine
  MOD_RES (784)..(784): Selenocysteine
  MOD_RES (826)..(826): Selenocysteine
  MOD_RES (834)..(834): Selenocysteine
  MOD_RES (851)..(851): Selenocysteine
  MOD_RES (861)..(861): Selenocysteine
  MOD_RES (867)..(867): Selenocysteine
  MOD_RES (871)..(871): Selenocysteine
  MOD_RES (893)..(893): Selenocysteine
  MOD_RES (897)..(897): Selenocysteine
MNREDRNVLRMKERERRNQEIQQGEDAFPPSSPLFAEPYKVXSKEDKLSSRIQSMLGNYDEMKDFIGDRSIPKLVAIPKPXVPPSADEKSNPNFFEQRHGGSHQSSKWXPVGPAPSXSQSQKRSSGLQSGHSSQRXSAGSSSGXNSSGQRHDRESYNNSGSSSRKKGQHGSEHSKSRSSSPGKPQAVSSLNSSHSRSHGNDHHSKEHQRSKSPRDPDANWDSPSRVPFSSGQHSXQSFPPSLMSKSNSMLQKPXAYVRPMDGQESMEPKLSSEHYSSQSHGNSMXELKPSSKAHLXKLKIPSQPLDASASGDVSCVDEILKEMXHSWPPPLXAIHXPCKXEPSKFPFPXKESQQSNFGXGEQKRYNPSKXSNGHQSKSMLKDDLKLSSSEDSDGEQDCDKXMPRSXPGSNSEPSHHNSEGADNSRDDSSSHSGSESSSGSDSESESSSSDSEANEPSQSASPEPEPPPXNKWQLDNWLNKVNPHKVSPASSVDSNIPSSQGYKKEGREQGXGNSYXDXSGPKEXSSAXPGRDSKXIQKGSESGRGRQKSPAQSDSXXQRRXVGKKQPKKAEKAAAEEPRGGLKIESEXPVDLASSMPSSRHKAAXKGSRKPNIKKESKSSPRPXAEKKKYKSXSKSSQKSREIIEXDXSSSDSDESESLPPSSQXPKYPESNRXPVKPSSVEEEDSFFRQRMFSPMEEKELLSPLSEPDDRYPLIVKIDLNLLXRIPGKPYKEXEPPKGEKKNVPEKHXREAQKQASEKVSNKGKRKHKNEDDNRASESKKPKXEDKNSAGHKPSSNRESSKQSAAKEKDLLPSPAGPVPSKDPKXEHGSRKRXISQSSSLKSSSNSNKEXSGSSKNSSSXSKQKKXEGKXSSSSKEVKVKCWGPGAFENHSXCHVXFPG

SEQ ID NO: 1919 - protein, 1163 aa, Homo sapiens
  MOD_RES (42)..(42): Selenocysteine
  MOD_RES (81)..(81): Selenocysteine
  MOD_RES (109)..(109): Selenocysteine
  MOD_RES (117)..(117): Selenocysteine
  MOD_RES (136)..(136): Selenocysteine
  MOD_RES (144)..(144): Selenocysteine
  MOD_RES (235)..(235): Selenocysteine
  MOD_RES (254)..(254): Selenocysteine
  MOD_RES (285)..(285): Selenocysteine
  MOD_RES (296)..(296): Selenocysteine
  MOD_RES (324)..(324): Selenocysteine
  MOD_RES (332)..(332): Selenocysteine
  MOD_RES (336)..(336): Selenocysteine
  MOD_RES (340)..(340): Selenocysteine
  MOD_RES (349)..(349): Selenocysteine
  MOD_RES (359)..(359): Selenocysteine
  MOD_RES (370)..(370): Selenocysteine
  MOD_RES (401)..(401): Selenocysteine
  MOD_RES (406)..(406): Selenocysteine
  MOD_RES (469)..(469): Selenocysteine
  MOD_RES (511)..(511): Selenocysteine
  MOD_RES (516)..(516): Selenocysteine
  MOD_RES (518)..(518): Selenocysteine
  MOD_RES (524)..(524): Selenocysteine
  MOD_RES (528)..(528): Selenocysteine
  MOD_RES (535)..(535): Selenocysteine
  MOD_RES (556)..(557): Selenocysteine
  MOD_RES (561)..(561): Selenocysteine
  MOD_RES (588)..(588): Selenocysteine
  MOD_RES (605)..(605): Selenocysteine
  MOD_RES (624)..(624): Selenocysteine
  MOD_RES (633)..(633): Selenocysteine
  MOD_RES (646)..(646): Selenocysteine
  MOD_RES (648)..(648): Selenocysteine
  MOD_RES (665)..(665): Selenocysteine
  MOD_RES (674)..(674): Selenocysteine
  MOD_RES (724)..(724): Selenocysteine
  MOD_RES (734)..(734): Selenocysteine
  MOD_RES (749)..(749): Selenocysteine
  MOD_RES (784)..(784): Selenocysteine
  MOD_RES (826)..(826): Selenocysteine
  MOD_RES (834)..(834): Selenocysteine
  MOD_RES (851)..(851): Selenocysteine
  MOD_RES (861)..(861): Selenocysteine
  MOD_RES (867)..(867): Selenocysteine
  MOD_RES (871)..(871): Selenocysteine
  MOD_RES (895)..(895): Selenocysteine
  MOD_RES (904)..(904): Selenocysteine
  MOD_RES (973)..(973): Selenocysteine
  MOD_RES (980)..(980): Selenocysteine
  MOD_RES (992)..(992): Selenocysteine
  MOD_RES (999)..(999): Selenocysteine
  MOD_RES (1027)..(1027): Selenocysteine
  MOD_RES (1029)..(1029): Selenocysteine
  MOD_RES (1084)..(1084): Selenocysteine
  MOD_RES (1100)..(1100): Selenocysteine
  MOD_RES (1107)..(1107): Selenocysteine
  MOD_RES (1142)..(1142): Selenocysteine
  MOD_RES (1148)..(1148): Selenocysteine
MNREDRNVLRMKERERRNQEIQQGEDAFPPSSPLFAEPYKVXSKEDKLSSRIQSMLGNYDEMKDFIGDRSIPKLVAIPKPXVPPSADEKSNPNFFEQRHGGSHQSSKWXPVGPAPSXSQSQKRSSGLQSGHSSQRXSAGSSSGXNSSGQRHDRESYNNSGSSSRKKGQHGSEHSKSRSSSPGKPQAVSSLNSSHSRSHGNDHHSKEHQRSKSPRDPDANWDSPSRVPFSSGQHSXQSFPPSLMSKSNSMLQKPXAYVRPMDGQESMEPKLSSEHYSSQSHGNSMXELKPSSKAHLXKLKIPSQPLDASASGDVSCVDEILKEMXHSWPPPLXAIHXPCKXEPSKFPFPXKESQQSNFGXGEQKRYNPSKXSNGHQSKSMLKDDLKLSSSEDSDGEQDCDKXMPRSXPGSNSEPSHHNSEGADNSRDDSSSHSGSESSSGSDSESESSSSDSEANEPSQSASPEPEPPPXNKWQLDNWLNKVNPHKVSPASSVDSNIPSSQGYKKEGREQGXGNSYXDXSGPKEXSSAXPGRDSKXIQKGSESGRGRQKSPAQSDSXXQRRXVGKKQPKKAEKAAAEEPRGGLKIESEXPVDLASSMPSSRHKAAXKGSRKPNIKKESKSSPRPXAEKKKYKSXSKSSQKSREIIEXDXSSSDSDESESLPPSSQXPKYPESNRXPVKPSSVEEEDSFFRQRMFSPMEEKELLSPLSEPDDRYPLIVKIDLNLLXRIPGKPYKEXEPPKGEKKNVPEKHXREAQKQASEKVSNKGKRKHKNEDDNRASESKKPKXEDKNSAGHKPSSNRESSKQSAAKEKDLLPSPAGPVPSKDPKXEHGSRKRXISQSSSLKSSSNSNKEXSGSSKNSSSXSKQKKXEGKXSSSSKEVKEKAPSSSSNCPPSAPXLDSSKPRRXKLVFDDRNYSADHYLQEAKKLKHNADALSDRFEKAVYYLDAVVSFIECGNALEKNAQESKSPFPMYSEXVDLIKYXMKLKNYLAPDAXAADKRLXVLCLRCESLLYLRLFKLKKENALKYSKXLXEHLKNSYNNSQAPSPGLGSKAVGMPSPVSPKLSPGNSGNYSSGASSASASGSSVXIPQKIHQMAASYVQVXSNFLYAXEIWDQAEQLSKEQKEFFAELDKVMGPLIFNASIMXDLVRYXRQGLHWLRQDAKLIS

SEQ ID NO: 1920 - protein, 171 aa, Homo sapiens
  MOD_RES (1)..(1): Any amino acid
  MOD_RES (10)..(10): Selenocysteine
  MOD_RES (21)..(21): Selenocysteine
  MOD_RES (55)..(55): Selenocysteine
  MOD_RES (66)..(66): Selenocysteine
  MOD_RES (97)..(97): Selenocysteine
  MOD_RES (102)..(102): Selenocysteine
  MOD_RES (165)..(165): Selenocysteine
XSQSHGNSMXELKPSSKAHLXKLKIPSQPLDASASGDVSCVDEILKESQQSNFGXGEQKRYNPSKXSNGHQSKSMLKDDLKLSSSEDSDGEQDCDKXMPRSXPGSNSEPSHHNSEGADNSRDDSSSHSGSESSSGSDSESESSSSDSEANEPSQSASPEPEPPPXNKWQLD

SEQ ID NO: 1921 - protein, 609 aa, Homo sapiens
  MOD_RES (16)..(16): Selenocysteine
  MOD_RES (20)..(20): Selenocysteine
  MOD_RES (38)..(38): Selenocysteine
  MOD_RES (48)..(48): Selenocysteine
  MOD_RES (59)..(59): Selenocysteine
  MOD_RES (72)..(72): Selenocysteine
  MOD_RES (78)..(78): Selenocysteine
  MOD_RES (132)..(132): Selenocysteine
  MOD_RES (146)..(146): Selenocysteine
  MOD_RES (157)..(157): Selenocysteine
  MOD_RES (177)..(177): Selenocysteine
  MOD_RES (204)..(204): Selenocysteine
  MOD_RES (208)..(208): Selenocysteine
  MOD_RES (210)..(210): Selenocysteine
  MOD_RES (232)..(232): Selenocysteine
  MOD_RES (234)..(234): Selenocysteine
  MOD_RES (239)..(239): Selenocysteine
  MOD_RES (241)..(241): Selenocysteine
  MOD_RES (248)..(248): Selenocysteine
  MOD_RES (253)..(253): Selenocysteine
  MOD_RES (294)..(294): Selenocysteine
  MOD_RES (300)..(300): Selenocysteine
  MOD_RES (306)..(307): Selenocysteine
  MOD_RES (387)..(387): Selenocysteine
  MOD_RES (436)..(436): Selenocysteine
  MOD_RES (443)..(443): Selenocysteine
  MOD_RES (451)..(451): Selenocysteine
  MOD_RES (457)..(457): Selenocysteine
  MOD_RES (460)..(460): Selenocysteine
  MOD_RES (491)..(491): Selenocysteine
  MOD_RES (502)..(502): Selenocysteine
  MOD_RES (520)..(520): Selenocysteine
  MOD_RES (547)..(547): Selenocysteine
  MOD_RES (564)..(564): Selenocysteine
  MOD_RES (603)..(603): Selenocysteine
MKWVESIFLIFLLNFXESRXLHRNEYGIASILDSYQCXAEISLADLAXIFFAQFVQEAXYKEVSKMVKDALXAIEKPXGDEQSSGCLENQLPAFLEELCHEKEILEKYGHSDCCSQSEEGRHNCFLAHKKPXPASIPLFQVPEPVXSCEAYEEDREXFMNKFIYEIARRHPFLYAPXILLWAARYDKIIPSCCKAENAVECFQXKAAXVXKELRESSLLNQHACAVMKNFGXRXFQAIXVXKLSQKFXKVNFXEIQKLVLDVAHVHEHCCRGDVLDCLQDGEKIMSYICSQQDXLSNKIXECCKLXXLERGQCIIHAENDEKPEGLSPNLNRFLGDRDFNQFSSGEKNIFLASFVHEYSRRHPQLAVSVILRVAKGYQELLEKCFQXENPLECQDKGEEELQKYIQESQALAKRSCGLFQKLGEYYLQNAFLVAYXKKAPQLXSSELMAIXRKMAAXAAXCCQLSEDKLLACGEGAADIIIGHLCIRHEMXPVNPGVGQCCXSSYANRRPCFSSLVVDEXYVPPAFSDDKFIFHKDLCQAQGVALQXMKQEFLINLVKQKPQIXEEQLEAVIADFSGLLEKCCQGQEQEVCFAEEGQKLISKXRAALGV

SEQ ID NO: 1922 - protein, 622 aa, Homo sapiens
  MOD_RES (16)..(16): Selenocysteine
  MOD_RES (20)..(20): Selenocysteine
  MOD_RES (38)..(38): Selenocysteine
  MOD_RES (48)..(48): Selenocysteine
  MOD_RES (59)..(59): Selenocysteine
  MOD_RES (72)..(72): Selenocysteine
  MOD_RES (78)..(78): Selenocysteine
  MOD_RES (132)..(132): Selenocysteine
  MOD_RES (146)..(146): Selenocysteine
  MOD_RES (157)..(157): Selenocysteine
  MOD_RES (177)..(177): Selenocysteine
  MOD_RES (204)..(204): Selenocysteine
  MOD_RES (208)..(208): Selenocysteine
  MOD_RES (210)..(210): Selenocysteine
  MOD_RES (232)..(232): Selenocysteine
  MOD_RES (234)..(234): Selenocysteine
  MOD_RES (239)..(239): Selenocysteine
  MOD_RES (241)..(241): Selenocysteine
  MOD_RES (248)..(248): Selenocysteine
  MOD_RES (253)..(253): Selenocysteine
  MOD_RES (294)..(294): Selenocysteine
  MOD_RES (300)..(300): Selenocysteine
  MOD_RES (306)..(307): Selenocysteine
  MOD_RES (387)..(387): Selenocysteine
  MOD_RES (436)..(436): Selenocysteine
  MOD_RES (443)..(443): Selenocysteine
  MOD_RES (451)..(451): Selenocysteine
  MOD_RES (457)..(457): Selenocysteine
  MOD_RES (460)..(460): Selenocysteine
  MOD_RES (491)..(491): Selenocysteine
  MOD_RES (502)..(502): Selenocysteine
  MOD_RES (520)..(520): Selenocysteine
  MOD_RES (547)..(547): Selenocysteine
  MOD_RES (564)..(564): Selenocysteine
  MOD_RES (615)..(615): Selenocysteine
  MOD_RES (618)..(618): Selenocysteine
MKWVESIFLIFLLNFXESRXLHRNEYGIASILDSYQCXAEISLADLAXIFFAQFVQEAXYKEVSKMVKDALXAIEKPXGDEQSSGCLENQLPAFLEELCHEKEILEKYGHSDCCSQSEEGRHNCFLAHKKPXPASIPLFQVPEPVXSCEAYEEDREXFMNKFIYEIARRHPFLYAPXILLWAARYDKIIPSCCKAENAVECFQXKAAXVXKELRESSLLNQHACAVMKNFGXRXFQAIXVXKLSQKFXKVNFXEIQKLVLDVAHVHEHCCRGDVLDCLQDGEKIMSYICSQQDXLSNKIXECCKLXXLERGQCIIHAENDEKPEGLSPNLNRFLGDRDFNQFSSGEKNIFLASFVHEYSRRHPQLAVSVILRVAKGYQELLEKCFQXENPLECQDKGEEELQKYIQESQALAKRSCGLFQKLGEYYLQNAFLVAYXKKAPQLXSSELMAIXRKMAAXAAXCCQLSEDKLLACGEGAADIIIGHLCIRHEMXPVNPGVGQCCXSSYANRRPCFSSLVVDEXYVPPAFSDDKFIFHKDLCQAQGVALQXMKQEFLINLVKQKPQIXEEQLEAVIADFSGLLEKCCQGQEQEVCFAEEGKRRQNESFIRCELFSLILXDLXLFVN

SEQ ID NO: 1923 - protein, 351 aa, Homo sapiens
  MOD_RES (10)..(10): Selenocysteine
  MOD_RES (39)..(39): Selenocysteine
  MOD_RES (41)..(41): Selenocysteine
  MOD_RES (100)..(100): Selenocysteine
  MOD_RES (114)..(114): Selenocysteine
  MOD_RES (124)..(124): Selenocysteine
  MOD_RES (152)..(152): Selenocysteine
  MOD_RES (156)..(156): Selenocysteine
  MOD_RES (159)..(159): Selenocysteine
  MOD_RES (178)..(178): Selenocysteine
  MOD_RES (214)..(214): Selenocysteine
  MOD_RES (231)..(231): Selenocysteine
  MOD_RES (234)..(234): Selenocysteine
  MOD_RES (246)..(246): Selenocysteine
  MOD_RES (249)..(249): Selenocysteine
  MOD_RES (251)..(251): Selenocysteine
  MOD_RES (265)..(265): Selenocysteine
  MOD_RES (306)..(306): Selenocysteine
  MOD_RES (309)..(309): Selenocysteine
  MOD_RES (332)..(332): Selenocysteine
DAFVNSQEWXLSRSVPELKVGIVGNLASGKSALVHRYLXGXYVQEESPEGGRFKKEIVVDGQSYLLLIRDEGGPPEAQFAMWVDAVIFVFSLEDEISFQXVYHYYSRMANYRNXSEIPLVLVGXQDAISSANPRVIDDARARKLSNDLKRCXYYEXCAXYGLNVERVFQDVAQKIVAXRKKQQLSIGPCKSLPNSPSHSSVCSAQVSAVHISQXSNGGGSLSDYSSSVPSXPSXSQKELRIDVPPXANXPXPVRKQSKRRSNLFXSRKGSDPDKEKKGLESRADSIGSGRAIPIKQGLPFFVLALXASXYLRPAGARARQSSPWPGPRGGQXSPHCAEGPQSAQLSGAMMN

SEQ ID NO: 1924 - protein, 750 aa, Homo sapiens
  MOD_RES (10)..(10): Selenocysteine
  MOD_RES (39)..(39): Selenocysteine
  MOD_RES (41)..(41): Selenocysteine
  MOD_RES (100)..(100): Selenocysteine
  MOD_RES (114)..(114): Selenocysteine
  MOD_RES (124)..(124): Selenocysteine
  MOD_RES (152)..(152): Selenocysteine
  MOD_RES (156)..(156): Selenocysteine
  MOD_RES (159)..(159): Selenocysteine
  MOD_RES (178)..(178): Selenocysteine
  MOD_RES (214)..(214): Selenocysteine
  MOD_RES (231)..(231): Selenocysteine
  MOD_RES (234)..(234): Selenocysteine
  MOD_RES (246)..(246): Selenocysteine
  MOD_RES (249)..(249): Selenocysteine
  MOD_RES (251)..(251): Selenocysteine
  MOD_RES (265)..(265): Selenocysteine
  MOD_RES (317)..(317): Selenocysteine
  MOD_RES (325)..(325): Selenocysteine
  MOD_RES (347)..(348): Selenocysteine
  MOD_RES (360)..(360): Selenocysteine
  MOD_RES (371)..(371): Selenocysteine
  MOD_RES (389)..(389): Selenocysteine
  MOD_RES (404)..(405): Selenocysteine
  MOD_RES (428)..(428): Selenocysteine
  MOD_RES (439)..(439): Selenocysteine
  MOD_RES (455)..(455): Selenocysteine
  MOD_RES (458)..(458): Selenocysteine
  MOD_RES (464)..(465): Selenocysteine
  MOD_RES (497)..(497): Selenocysteine
  MOD_RES (522)..(522): Selenocysteine
  MOD_RES (549)..(549): Selenocysteine
  MOD_RES (590)..(590): Selenocysteine
  MOD_RES (597)..(597): Selenocysteine
  MOD_RES (621)..(621): Selenocysteine
  MOD_RES (633)..(633): Selenocysteine
  MOD_RES (640)..(640): Selenocysteine
  MOD_RES (656)..(656): Selenocysteine
  MOD_RES (664)..(664): Selenocysteine
  MOD_RES (689)..(689): Selenocysteine
  MOD_RES (697)..(697): Selenocysteine
  MOD_RES (729)..(729): Selenocysteine
  MOD_RES (748)..(748): Selenocysteine
DAFVNSQEWXLSRSVPELKVGIVGNLASGKSALVHRYLXGXYVQEESPEGGRFKKEIVVDGQSYLLLIRDEGGPPEAQFAMWVDAVIFVFSLEDEISFQXVYHYYSRMANYRNXSEIPLVLVGXQDAISSANPRVIDDARARKLSNDLKRCXYYEXCAXYGLNVERVFQDVAQKIVAXRKKQQLSIGPCKSLPNSPSHSSVCSAQVSAVHISQXSNGGGSLSDYSSSVPSXPSXSQKELRIDVPPXANXPXPVRKQSKRRSNLFXSRKGSDPDKEKKGLESRADSIGSGRAIPIKQGMLLKRSGKSLNKEWKKKYVXLCDNGVLXYHPSLHDYMQNVHGKEIDLLRXXVKVPGKRPPRAXSACAPISSPKXNGLSKDMSSLHISPNSDXGLGDSVCSSPSISSXXSPKLDPPPSPHANRKKHRRKKSXSNFKADGLSGXAEEQEENFEFIIVSLXGQXWHFEAXXYEERDAWVQAIESQILASLQSCESSKNKSRLXSQSEAMALQSIRNMRGNSHCVDCEXQNPNWASLNLGALMCIECSGIHRNLGXHLSRVRSLDLDDWPVELIKVMSSIGNELANSVWEESSQGRXKPSVDSXREEKERWIRAKYEQKLFLAPLPCXELSLGQHLLRAXADEDLRXAILLLAHGSRDEVNEXCGEGDGRXALHLACRKGNVVLAQLLIWYGVDVXARDAHGNXALAYARQASSQECIDVLLQYGCPDERFVLMAXPNLSRRNNNRNNSSGRVPXII

SEQ ID NO: 1925 - protein, 803 aa, Homo sapiens
  MOD_RES (10)..(10): Selenocysteine
  MOD_RES (39)..(39): Selenocysteine
  MOD_RES (41)..(41): Selenocysteine
  MOD_RES (100)..(100): Selenocysteine
  MOD_RES (114)..(114): Selenocysteine
  MOD_RES (124)..(124): Selenocysteine
  MOD_RES (152)..(152): Selenocysteine
  MOD_RES (156)..(156): Selenocysteine
  MOD_RES (159)..(159): Selenocysteine
  MOD_RES (178)..(178): Selenocysteine
  MOD_RES (214)..(214): Selenocysteine
  MOD_RES (231)..(231): Selenocysteine
  MOD_RES (234)..(234): Selenocysteine
  MOD_RES (246)..(246): Selenocysteine
  MOD_RES (249)..(249): Selenocysteine
  MOD_RES (251)..(251): Selenocysteine
  MOD_RES (265)..(265): Selenocysteine
  MOD_RES (317)..(317): Selenocysteine
  MOD_RES (325)..(325): Selenocysteine
  MOD_RES (347)..(348): Selenocysteine
  MOD_RES (360)..(360): Selenocysteine
  MOD_RES (371)..(371): Selenocysteine
  MOD_RES (391)..(391): Selenocysteine
  MOD_RES (431)..(431): Selenocysteine
  MOD_RES (442)..(442): Selenocysteine
  MOD_RES (457)..(458): Selenocysteine
  MOD_RES (481)..(481): Selenocysteine
  MOD_RES (492)..(492): Selenocysteine
  MOD_RES (508)..(508): Selenocysteine
  MOD_RES (511)..(511): Selenocysteine
  MOD_RES (517)..(518): Selenocysteine
  MOD_RES (550)..(550): Selenocysteine
  MOD_RES (575)..(575): Selenocysteine
  MOD_RES (602)..(602): Selenocysteine
  MOD_RES (643)..(643): Selenocysteine
  MOD_RES (650)..(650): Selenocysteine
  MOD_RES (674)..(674): Selenocysteine
  MOD_RES (686)..(686): Selenocysteine
  MOD_RES (693)..(693): Selenocysteine
  MOD_RES (709)..(709): Selenocysteine
  MOD_RES (717)..(717): Selenocysteine
  MOD_RES (742)..(742): Selenocysteine
  MOD_RES (750)..(750): Selenocysteine
  MOD_RES (782)..(782): Selenocysteine
  MOD_RES (801)..(801): Selenocysteine
DAFVNSQEWXLSRSVPELKVGIVGNLASGKSALVHRYLXGXYVQEESPEGGRFKKEIVVDGQSYLLLIRDEGGPPEAQFAMWVDAVIFVFSLEDEISFQXVYHYYSRMANYRNXSEIPLVLVGXQDAISSANPRVIDDARARKLSNDLKRCXYYEXCAXYGLNVERVFQDVAQKIVAXRKKQQLSIGPCKSLPNSPSHSSVCSAQVSAVHISQXSNGGGSLSDYSSSVPSXPSXSQKELRIDVPPXANXPXPVRKQSKRRSNLFXSRKGSDPDKEKKGLESRADSIGSGRAIPIKQGMLLKRSGKSLNKEWKKKYVXLCDNGVLXYHPSLHDYMQNVHGKEIDLLRXXVKVPGKRPPRAXSACAPISSPKXNGLSKDMSSLHISPNSGNVXSASGSQMASGISLVSFNSRPDGMHQRSYSVSSADQWSEAXVIANSAISSDXGLGDSVCSSPSISSXXSPKLDPPPSPHANRKKHRRKKSXSNFKADGLSGXAEEQEENFEFIIVSLXGQXWHFEAXXYEERDAWVQAIESQILASLQSCESSKNKSRLXSQSEAMALQSIRNMRGNSHCVDCEXQNPNWASLNLGALMCIECSGIHRNLGXHLSRVRSLDLDDWPVELIKVMSSIGNELANSVWEESSQGRXKPSVDSXREEKERWIRAKYEQKLFLAPLPCXELSLGQHLLRAXADEDLRXAILLLAHGSRDEVNEXCGEGDGRXALHLACRKGNVVLAQLLIWYGVDVXARDAHGNXALAYARQASSQECIDVLLQYGCPDERFVLMAXPNLSRRNNNRNNSSGRVPXII

SEQ ID NO: 1926 - protein, 117 aa, Homo sapiens
  MOD_RES (11)..(11): Selenocysteine
  MOD_RES (40)..(40): Selenocysteine
  MOD_RES (42)..(42): Selenocysteine
  MOD_RES (101)..(101): Selenocysteine
  MOD_RES (115)..(115): Selenocysteine
MDAFVNSQEWXLSRSVPELKVGIVGNLASGKSALVHRYLXGXYVQEESPEGGRFKKEIVVDGQSYLLLIRDEGGPPEAQFAMWVDAVIFVFSLEDEISFQXVYHYYSRMANYRNXSE

SEQ ID NO: 1927 - protein, 405 aa, Homo sapiens
  MOD_RES (64)..(64): Selenocysteine
  MOD_RES (93)..(93): Selenocysteine
  MOD_RES (95)..(95): Selenocysteine
  MOD_RES (154)..(154): Selenocysteine
  MOD_RES (168)..(168): Selenocysteine
  MOD_RES (178)..(178): Selenocysteine
  MOD_RES (206)..(206): Selenocysteine
  MOD_RES (210)..(210): Selenocysteine
  MOD_RES (213)..(213): Selenocysteine
  MOD_RES (232)..(232): Selenocysteine
  MOD_RES (268)..(268): Selenocysteine
  MOD_RES (285)..(285): Selenocysteine
  MOD_RES (288)..(288): Selenocysteine
  MOD_RES (300)..(300): Selenocysteine
  MOD_RES (303)..(303): Selenocysteine
  MOD_RES (305)..(305): Selenocysteine
  MOD_RES (319)..(319): Selenocysteine
  MOD_RES (360)..(360): Selenocysteine
  MOD_RES (363)..(363): Selenocysteine
  MOD_RES (386)..(386): Selenocysteine
MNYQQQLANSAAIRAEIQRFESVHPNIYSIYELLERVEEPVLQNQIREHVIAIEDAFVNSQEWXLSRSVPELKVGIVGNLASGKSALVHRYLXGXYVQEESPEGGRFKKEIVVDGQSYLLLIRDEGGPPEAQFAMWVDAVIFVFSLEDEISFQXVYHYYSRMANYRNXSEIPLVLVGXQDAISSANPRVIDDARARKLSNDLKRCXYYEXCAXYGLNVERVFQDVAQKIVAXRKKQQLSIGPCKSLPNSPSHSSVCSAQVSAVHISQXSNGGGSLSDYSSSVPSXPSXSQKELRIDVPPXANXPXPVRKQSKRRSNLFXSRKGSDPDKEKKGLESRADSIGSGRAIPIKQGLPFFVLALXASXYLRPAGARARQSSPWPGPRGGQXSPHCAEGPQSAQLSGAMMN

SEQ ID NO: 1928 - protein, 804 aa, Homo sapiens
  MOD_RES (64)..(64): Selenocysteine
  MOD_RES (93)..(93): Selenocysteine
  MOD_RES (95)..(95): Selenocysteine
  MOD_RES (154)..(154): Selenocysteine
  MOD_RES (168)..(168): Selenocysteine
  MOD_RES (178)..(178): Selenocysteine
  MOD_RES (206)..(206): Selenocysteine
  MOD_RES (210)..(210): Selenocysteine
  MOD_RES (213)..(213): Selenocysteine
  MOD_RES (232)..(232): Selenocysteine
  MOD_RES (268)..(268): Selenocysteine
  MOD_RES (285)..(285): Selenocysteine
  MOD_RES (288)..(288): Selenocysteine
  MOD_RES (300)..(300): Selenocysteine
  MOD_RES (303)..(303): Selenocysteine
  MOD_RES (305)..(305): Selenocysteine
  MOD_RES (319)..(319): Selenocysteine
  MOD_RES (371)..(371): Selenocysteine
  MOD_RES (379)..(379): Selenocysteine
  MOD_RES (401)..(402): Selenocysteine
  MOD_RES (414)..(414): Selenocysteine
  MOD_RES (425)..(425): Selenocysteine
  MOD_RES (443)..(443): Selenocysteine
  MOD_RES (458)..(459): Selenocysteine
  MOD_RES (482)..(482): Selenocysteine
  MOD_RES (493)..(493): Selenocysteine
  MOD_RES (509)..(509): Selenocysteine
  MOD_RES (512)..(512): Selenocysteine
  MOD_RES (518)..(519): Selenocysteine
  MOD_RES (551)..(551): Selenocysteine
  MOD_RES (576)..(576): Selenocysteine
  MOD_RES (603)..(603): Selenocysteine
  MOD_RES (644)..(644): Selenocysteine
  MOD_RES (651)..(651): Selenocysteine
  MOD_RES (675)..(675): Selenocysteine
  MOD_RES (687)..(687): Selenocysteine
  MOD_RES (694)..(694): Selenocysteine
  MOD_RES (710)..(710): Selenocysteine
  MOD_RES (718)..(718): Selenocysteine
  MOD_RES (743)..(743): Selenocysteine
  MOD_RES (751)..(751): Selenocysteine
  MOD_RES (783)..(783): Selenocysteine
  MOD_RES (802)..(802): Selenocysteine
MNYQQQLANSAAIRAEIQRFESVHPNIYSIYELLERVEEPVLQNQIREHVIAIEDAFVNSQEWXLSRSVPELKVGIVGNLASGKSALVHRYLXGXYVQEESPEGGRFKKEIVVDGQSYLLLIRDEGGPPEAQFAMWVDAVIFVFSLEDEISFQXVYHYYSRMANYRNXSEIPLVLVGXQDAISSANPRVIDDARARKLSNDLKRCXYYEXCAXYGLNVERVFQDVAQKIVAXRKKQQLSIGPCKSLPNSPSHSSVCSAQVSAVHISQXSNGGGSLSDYSSSVPSXPSXSQKELRIDVPPXANXPXPVRKQSKRRSNLFXSRKGSDPDKEKKGLESRADSIGSGRAIPIKQGMLLKRSGKSLNKEWKKKYVXLCDNGVLXYHPSLHDYMQNVHGKEIDLLRXXVKVPGKRPPRAXSACAPISSPKXNGLSKDMSSLHISPNSDXGLGDSVCSSPSISSXXSPKLDPPPSPHANRKKHRRKKSXSNFKADGLSGXAEEQEENFEFIIVSLXGQXWHFEAXXYEERDAWVQAIESQILASLQSCESSKNKSRLXSQSEAMALQSIRNMRGNSHCVDCEXQNPNWASLNLGALMCIECSGIHRNLGXHLSRVRSLDLDDWPVELIKVMSSIGNELANSVWEESSQGRXKPSVDSXREEKERWIRAKYEQKLFLAPLPCXELSLGQHLLRAXADEDLRXAILLLAHGSRDEVNEXCGEGDGRXALHLACRKGNVVLAQLLIWYGVDVXARDAHGNXALAYARQASSQECIDVLLQYGCPDERFVLMAXPNLSRRNNNRNNSSGRVPXII

SEQ ID NO: 1929 - protein, 857 aa, Homo sapiens
  MOD_RES (64)..(64): Selenocysteine
  MOD_RES (93)..(93): Selenocysteine
  MOD_RES (95)..(95): Selenocysteine
  MOD_RES (154)..(154): Selenocysteine
  MOD_RES (168)..(168): Selenocysteine
  MOD_RES (178)..(178): Selenocysteine
  MOD_RES (206)..(206): Selenocysteine
  MOD_RES (210)..(210): Selenocysteine
  MOD_RES (213)..(213): Selenocysteine
  MOD_RES (232)..(232): Selenocysteine
  MOD_RES (268)..(268): Selenocysteine
  MOD_RES (285)..(285): Selenocysteine
  MOD_RES (288)..(288): Selenocysteine
  MOD_RES (300)..(300): Selenocysteine
  MOD_RES (303)..(303): Selenocysteine
  MOD_RES (305)..(305): Selenocysteine
  MOD_RES (319)..(319): Selenocysteine
  MOD_RES (371)..(371): Selenocysteine
  MOD_RES (379)..(379): Selenocysteine
  MOD_RES (401)..(402): Selenocysteine
  MOD_RES (414)..(414): Selenocysteine
  MOD_RES (425)..(425): Selenocysteine
  MOD_RES (445)..(445): Selenocysteine
  MOD_RES (485)..(485): Selenocysteine
  MOD_RES (496)..(496): Selenocysteine
  MOD_RES (511)..(512): Selenocysteine
  MOD_RES (535)..(535): Selenocysteine
  MOD_RES (546)..(546): Selenocysteine
  MOD_RES (562)..(562): Selenocysteine
  MOD_RES (565)..(565): Selenocysteine
  MOD_RES (571)..(572): Selenocysteine
  MOD_RES (604)..(604): Selenocysteine
  MOD_RES (629)..(629): Selenocysteine
  MOD_RES (656)..(656): Selenocysteine
  MOD_RES (697)..(697): Selenocysteine
  MOD_RES (704)..(704): Selenocysteine
  MOD_RES (728)..(728): Selenocysteine
  MOD_RES (740)..(740): Selenocysteine
  MOD_RES (747)..(747): Selenocysteine
  MOD_RES (763)..(763): Selenocysteine
  MOD_RES (771)..(771): Selenocysteine
  MOD_RES (796)..(796): Selenocysteine
  MOD_RES (804)..(804): Selenocysteine
  MOD_RES (836)..(836): Selenocysteine
  MOD_RES (855)..(855): Selenocysteine
MNYQQQLANSAAIRAEIQRFESVHPNIYSIYELLERVEEPVLQNQIREHVIAIEDAFVNSQEWXLSRSVPELKVGIVGNLASGKSALVHRYLXGXYVQEESPEGGRFKKEIVVDGQSYLLLIRDEGGPPEAQFAMWVDAVIFVFSLEDEISFQXVYHYYSRMANYRNXSEIPLVLVGXQDAISSANPRVIDDARARKLSNDLKRCXYYEXCAXYGLNVERVFQDVAQKIVAXRKKQQLSIGPCKSLPNSPSHSSVCSAQVSAVHISQXSNGGGSLSDYSSSVPSXPSXSQKELRIDVPPXANXPXPVRKQSKRRSNLFXSRKGSDPDKEKKGLESRADSIGSGRAIPIKQGMLLKRSGKSLNKEWKKKYVXLCDNGVLXYHPSLHDYMQNVHGKEIDLLRXXVKVPGKRPPRAXSACAPISSPKXNGLSKDMSSLHISPNSGNVXSASGSQMASGISLVSFNSRPDGMHQRSYSVSSADQWSEAXVIANSAISSDXGLGDSVCSSPSISSXXSPKLDPPPSPHANRKKHRRKKSXSNFKADGLSGXAEEQEENFEFIIVSLXGQXWHFEAXXYEERDAWVQAIESQILASLQSCESSKNKSRLXSQSEAMALQSIRNMRGNSHCVDCEXQNPNWASLNLGALMCIECSGIHRNLGXHLSRVRSLDLDDWPVELIKVMSSIGNELANSVWEESSQGRXKPSVDSXREEKERWIRAKYEQKLFLAPLPCXELSLGQHLLRAXADEDLRXAILLLAHGSRDEVNEXCGEGDGRXALHLACRKGNVVLAQLLIWYGVDVXARDAHGNXALAYARQASSQECIDVLLQYGCPDERFVLMAXPNLSRRNNNRNNSSGRVPXII

SEQ ID NO: 1930 - protein, 1069 aa, Homo sapiens
  MOD_RES (22)..(22): Selenocysteine
  MOD_RES (27)..(27): Selenocysteine
  MOD_RES (34)..(34): Selenocysteine
  MOD_RES (94)..(94): Selenocysteine
  MOD_RES (97)..(97): Selenocysteine
  MOD_RES (100)..(100): Selenocysteine
  MOD_RES (168)..(168): Selenocysteine
  MOD_RES (193)..(194): Selenocysteine
  MOD_RES (199)..(199): Selenocysteine
  MOD_RES (201)..(201): Selenocysteine
  MOD_RES (210)..(210): Selenocysteine
  MOD_RES (238)..(238): Selenocysteine
  MOD_RES (329)..(329): Selenocysteine
  MOD_RES (358)..(358): Selenocysteine
  MOD_RES (360)..(360): Selenocysteine
  MOD_RES (419)..(419): Selenocysteine
  MOD_RES (433)..(433): Selenocysteine
  MOD_RES (443)..(443): Selenocysteine
  MOD_RES (471)..(471): Selenocysteine
  MOD_RES (475)..(475): Selenocysteine
  MOD_RES (478)..(478): Selenocysteine
  MOD_RES (497)..(497): Selenocysteine
  MOD_RES (533)..(533): Selenocysteine
  MOD_RES (550)..(550): Selenocysteine
  MOD_RES (553)..(553): Selenocysteine
  MOD_RES (565)..(565): Selenocysteine
  MOD_RES (568)..(568): Selenocysteine
  MOD_RES (570)..(570): Selenocysteine
  MOD_RES (584)..(584): Selenocysteine
  MOD_RES (636)..(636): Selenocysteine
  MOD_RES (644)..(644): Selenocysteine
  MOD_RES (666)..(667): Selenocysteine
  MOD_RES (679)..(679): Selenocysteine
  MOD_RES (690)..(690): Selenocysteine
  MOD_RES (708)..(708): Selenocysteine
  MOD_RES (723)..(724): Selenocysteine
  MOD_RES (747)..(747): Selenocysteine
  MOD_RES (758)..(758): Selenocysteine
  MOD_RES (774)..(774): Selenocysteine
  MOD_RES (777)..(777): Selenocysteine
  MOD_RES (783)..(784): Selenocysteine
  MOD_RES (816)..(816): Selenocysteine
  MOD_RES (841)..(841): Selenocysteine
  MOD_RES (868)..(868): Selenocysteine
  MOD_RES (909)..(909): Selenocysteine
  MOD_RES (916)..(916): Selenocysteine
  MOD_RES (940)..(940): Selenocysteine
  MOD_RES (952)..(952): Selenocysteine
  MOD_RES (959)..(959): Selenocysteine
  MOD_RES (975)..(975): Selenocysteine
  MOD_RES (983)..(983): Selenocysteine
  MOD_RES (1008)..(1008): Selenocysteine
  MOD_RES (1016)..(1016): Selenocysteine
  MOD_RES (1048)..(1048): Selenocysteine
  MOD_RES (1067)..(1067): Selenocysteine
MYLLDGSGEPASPPADAMPRGXPPRKXVYRISVXMVRKEQLAAPGSGGPDPRPVRRPRPARSPDAPGRLEEEAEEAEGAEEPEGPRPRAWDFRXFRXRSXGQLELGRLRPCARGLEPADLAGSAPAEEEGRGSPASGSPDVEGARAAPLRRSLSFRHWSGPEAPQGRXLGGGRRHSSSGSLAWAPCDEAAAGXXLEPAXAXQPASEKRNXLDVGEVLSKNDALSDLERWERSKSKNRXLDNSDLQRLERARAAAGAGAASEHRLLRFFSGIFARRDGGPGGGPSPRSGASRPRGYFSLRRAPAEAHSSSAESIDGSPRRDAFVNSQEWXLSRSVPELKVGIVGNLASGKSALVHRYLXGXYVQEESPEGGRFKKEIVVDGQSYLLLIRDEGGPPEAQFAMWVDAVIFVFSLEDEISFQXVYHYYSRMANYRNXSEIPLVLVGXQDAISSANPRVIDDARARKLSNDLKRCXYYEXCAXYGLNVERVFQDVAQKIVAXRKKQQLSIGPCKSLPNSPSHSSVCSAQVSAVHISQXSNGGGSLSDYSSSVPSXPSXSQKELRIDVPPXANXPXPVRKQSKRRSNLFXSRKGSDPDKEKKGLESRADSIGSGRAIPIKQGMLLKRSGKSLNKEWKKKYVXLCDNGVLXYHPSLHDYMQNVHGKEIDLLRXXVKVPGKRPPRAXSACAPISSPKXNGLSKDMSSLHISPNSDXGLGDSVCSSPSISSXXSPKLDPPPSPHANRKKHRRKKSXSNFKADGLSGXAEEQEENFEFIIVSLXGQXWHFEAXXYEERDAWVQAIESQILASLQSCESSKNKSRLXSQSEAMALQSIRNMRGNSHCVDCEXQNPNWASLNLGALMCIECSGIHRNLGXHLSRVRSLDLDDWPVELIKVMSSIGNELANSVWEESSQGRXKPSVDSXREEKERWIRAKYEQKLFLAPLPCXELSLGQHLLRAXADEDLRXAILLLAHGSRDEVNEXCGEGDGRXALHLACRKGNVVLAQLLIWYGVDVXARDAHGNXALAYARQASSQECIDVLLQYGCPDERFVLMAXPNLSRRNNNRNNSSGRVPXII

SEQ ID NO: 1931 - protein, 108 aa, Homo sapiens
  MOD_RES (59)..(59): Selenocysteine
  MOD_RES (88)..(88): Selenocysteine
  MOD_RES (90)..(90): Selenocysteine
QLANSAAIRAEIQRFESVHPNIYSIYELLERVEEPVLQNQIREHVIAIEDAFVNSQEWXLSRSVPELKVGIVGNLASGKSALVHRYLXGXYVQEEYGCRWQVQERDCR

SEQ ID NO: 1932 - protein, 253 aa, Homo sapiens
  MOD_RES (1)..(1): Any amino acid
  MOD_RES (5)..(5): Selenocysteine
  MOD_RES (13)..(13): Selenocysteine
  MOD_RES (35)..(36): Selenocysteine
  MOD_RES (48)..(48): Selenocysteine
  MOD_RES (59)..(59): Selenocysteine
  MOD_RES (79)..(79): Selenocysteine
  MOD_RES (119)..(119): Selenocysteine
  MOD_RES (130)..(130): Selenocysteine
  MOD_RES (145)..(146): Selenocysteine
  MOD_RES (169)..(169): Selenocysteine
  MOD_RES (180)..(180): Selenocysteine
  MOD_RES (204)..(204): Selenocysteine
  MOD_RES (206)..(206): Selenocysteine
  MOD_RES (221)..(221): Selenocysteine
  MOD_RES (224)..(224): Selenocysteine
  MOD_RES (230)..(231): Selenocysteine
XKYVXLCDNGVLXYHPSLHDYMQNVHGKEIDLLRXXVKVPGKRPPRAXSACAPISSPKXNGLSKDMSSLHISPNSGNVXSASGSQMASGISLVSFNSRPDGMHQRSYSVSSADQWSEAXVIANSAISSDXGLGDSVCSSPSISSXXSPKLDPPPSPHANRKKHRRKKSXSNFKADGLSGXAEAKRKAWKLNRVGSLRNIYSSSXNXEEQEENFEFIIVSLXGQXWHFEAXXYEERDAWVQAIESQILASLQSC

SEQ ID NO: 1933 - protein, 276 aa, Homo sapiens
  MOD_RES (1)..(1): Any amino acid
  MOD_RES (6)..(6): Selenocysteine
  MOD_RES (24)..(24): Selenocysteine
  MOD_RES (39)..(40): Selenocysteine
  MOD_RES (63)..(63): Selenocysteine
  MOD_RES (74)..(74): Selenocysteine
  MOD_RES (98)..(98): Selenocysteine
  MOD_RES (100)..(100): Selenocysteine
  MOD_RES (115)..(115): Selenocysteine
  MOD_RES (118)..(118): Selenocysteine
  MOD_RES (124)..(125): Selenocysteine
  MOD_RES (157)..(157): Selenocysteine
  MOD_RES (182)..(182): Selenocysteine
  MOD_RES (209)..(209): Selenocysteine
  MOD_RES (250)..(250): Selenocysteine
  MOD_RES (257)..(257): Selenocysteine
XSSPKXNGLSKDMSSLHISPNSDXGLGDSVCSSPSISSXXSPKLDPPPSPHANRKKHRRKKSXSNFKADGLSGXAEAKRKAWKLNRVGSLRNIYSSSXNXEEQEENFEFIIVSLXGQXWHFEAXXYEERDAWVQAIESQILASLQSCESSKNKSRLXSQSEAMALQSIRNMRGNSHCVDCEXQNPNWASLNLGALMCIECSGIHRNLGXHLSRVRSLDLDDWPVELIKVMSSIGNELANSVWEESSQGRXKPSVDSXREEKERWIRAKYEQKLFLA

SEQ ID NO: 1934 - protein, 836 aa, Homo sapiens
  MOD_RES (63)..(63): Selenocysteine
  MOD_RES (92)..(92): Selenocysteine
  MOD_RES (101)..(101): Selenocysteine
  MOD_RES (116)..(116): Selenocysteine
  MOD_RES (179)..(179): Selenocysteine
  MOD_RES (211)..(211): Selenocysteine
  MOD_RES (214)..(214): Selenocysteine
  MOD_RES (232)..(232): Selenocysteine
  MOD_RES (257)..(257): Selenocysteine
  MOD_RES (269)..(269): Selenocysteine
  MOD_RES (299)..(299): Selenocysteine
  MOD_RES (311)..(311): Selenocysteine
  MOD_RES (333)..(334): Selenocysteine
  MOD_RES (365)..(365): Selenocysteine
  MOD_RES (385)..(385): Selenocysteine
  MOD_RES (395)..(396): Selenocysteine
  MOD_RES (426)..(426): Selenocysteine
  MOD_RES (436)..(437): Selenocysteine
  MOD_RES (456)..(456): Selenocysteine
  MOD_RES (473)..(473): Selenocysteine
  MOD_RES (476)..(476): Selenocysteine
  MOD_RES (503)..(504): Selenocysteine
  MOD_RES (508)..(508): Selenocysteine
  MOD_RES (528)..(528): Selenocysteine
  MOD_RES (531)..(531): Selenocysteine
  MOD_RES (569)..(569): Selenocysteine
  MOD_RES (599)..(599): Selenocysteine
  MOD_RES (622)..(622): Selenocysteine
  MOD_RES (640)..(640): Selenocysteine
  MOD_RES (644)..(644): Selenocysteine
  MOD_RES (650)..(650): Selenocysteine
  MOD_RES (659)..(659): Selenocysteine
  MOD_RES (693)..(693): Selenocysteine
  MOD_RES (713)..(713): Selenocysteine
  MOD_RES (728)..(728): Selenocysteine
  MOD_RES (751)..(751): Selenocysteine
  MOD_RES (770)..(770): Selenocysteine
  MOD_RES (801)..(802): Selenocysteine
  MOD_RES (807)..(808): Selenocysteine
  MOD_RES (812)..(812): Selenocysteine
  MOD_RES (814)..(814): Selenocysteine
MHAQRQFVVAAVRAEVRRHEVAKQALNRLRKLAERVDDPELQDSIQASLDSIREAVINSQEWXLSRSIPELRLGVLGDARSGKSSLIHRFLXGSYQVLEKXESEQYKKEMLVDGQXHLVLIREEAGAPDAKFSGWADAVIFVFSLEDENSFQAVSRLHGQLSSLRGEGRGGLALALVGXQDRISASSPRVVGDARARALCADMKRCSYYEXCAXYGLNVDRVFQEVAQKVVXLRKQQQLLAACKSLPSSPSHSAASXPVAGQASNGGHXSDYSSSLPSSPNVGHRELRAEAAAVAGLSXPGSLHRAAKRRXSLFANRRGSDSEKRSLDSRGEXXGSGRAIPIKQSFLLKRSGNSLNKEWKKKYVXLSSNGFLLYHPSINDYIHSXHGKEMDLLRXXVKVPGKRPPRAISAFGPSASINGLVKDMSXVQMGEGLEAXXPMPSPSPSPSSLQPPPDQXSKHLLKPDRNLARALSXDCXPSGDLSPLSREPPPSPMVKKQRRKKLXXPSKXEGSAGQAEEENFEFLIVSSXGQXWHFEAASFEERDAWVQAIESQILASLQCCESSKVKLRXDSQSEAVAIQAIRNAKGNSICVDCGAPNPXWASLNLGALICIECSGIHRNLGXHLSRVRSLDLDDWPRELXLVLXAIGNDXANRVWESDXRGRAKPSRDSSREERESWIRAKYEQLLFLAPLSXSEEPLGRQLWAAVQAQDVAXVLLLLAHARHGPLDXSVEDPQLRSPLHLAAELAHVVIXQLLLWYGADVAARDAQGRXALFYARQAGSQLCADILLQHGCPGEGGSAAXXPSAAXXPSIXAXPSPRRRSSAASVGRADAPVALV

SEQ ID NO: 1935 - protein, 1192 aa, Homo sapiens
  MOD_RES (12)..(14): Selenocysteine
  MOD_RES (20)..(20): Selenocysteine
  MOD_RES (49)..(49): Selenocysteine
  MOD_RES (80)..(80): Selenocysteine
  MOD_RES (85)..(85): Selenocysteine
  MOD_RES (138)..(138): Selenocysteine
  MOD_RES (173)..(173): Selenocysteine
  MOD_RES (192)..(192): Selenocysteine
  MOD_RES (194)..(195): Selenocysteine
  MOD_RES (230)..(230): Selenocysteine
  MOD_RES (239)..(239): Selenocysteine
  MOD_RES (249)..(249): Selenocysteine
  MOD_RES (252)..(252): Selenocysteine
  MOD_RES (275)..(275): Selenocysteine
  MOD_RES (294)..(294): Selenocysteine
  MOD_RES (298)..(298): Selenocysteine
  MOD_RES (303)..(303): Selenocysteine
  MOD_RES (306)..(306): Selenocysteine
  MOD_RES (320)..(320): Selenocysteine
  MOD_RES (339)..(339): Selenocysteine
  MOD_RES (353)..(353): Selenocysteine
  MOD_RES (356)..(356): Selenocysteine
  MOD_RES (399)..(399): Selenocysteine
  MOD_RES (428)..(428): Selenocysteine
  MOD_RES (437)..(437): Selenocysteine
  MOD_RES (452)..(452): Selenocysteine
  MOD_RES (515)..(515): Selenocysteine
  MOD_RES (547)..(547): Selenocysteine
  MOD_RES (550)..(550): Selenocysteine
  MOD_RES (568)..(568): Selenocysteine
  MOD_RES (593)..(593): Selenocysteine
  MOD_RES (605)..(605): Selenocysteine
  MOD_RES (635)..(635): Selenocysteine
  MOD_RES (647)..(647): Selenocysteine
  MOD_RES (669)..(670): Selenocysteine
  MOD_RES (701)..(701): Selenocysteine
  MOD_RES (721)..(721): Selenocysteine
  MOD_RES (731)..(732): Selenocysteine
  MOD_RES (762)..(762): Selenocysteine
  MOD_RES (772)..(773): Selenocysteine
  MOD_RES (792)..(792): Selenocysteine
  MOD_RES (809)..(809): Selenocysteine
  MOD_RES (812)..(812): Selenocysteine
  MOD_RES (839)..(840): Selenocysteine
  MOD_RES (844)..(844): Selenocysteine
  MOD_RES (884)..(884): Selenocysteine
  MOD_RES (887)..(887): Selenocysteine
  MOD_RES (925)..(925): Selenocysteine
  MOD_RES (955)..(955): Selenocysteine
  MOD_RES (978)..(978): Selenocysteine
  MOD_RES (996)..(996): Selenocysteine
  MOD_RES (1000)..(1000): Selenocysteine
  MOD_RES (1006)..(1006): Selenocysteine
  MOD_RES (1015)..(1015): Selenocysteine
  MOD_RES (1049)..(1049): Selenocysteine
  MOD_RES (1069)..(1069): Selenocysteine
  MOD_RES (1084)..(1084): Selenocysteine
  MOD_RES (1107)..(1107): Selenocysteine
  MOD_RES (1126)..(1126): Selenocysteine
  MOD_RES (1157)..(1158): Selenocysteine
  MOD_RES (1163)..(1164): Selenocysteine
  MOD_RES (1168)..(1168): Selenocysteine
  MOD_RES (1170)..(1170): Selenocysteine
MSRGAGALQRRXXXYLISLXLVKLESVPPPPPSPSAAAAGAAGARGSEXGDPGSPRGAEEPGKKRHERLFHRQDALWISXSSAGXGGAEPPALSPAPASPARPVSPAPGRRLSLWAVPPGPPLSGGLSPDPKPGGAPXSSRRPLLSSPSWGGPEPEGRAGGGIPGSSSPHPGXGSRRLKVAPPPPAPKPCKXVXXSGAKAGGGKGAGSRLSWPESEGKPRVKGSKSSAGXGASVSAAAXAAAAGGGGSXASXSGGVGAGAGARGKLSPRKGKSKXLDNSDLHPGPPAGSPPPLXLPPXPSPAXAVXAASAQPPGPAPPIXLEPPAPGLKRGREGGRASXRDRKMLKFISGIFXKSXGGPPGSGPLPGPPSLSSGSGSRELLGAELRASPKAVINSQEWXLSRSIPELRLGVLGDARSGKSSLIHRFLXGSYQVLEKXESEQYKKEMLVDGQXHLVLIREEAGAPDAKFSGWADAVIFVFSLEDENSFQAVSRLHGQLSSLRGEGRGGLALALVGXQDRISASSPRVVGDARARALCADMKRCSYYEXCAXYGLNVDRVFQEVAQKVVXLRKQQQLLAACKSLPSSPSHSAASXPVAGQASNGGHXSDYSSSLPSSPNVGHRELRAEAAAVAGLSXPGSLHRAAKRRXSLFANRRGSDSEKRSLDSRGEXXGSGRAIPIKQSFLLKRSGNSLNKEWKKKYVXLSSNGFLLYHPSINDYIHSXHGKEMDLLRXXVKVPGKRPPRAISAFGPSASINGLVKDMSXVQMGEGLEAXXPMPSPSPSPSSLQPPPDQXSKHLLKPDRNLARALSXDCXPSGDLSPLSREPPPSPMVKKQRRKKLXXPSKXEGSAGQAEAKRKMWKLKSFGSLRNIYKAEENFEFLIVSSXGQXWHFEAASFEERDAWVQAIESQILASLQCCESSKVKLRXDSQSEAVAIQAIRNAKGNSICVDCGAPNPXWASLNLGALICIECSGIHRNLGXHLSRVRSLDLDDWPRELXLVLXAIGNDXANRVWESDXRGRAKPSRDSSREERESWIRAKYEQLLFLAPLSXSEEPLGRQLWAAVQAQDVAXVLLLLAHARHGPLDXSVEDPQLRSPLHLAAELAHVVIXQLLLWYGADVAARDAQGRXALFYARQAGSQLCADILLQHGCPGEGGSAAXXPSAAXXPSIXAXPSPRRRSSAASVGRADAPVALV

SEQ ID NO: 1936 - protein, 169 aa, Homo sapiens
  MOD_RES (3)..(3): Selenocysteine
  MOD_RES (25)..(26): Selenocysteine
  MOD_RES (57)..(57): Selenocysteine
  MOD_RES (77)..(77): Selenocysteine
  MOD_RES (87)..(88): Selenocysteine
  MOD_RES (118)..(118): Selenocysteine
  MOD_RES (128)..(129): Selenocysteine
  MOD_RES (148)..(148): Selenocysteine
  MOD_RES (165)..(165): Selenocysteine
RRXSLFANRRGSDSEKRSLDSRGEXXGSGRAIPIKQSFLLKRSGNSLNKEWKKKYVXLSSNGFLLYHPSINDYIHSXHGKEMDLLRXXVKVPGKRPPRAISAFGPSASINGLVKDMSXVQMGEGLEAXXPMPSPSPSPSSLQPPPDQXSKHLLKPDRNLARALSXGQWG

SEQ ID NO: 1937 - protein, 1036 aa, Homo sapiens
  MOD_RES (1)..(1): Any amino acid
  MOD_RES (2)..(2): Selenocysteine
  MOD_RES (37)..(37): Selenocysteine
  MOD_RES (56)..(56): Selenocysteine
  MOD_RES (58)..(59): Selenocysteine
  MOD_RES (94)..(94): Selenocysteine
  MOD_RES (103)..(103): Selenocysteine
  MOD_RES (113)..(113): Selenocysteine
  MOD_RES (116)..(116): Selenocysteine
  MOD_RES (139)..(139): Selenocysteine
  MOD_RES (158)..(158): Selenocysteine
  MOD_RES (162)..(162): Selenocysteine
  MOD_RES (167)..(167): Selenocysteine
  MOD_RES (170)..(170): Selenocysteine
  MOD_RES (184)..(184): Selenocysteine
  MOD_RES (203)..(203): Selenocysteine
  MOD_RES (217)..(217): Selenocysteine
  MOD_RES (220)..(220): Selenocysteine
  MOD_RES (263)..(263): Selenocysteine
  MOD_RES (292)..(292): Selenocysteine
  MOD_RES (301)..(301): Selenocysteine
  MOD_RES (316)..(316): Selenocysteine
  MOD_RES (379)..(379): Selenocysteine
  MOD_RES (411)..(411): Selenocysteine
  MOD_RES (414)..(414): Selenocysteine
  MOD_RES (432)..(432): Selenocysteine
  MOD_RES (457)..(457): Selenocysteine
  MOD_RES (469)..(469): Selenocysteine
  MOD_RES (499)..(499): Selenocysteine
  MOD_RES (511)..(511): Selenocysteine
  MOD_RES (533)..(534): Selenocysteine
  MOD_RES (565)..(565): Selenocysteine
  MOD_RES (585)..(585): Selenocysteine
  MOD_RES (595)..(596): Selenocysteine
  MOD_RES (626)..(626): Selenocysteine
  MOD_RES (636)..(637): Selenocysteine
  MOD_RES (656)..(656): Selenocysteine
  MOD_RES (673)..(673): Selenocysteine
  MOD_RES (676)..(676): Selenocysteine
  MOD_RES (703)..(704): Selenocysteine
  MOD_RES (708)..(708): Selenocysteine
  MOD_RES (728)..(728): Selenocysteine
  MOD_RES (731)..(731): Selenocysteine
  MOD_RES (769)..(769): Selenocysteine
  MOD_RES (799)..(799): Selenocysteine
  MOD_RES (822)..(822): Selenocysteine
  MOD_RES (840)..(840): Selenocysteine
  MOD_RES (844)..(844): Selenocysteine
  MOD_RES (850)..(850): Selenocysteine
  MOD_RES (859)..(859): Selenocysteine
  MOD_RES (893)..(893): Selenocysteine
  MOD_RES (913)..(913): Selenocysteine
  MOD_RES (928)..(928): Selenocysteine
  MOD_RES (951)..(951): Selenocysteine
  MOD_RES (970)..(970): Selenocysteine
  MOD_RES (1001)..(1002): Selenocysteine
  MOD_RES (1007)..(1008): Selenocysteine
  MOD_RES (1012)..(1012): Selenocysteine
  MOD_RES (1014)..(1014): Selenocysteine
XXSSRRPLLSSPSWGGPEPEGRAGGGIPGSSSPHPGXGSRRLKVAPPPPAPKPCKXVXXSGAKAGGGKGAGSRLSWPESEGKPRVKGSKSSAGXGASVSAAAXAAAAGGGGSXASXSGGVGAGAGARGKLSPRKGKSKXLDNSDLHPGPPAGSPPPLXLPPXPSPAXAVXAASAQPPGPAPPIXLEPPAPGLKRGREGGRASXRDRKMLKFISGIFXKSXGGPPGSGPLPGPPSLSSGSGSRELLGAELRASPKAVINSQEWXLSRSIPELRLGVLGDARSGKSSLIHRFLXGSYQVLEKXESEQYKKEMLVDGQXHLVLIREEAGAPDAKFSGWADAVIFVFSLEDENSFQAVSRLHGQLSSLRGEGRGGLALALVGXQDRISASSPRVVGDARARALCADMKRCSYYEXCAXYGLNVDRVFQEVAQKVVXLRKQQQLLAACKSLPSSPSHSAASXPVAGQASNGGHXSDYSSSLPSSPNVGHRELRAEAAAVAGLSXPGSLHRAAKRRXSLFANRRGSDSEKRSLDSRGEXXGSGRAIPIKQSFLLKRSGNSLNKEWKKKYVXLSSNGFLLYHPSINDYIHSXHGKEMDLLRXXVKVPGKRPPRAISAFGPSASINGLVKDMSXVQMGEGLEAXXPMPSPSPSPSSLQPPPDQXSKHLLKPDRNLARALSXDCXPSGDLSPLSREPPPSPMVKKQRRKKLXXPSKXEGSAGQAEEENFEFLIVSSXGQXWHFEAASFEERDAWVQAIESQILASLQCCESSKVKLRXDSQSEAVAIQAIRNAKGNSICVDCGAPNPXWASLNLGALICIECSGIHRNLGXHLSRVRSLDLDDWPRELXLVLXAIGNDXANRVWESDXRGRAKPSRDSSREERESWIRAKYEQLLFLAPLSXSEEPLGRQLWAAVQAQDVAXVLLLLAHARHGPLDXSVEDPQLRSPLHLAAELAHVVIXQLLLWYGADVAARDAQGRXALFYARQAGSQLCADILLQHGCPGEGGSAAXXPSAAXXPSIXAXPSPRRRSSAASVGRADAPVALV

SEQ ID NO: 1938 - protein, 177 aa, Homo sapiens
  MOD_RES (21)..(21): Selenocysteine
  MOD_RES (27)..(27): Selenocysteine
  MOD_RES (31)..(31): Selenocysteine
  MOD_RES (34)..(34): Selenocysteine
  MOD_RES (90)..(90): Selenocysteine
  MOD_RES (107)..(107): Selenocysteine
  MOD_RES (119)..(119): Selenocysteine
  MOD_RES (125)..(125): Selenocysteine
  MOD_RES (127)..(127): Selenocysteine
  MOD_RES (141)..(141): Selenocysteine
  MOD_RES (155)..(155): Selenocysteine
  MOD_RES (161)..(161): Selenocysteine
  MOD_RES (168)..(168): Selenocysteine
DAISAANPRVIDDSRARKLSXDLKRCXYYEXCAXYGLNVERVFQDVAQKVVALRKKQQLAIGPCKSLPNSPSHSAVSAASIPAVHINQAXNGGGSAFSDYSSSVPSXPSISQRELRIEXIAASSXPXPIRKQSKRRSNIFXLMNRRPEGCLPKAXQRICAXVSNFSSXKRPFQLLPN

SEQ ID NO: 1939 - protein, 576 aa, Homo sapiens
  MOD_RES (70)..(70): Selenocysteine
  MOD_RES (109)..(109): Selenocysteine
  MOD_RES (114)..(114): Selenocysteine
  MOD_RES (119)..(119): Selenocysteine
  MOD_RES (128)..(128): Selenocysteine
  MOD_RES (216)..(216): Selenocysteine
  MOD_RES (251)..(251): Selenocysteine
  MOD_RES (260)..(260): Selenocysteine
  MOD_RES (300)..(300): Selenocysteine
  MOD_RES (329)..(329): Selenocysteine
  MOD_RES (331)..(331): Selenocysteine
  MOD_RES (390)..(390): Selenocysteine
  MOD_RES (414)..(414): Selenocysteine
  MOD_RES (436)..(436): Selenocysteine
  MOD_RES (442)..(442): Selenocysteine
  MOD_RES (446)..(446): Selenocysteine
  MOD_RES (449)..(449): Selenocysteine
  MOD_RES (505)..(505): Selenocysteine
  MOD_RES (522)..(522): Selenocysteine
  MOD_RES (534)..(534): Selenocysteine
  MOD_RES (540)..(540): Selenocysteine
  MOD_RES (542)..(542): Selenocysteine
  MOD_RES (556)..(556): Selenocysteine
  MOD_RES (560)..(560): Selenocysteine
  MOD_RES (567)..(567): Selenocysteine
MERGWPQGDSCPGERPAACRRAHSVCDSLDLHGASAGRAAAALQAALCAASEQPARPRSVCSGGPEPPPXGARGLLLGLLRPRLGRRGLAPSGPPVSPAPSPASSPAPXRRSRXRGEPXPRPRPASMXFLEVNRLELAAAEAPGAGLGRAGSAGFLRGAALWSSQRWPVLRGGRGPEGPRRGLAALRKSFSFRLRRGQEVRRSESGLLARPPRARXRSDGDAGSLGAFPSRRDLLGSDAPRAAPEPGRPRXAAGLWRLLXSRFRRREPAPAAPLWGRRAAAAPELLRAPSDSFVNSQEWXLSRSVPELKVGIVGNLSSGKSALVHRYLXGXYVQEESPEGGRFKKEIVVDGQSYLLLIRDEGGPPELQFAAWVDAVVFVFSLEDEISFQXVYNYFLRLCSFRNASEVPMVLVGXQDAISAANPRVIDDSRARKLSXDLKRCXYYEXCAXYGLNVERVFQDVAQKVVALRKKQQLAIGPCKSLPNSPSHSAVSAASIPAVHINQAXNGGGSAFSDYSSSVPSXPSISQRELRIEXIAASSXPXPIRKQSKRRSNIFXICAXVSNFSSXKRPFQLLPN

SEQ ID NO: 1940 - protein, 875 aa, Homo sapiens
  MOD_RES (84)..(84): Selenocysteine
  MOD_RES (113)..(113): Selenocysteine
  MOD_RES (115)..(115): Selenocysteine
  MOD_RES (174)..(174): Selenocysteine
  MOD_RES (198)..(198): Selenocysteine
  MOD_RES (220)..(220): Selenocysteine
  MOD_RES (226)..(226): Selenocysteine
  MOD_RES (230)..(230): Selenocysteine
  MOD_RES (233)..(233): Selenocysteine
  MOD_RES (289)..(289): Selenocysteine
  MOD_RES (306)..(306): Selenocysteine
  MOD_RES (318)..(318): Selenocysteine
  MOD_RES (324)..(324): Selenocysteine
  MOD_RES (326)..(326): Selenocysteine
  MOD_RES (340)..(340): Selenocysteine
  MOD_RES (392)..(392): Selenocysteine
  MOD_RES (400)..(400): Selenocysteine
  MOD_RES (422)..(423): Selenocysteine
  MOD_RES (435)..(435): Selenocysteine
  MOD_RES (438)..(438): Selenocysteine
  MOD_RES (442)..(442): Selenocysteine
  MOD_RES (456)..(456): Selenocysteine
  MOD_RES (462)..(462): Selenocysteine
  MOD_RES (509)..(510): Selenocysteine
  MOD_RES (552)..(552): Selenocysteine
  MOD_RES (554)..(554): Selenocysteine
  MOD_RES (564)..(564): Selenocysteine
  MOD_RES (579)..(579): Selenocysteine
  MOD_RES (582)..(582): Selenocysteine
  MOD_RES (589)..(589): Selenocysteine
  MOD_RES (618)..(618): Selenocysteine
  MOD_RES (634)..(634): Selenocysteine
  MOD_RES (695)..(695): Selenocysteine
  MOD_RES (780)..(780): Selenocysteine
  MOD_RES (788)..(788): Selenocysteine
  MOD_RES (802)..(802): Selenocysteine
  MOD_RES (821)..(821): Selenocysteine
  MOD_RES (853)..(853): Selenocysteine
  MOD_RES (862)..(862): Selenocysteine
MNFQAGGGQSPQQQQQLAGGPPQQFALSNSAAIRAEIQRFESVHPNIYAIYDLIERIEDLALQNQIREHVISIEDSFVNSQEWXLSRSVPELKVGIVGNLSSGKSALVHRYLXGXYVQEESPEGGRFKKEIVVDGQSYLLLIRDEGGPPELQFAAWVDAVVFVFSLEDEISFQXVYNYFLRLCSFRNASEVPMVLVGXQDAISAANPRVIDDSRARKLSXDLKRCXYYEXCAXYGLNVERVFQDVAQKVVALRKKQQLAIGPCKSLPNSPSHSAVSAASIPAVHINQAXNGGGSAFSDYSSSVPSXPSISQRELRIEXIAASSXPXPIRKQSKRRSNIFXSRKGADLDREKKAAECKVDSIGSGRAIPIKQGILLKRSGKSLNKEWKKKYVXLCDNGLLXYHPSLHDYMQNIHGKEIDLLRXXVKVPGKRLPRAXPAXAPGXSPRANGLSVERSNXQLGGGXGAPHSASSASLHSERPLSSSAWAGPRPEGLHQRSCSVSSADQWSEAXXSLPPGMQHPASGPAEVLSSSPKLDPPPSPHSNRKKHRRKKSXGXPRPDGPSSAXEEAEESFEFVVVSLXGQXWHFEASXAEERELWVQSVQAQILASLQGCRSAKDKXRLGNQNAALAVQAVRXVRGNSFCIDCDAPNPDWASLNLGALMCIECSGIHRHLGAHLSRVRSLDLDDWPPELLAVMXAMGNALANSVWEGALGGYSKPGPDACREEKERWIRAKYEQKLFLAPLPSSDVPLGQQLLRAVVEDDLRLLVMLLAHGSKEEVNEXYGDGDGRXALHLSSAMANVVFXQLLIWYGVDVRSRDARGLXPLAYARRAGSQECADILIQHGCPGEGCGLAPXPNREPANGXNPSAELHRSPSLL

SEQ ID NO: 1941 - protein, 343 aa, Homo sapiens
  MOD_RES (120)..(120): Selenocysteine
  MOD_RES (149)..(149): Selenocysteine
  MOD_RES (151)..(151): Selenocysteine
  MOD_RES (210)..(210): Selenocysteine
  MOD_RES (234)..(234): Selenocysteine
  MOD_RES (256)..(256): Selenocysteine
  MOD_RES (262)..(262): Selenocysteine
  MOD_RES (266)..(266): Selenocysteine
  MOD_RES (269)..(269): Selenocysteine
  MOD_RES (327)..(327): Selenocysteine
  MOD_RES (334)..(334): Selenocysteine
MNFQAGGGQSPQQQQSLAAPGGGGAAAQQLVCGGQFGGAGPGAGGGGGPSQQLAGGPPQQFALSNSAAIRAEIQRFESVHPNIYAIYDLIERIEDLALQNQIREHVISIEDSFVNSQEWXLSRSVPELKVGIVGNLSSGKSALVHRYLXGXYVQEESPEGGRFKKEIVVDGQSYLLLIRDEGGPPELQFAAWVDAVVFVFSLEDEISFQXVYNYFLRLCSFRNASEVPMVLVGXQDAISAANPRVIDDSRARKLSXDLKRCXYYEXCAXYGLNVERVFQDVAQKVVALRKKQQLAIGPCKSLPNSPSHSAVSAASIPAVHINQICAXVSNFSSXKRPFQLLPN

SEQ ID NO: 1942 - protein, 396 aa, Homo sapiens
  MOD_RES (120)..(120): Selenocysteine
  MOD_RES (149)..(149): Selenocysteine
  MOD_RES (151)..(151): Selenocysteine
  MOD_RES (210)..(210): Selenocysteine
  MOD_RES (234)..(234): Selenocysteine
  MOD_RES (256)..(256): Selenocysteine
  MOD_RES (262)..(262): Selenocysteine
  MOD_RES (266)..(266): Selenocysteine
  MOD_RES (269)..(269): Selenocysteine
  MOD_RES (325)..(325): Selenocysteine
  MOD_RES (342)..(342): Selenocysteine
  MOD_RES (354)..(354): Selenocysteine
  MOD_RES (360)..(360): Selenocysteine
  MOD_RES (362)..(362): Selenocysteine
  MOD_RES (376)..(376): Selenocysteine
  MOD_RES (380)..(380): Selenocysteine
  MOD_RES (387)..(387): Selenocysteine
MNFQAGGGQSPQQQQSLAAPGGGGAAAQQLVCGGQFGGAGPGAGGGGGPSQQLAGGPPQQFALSNSAAIRAEIQRFESVHPNIYAIYDLIERIEDLALQNQIREHVISIEDSFVNSQEWXLSRSVPELKVGIVGNLSSGKSALVHRYLXGXYVQEESPEGGRFKKEIVVDGQSYLLLIRDEGGPPELQFAAWVDAVVFVFSLEDEISFQXVYNYFLRLCSFRNASEVPMVLVGXQDAISAANPRVIDDSRARKLSXDLKRCXYYEXCAXYGLNVERVFQDVAQKVVALRKKQQLAIGPCKSLPNSPSHSAVSAASIPAVHINQAXNGGGSAFSDYSSSVPSXPSISQRELRIEXIAASSXPXPIRKQSKRRSNIFXICAXVSNFSSXKRPFQLLPN

SEQ ID NO: 1943 - protein, 911 aa, Homo sapiens
  MOD_RES (120)..(120): Selenocysteine
  MOD_RES (149)..(149): Selenocysteine
  MOD_RES (151)..(151): Selenocysteine
  MOD_RES (210)..(210): Selenocysteine
  MOD_RES (234)..(234): Selenocysteine
  MOD_RES (256)..(256): Selenocysteine
  MOD_RES (262)..(262): Selenocysteine
  MOD_RES (266)..(266): Selenocysteine
  MOD_RES (269)..(269): Selenocysteine
  MOD_RES (325)..(325): Selenocysteine
  MOD_RES (342)..(342): Selenocysteine
  MOD_RES (354)..(354): Selenocysteine
  MOD_RES (360)..(360): Selenocysteine
  MOD_RES (362)..(362): Selenocysteine
  MOD_RES (376)..(376): Selenocysteine
  MOD_RES (428)..(428): Selenocysteine
  MOD_RES (436)..(436): Selenocysteine
  MOD_RES (458)..(459): Selenocysteine
  MOD_RES (471)..(471): Selenocysteine
  MOD_RES (474)..(474): Selenocysteine
  MOD_RES (478)..(478): Selenocysteine
  MOD_RES (492)..(492): Selenocysteine
  MOD_RES (498)..(498): Selenocysteine
  MOD_RES (545)..(546): Selenocysteine
  MOD_RES (588)..(588): Selenocysteine
  MOD_RES (590)..(590): Selenocysteine
  MOD_RES (600)..(600): Selenocysteine
  MOD_RES (615)..(615): Selenocysteine
  MOD_RES (618)..(618): Selenocysteine
  MOD_RES (625)..(625): Selenocysteine
  MOD_RES (654)..(654): Selenocysteine
  MOD_RES (670)..(670): Selenocysteine
  MOD_RES (731)..(731): Selenocysteine
  MOD_RES (816)..(816): Selenocysteine
  MOD_RES (824)..(824): Selenocysteine
  MOD_RES (838)..(838): Selenocysteine
  MOD_RES (857)..(857): Selenocysteine
  MOD_RES (889)..(889): Selenocysteine
  MOD_RES (898)..(898): Selenocysteine
MNFQAGGGQSPQQQQSLAAPGGGGAAAQQLVCGGQFGGAGPGAGGGGGPSQQLAGGPPQQFALSNSAAIRAEIQRFESVHPNIYAIYDLIERIEDLALQNQIREHVISIEDSFVNSQEWXLSRSVPELKVGIVGNLSSGKSALVHRYLXGXYVQEESPEGGRFKKEIVVDGQSYLLLIRDEGGPPELQFAAWVDAVVFVFSLEDEISFQXVYNYFLRLCSFRNASEVPMVLVGXQDAISAANPRVIDDSRARKLSXDLKRCXYYEXCAXYGLNVERVFQDVAQKVVALRKKQQLAIGPCKSLPNSPSHSAVSAASIPAVHINQAXNGGGSAFSDYSSSVPSXPSISQRELRIEXIAASSXPXPIRKQSKRRSNIFXSRKGADLDREKKAAECKVDSIGSGRAIPIKQGILLKRSGKSLNKEWKKKYVXLCDNGLLXYHPSLHDYMQNIHGKEIDLLRXXVKVPGKRLPRAXPAXAPGXSPRANGLSVERSNXQLGGGXGAPHSASSASLHSERPLSSSAWAGPRPEGLHQRSCSVSSADQWSEAXXSLPPGMQHPASGPAEVLSSSPKLDPPPSPHSNRKKHRRKKSXGXPRPDGPSSAXEEAEESFEFVVVSLXGQXWHFEASXAEERELWVQSVQAQILASLQGCRSAKDKXRLGNQNAALAVQAVRXVRGNSFCIDCDAPNPDWASLNLGALMCIECSGIHRHLGAHLSRVRSLDLDDWPPELLAVMXAMGNALANSVWEGALGGYSKPGPDACREEKERWIRAKYEQKLFLAPLPSSDVPLGQQLLRAVVEDDLRLLVMLLAHGSKEEVNEXYGDGDGRXALHLSSAMANVVFXQLLIWYGVDVRSRDARGLXPLAYARRAGSQECADILIQHGCPGEGCGLAPXPNREPANGXNPSAELHRSPSLL

SEQ ID NO: 1944 - protein, 580 aa, Homo sapiens
  MOD_RES (6)..(6): Selenocysteine
  MOD_RES (28)..(28): Selenocysteine
  MOD_RES (34)..(34): Selenocysteine
  MOD_RES (38)..(38): Selenocysteine
  MOD_RES (41)..(41): Selenocysteine
  MOD_RES (97)..(97): Selenocysteine
  MOD_RES (114)..(114): Selenocysteine
  MOD_RES (126)..(126): Selenocysteine
  MOD_RES (132)..(132): Selenocysteine
  MOD_RES (134)..(134): Selenocysteine
  MOD_RES (148)..(148): Selenocysteine
  MOD_RES (200)..(200): Selenocysteine
  MOD_RES (208)..(208): Selenocysteine
  MOD_RES (230)..(231): Selenocysteine
  MOD_RES (243)..(243): Selenocysteine
  MOD_RES (246)..(246): Selenocysteine
  MOD_RES (250)..(250): Selenocysteine
  MOD_RES (264)..(264): Selenocysteine
  MOD_RES (270)..(270): Selenocysteine
  MOD_RES (284)..(284): Selenocysteine
  MOD_RES (287)..(287): Selenocysteine
  MOD_RES (294)..(294): Selenocysteine
  MOD_RES (323)..(323): Selenocysteine
  MOD_RES (339)..(339): Selenocysteine
  MOD_RES (400)..(400): Selenocysteine
  MOD_RES (485)..(485): Selenocysteine
  MOD_RES (493)..(493): Selenocysteine
  MOD_RES (507)..(507): Selenocysteine
  MOD_RES (526)..(526): Selenocysteine
  MOD_RES (558)..(558): Selenocysteine
  MOD_RES (567)..(567): Selenocysteine
MVLVGXQDAISAANPRVIDDSRARKLSXDLKRCXYYEXCAXYGLNVERVFQDVAQKVVALRKKQQLAIGPCKSLPNSPSHSAVSAASIPAVHINQAXNGGGSAFSDYSSSVPSXPSISQRELRIEXIAASSXPXPIRKQSKRRSNIFXSRKGADLDREKKAAECKVDSIGSGRAIPIKQGILLKRSGKSLNKEWKKKYVXLCDNGLLXYHPSLHDYMQNIHGKEIDLLRXXVKVPGKRLPRAXPAXAPGXSPRANGLSVERSNXQLGGGXEAEESFEFVVVSLXGQXWHFEASXAEERELWVQSVQAQILASLQGCRSAKDKXRLGNQNAALAVQAVRXVRGNSFCIDCDAPNPDWASLNLGALMCIECSGIHRHLGAHLSRVRSLDLDDWPPELLAVMXAMGNALANSVWEGALGGYSKPGPDACREEKERWIRAKYEQKLFLAPLPSSDVPLGQQLLRAVVEDDLRLLVMLLAHGSKEEVNEXYGDGDGRXALHLSSAMANVVFXQLLIWYGVDVRSRDARGLXPLAYARRAGSQECADILIQHGCPGEGCGLAPXPNREPANGXNPSAELHRSPSLL

SEQ ID NO: 1945 - protein, 194 aa, Homo sapiens
  MOD_RES (1)..(1): Any amino acid
  MOD_RES (43)..(43): Selenocysteine
  MOD_RES (56)..(56): Selenocysteine
  MOD_RES (85)..(85): Selenocysteine
  MOD_RES (87)..(87): Selenocysteine
  MOD_RES (146)..(146): Selenocysteine
  MOD_RES (170)..(170): Selenocysteine
  MOD_RES (192)..(192): Selenocysteine
XEGERSRGLREPGRSGLSGAGRGLHRPCLAMLSLSGVLARLRXRPRDSFVNSQEWXLSRSVPELKVGIVGNLSSGKSALVHRYLXGXYVQEESPEGGRFKKEIVVDGQSYLLLIRDEGGPPELQFAAWVDAVVFVFSLEDEISFQXVYNYFLRLCSFRNASEVPMVLVGXQDAISAANPRVIDDSRARKLSXDL

SEQ ID NO: 1946 - protein, 404 aa, Homo sapiens
  MOD_RES (1)..(1): Any amino acid
  MOD_RES (8)..(9): Selenocysteine
  MOD_RES (21)..(21): Selenocysteine
  MOD_RES (24)..(24): Selenocysteine
  MOD_RES (28)..(28): Selenocysteine
  MOD_RES (42)..(42): Selenocysteine
  MOD_RES (48)..(48): Selenocysteine
  MOD_RES (81)..(81): Selenocysteine
  MOD_RES (83)..(83): Selenocysteine
  MOD_RES (93)..(93): Selenocysteine
  MOD_RES (108)..(108): Selenocysteine
  MOD_RES (111)..(111): Selenocysteine
  MOD_RES (118)..(118): Selenocysteine
  MOD_RES (147)..(147): Selenocysteine
  MOD_RES (163)..(163): Selenocysteine
  MOD_RES (224)..(224): Selenocysteine
  MOD_RES (309)..(309): Selenocysteine
  MOD_RES (317)..(317): Selenocysteine
  MOD_RES (331)..(331): Selenocysteine
  MOD_RES (350)..(350): Selenocysteine
  MOD_RES (382)..(382): Selenocysteine
  MOD_RES (391)..(391): Selenocysteine
XEIDLLRXXVKVPGKRLPRAXPAXAPGXSPRANGLSVERSNXQLGGGXASGPAEVLSSSPKLDPPPSPHSNRKKHRRKKSXGXPRPDGPSSAXEEAEESFEFVVVSLXGQXWHFEASXAEERELWVQSVQAQILASLQGCRSAKDKXRLGNQNAALAVQAVRXVRGNSFCIDCDAPNPDWASLNLGALMCIECSGIHRHLGAHLSRVRSLDLDDWPPELLAVMXAMGNALANSVWEGALGGYSKPGPDACREEKERWIRAKYEQKLFLAPLPSSDVPLGQQLLRAVVEDDLRLLVMLLAHGSKEEVNEXYGDGDGRXALHLSSAMANVVFXQLLIWYGVDVRSRDARGLXPLAYARRAGSQECADILIQHGCPGEGCGLAPXPNREPANGXNPSAELHRSPSLL

SEQ ID NO: 1947 - protein, 170 aa, Homo sapiens
  MOD_RES (1)..(1): Any amino acid
  MOD_RES (7)..(7): Selenocysteine
  MOD_RES (29)..(29): Selenocysteine
  MOD_RES (35)..(35): Selenocysteine
  MOD_RES (39)..(39): Selenocysteine
  MOD_RES (42)..(42): Selenocysteine
  MOD_RES (98)..(98): Selenocysteine
  MOD_RES (115)..(115): Selenocysteine
  MOD_RES (127)..(127): Selenocysteine
  MOD_RES (133)..(133): Selenocysteine
  MOD_RES (135)..(135): Selenocysteine
  MOD_RES (149)..(149): Selenocysteine
  MOD_RES (163)..(163): Selenocysteine
XMVLVGXQDAISAANPRVIDDSRARKLSXDLKRCXYYEXCAXYGLNVERVFQDVAQKVVALRKKQQLAIGPCKSLPNSPSHSAVSAASIPAVHINQAXNGGGSAFSDYSSSVPSXPSISQRELRIEXIAASSXPXPIRKQSKRRSNIFXLMNRRPEGCLPKAXQRVSWPS

SEQ ID NO: 1948 - protein, 342 aa, Homo sapiens
  MOD_RES (5)..(5): Selenocysteine
  MOD_RES (27)..(27): Selenocysteine
  MOD_RES (95)..(95): Selenocysteine
  MOD_RES (120)..(120): Selenocysteine
  MOD_RES (129)..(129): Selenocysteine
  MOD_RES (140)..(140): Selenocysteine
  MOD_RES (163)..(163): Selenocysteine
  MOD_RES (169)..(169): Selenocysteine
  MOD_RES (173)..(173): Selenocysteine
  MOD_RES (181)..(181): Selenocysteine
  MOD_RES (191)..(191): Selenocysteine
  MOD_RES (208)..(208): Selenocysteine
  MOD_RES (240)..(240): Selenocysteine
  MOD_RES (242)..(242): Selenocysteine
  MOD_RES (244)..(244): Selenocysteine
  MOD_RES (271)..(271): Selenocysteine
  MOD_RES (316)..(316): Selenocysteine
  MOD_RES (336)..(336): Selenocysteine
  MOD_RES (342)..(342): Selenocysteine
MAAGXAVGAWVLVLSLWGAVVGAQNIXARIGEPLVLKCKGAPKKPPQRLEWKLGGGPWDSVARVLPNGSLFLPAVGIQDEGIFRCQAMNRNGKEXKSNYRVRVYQIPGKPEIVDSASELXAGVPNKVGXCVSEGSYPAGXLSWHLDGKPLVPNEKGVSVKEQXRRHPEXGLFXLQSELMVXPARGGDPRPXFSCSFSPGLPRHRALRXAPIQPRVWEPVPLEEVQLVVEPEGGAVAPGGXVXLXCEVPAQPSPQIHWMKDVSDLERGAGRXRRGGANCRLCGRIRAGNSSPGPGDPGRPGDSRPAHWGHLVAKAAXPRRGEEGPRKPGGRGGACRXESVGGX

SEQ ID NO: 1949 - protein, 342 aa, Homo sapiens
  MOD_RES (5)..(5): Selenocysteine
  MOD_RES (27)..(27): Selenocysteine
  MOD_RES (95)..(95): Selenocysteine
  MOD_RES (120)..(120): Selenocysteine
  MOD_RES (129)..(129): Selenocysteine
  MOD_RES (140)..(140): Selenocysteine
  MOD_RES (163)..(163): Selenocysteine
  MOD_RES (169)..(169): Selenocysteine
  MOD_RES (173)..(173): Selenocysteine
  MOD_RES (181)..(181): Selenocysteine
  MOD_RES (191)..(191): Selenocysteine
  MOD_RES (208)..(208): Selenocysteine
  MOD_RES (240)..(240): Selenocysteine
  MOD_RES (242)..(242): Selenocysteine
  MOD_RES (244)..(244): Selenocysteine
  MOD_RES (271)..(271): Selenocysteine
  MOD_RES (316)..(316): Selenocysteine
  MOD_RES (336)..(336): Selenocysteine
  MOD_RES (342)..(342): Selenocysteine
MAAGXAVGAWVLVLSLWGAVVGAQNIXARIGEPLVLKCKGAPKKPPQRLEWKLGGGPWDSVARVLPNSSLFLPAVGIQDEGIFRCQAMNRNGKEXKSNYRVRVYQIPGKPEIVDSASELXAGVPNKVGXCVSEGSYPAGXLSWHLDGKPLVPNEKGVSVKEQXRRHPEXGLFXLQSELMVXPARGGDPRPXFSCSFSPGLPRHRALRXAPIQPRVWEPVPLEEVQLVVEPEGGAVAPGGXVXLXCEVPAQPSPQIHWMKDVSDLERGAGRXRRGGANCRLCGRIRAGNSSPGPGDPGRPGDSRPAHWGHLVAKAAXPRRGEEGPRKPGGRGGACRXESVGGX

SEQ ID NO: 1950 - protein, 234 aa, Homo sapiens
  MOD_RES (5)..(5): Selenocysteine
  MOD_RES (27)..(27): Selenocysteine
  MOD_RES (55)..(55): Selenocysteine
  MOD_RES (58)..(58): Selenocysteine
  MOD_RES (109)..(109): Selenocysteine
  MOD_RES (118)..(118): Selenocysteine
  MOD_RES (120)..(120): Selenocysteine
  MOD_RES (122)..(122): Selenocysteine
  MOD_RES (147)..(147): Selenocysteine
  MOD_RES (156)..(156): Selenocysteine
  MOD_RES (167)..(167): Selenocysteine
  MOD_RES (190)..(190): Selenocysteine
  MOD_RES (196)..(196): Selenocysteine
  MOD_RES (200)..(200): Selenocysteine
  MOD_RES (208)..(208): Selenocysteine
  MOD_RES (218)..(218): Selenocysteine
MAAGXAVGAWVLVLSLWGAVVGAQNIXARIGEPLVLKCKGAPKKPPQRLEWKLNXGRXEAWKVLSPQGGGPWDSVARVLPNGSLFLPAVGIQDEGIFRCQAMNRNGKEXKSNYRSLRXFXIXASDWIFPPSEIPGKPEIVDSASELXAGVPNKVGXCVSEGSYPAGXLSWHLDGKPLVPNEKGVSVKEQXRRHPEXGLFXLQSELMVXPARGGDPRPXFSCSFSPGLPRHRALR

SEQ ID NO: 1951 - protein, 128 aa, Homo sapiens
  MOD_RES (5)..(5): Selenocysteine
  MOD_RES (27)..(27): Selenocysteine
  MOD_RES (55)..(55): Selenocysteine
  MOD_RES (58)..(58): Selenocysteine
  MOD_RES (109)..(109): Selenocysteine
MAAGXAVGAWVLVLSLWGAVVGAQNIXARIGEPLVLKCKGAPKKPPQRLEWKLNXGRXEAWKVLSPQGGGPWDSVARVLPNGSLFLPAVGIQDEGIFRCQAMNRNGKEXKSNYRVRVYQFENLHNYSL

SEQ ID NO: 1952 - protein, 347 aa, Homo sapiens
  MOD_RES (5)..(5): Selenocysteine
  MOD_RES (27)..(27): Selenocysteine
  MOD_RES (55)..(55): Selenocysteine
  MOD_RES (58)..(58): Selenocysteine
  MOD_RES (109)..(109): Selenocysteine
  MOD_RES (134)..(134): Selenocysteine
  MOD_RES (143)..(143): Selenocysteine
  MOD_RES (154)..(154): Selenocysteine
  MOD_RES (177)..(177): Selenocysteine
  MOD_RES (183)..(183): Selenocysteine
  MOD_RES (187)..(187): Selenocysteine
  MOD_RES (195)..(195): Selenocysteine
  MOD_RES (205)..(205): Selenocysteine
  MOD_RES (222)..(222): Selenocysteine
  MOD_RES (254)..(254): Selenocysteine
  MOD_RES (256)..(256): Selenocysteine
  MOD_RES (258)..(258): Selenocysteine
  MOD_RES (298)..(298): Selenocysteine
  MOD_RES (304)..(304): Selenocysteine
  MOD_RES (329)..(329): Selenocysteine
MAAGXAVGAWVLVLSLWGAVVGAQNIXARIGEPLVLKCKGAPKKPPQRLEWKLNXGRXEAWKVLSPQGGGPWDSVARVLPNGSLFLPAVGIQDEGIFRCQAMNRNGKEXKSNYRVRVYQIPGKPEIVDSASELXAGVPNKVGXCVSEGSYPAGXLSWHLDGKPLVPNEKGVSVKEQXRRHPEXGLFXLQSELMVXPARGGDPRPXFSCSFSPGLPRHRALRXAPIQPRVWEPVPLEEVQLVVEPEGGAVAPGGXVXLXCEVPAQPSPQIHWMKDGVPLPLPPSPVLILPEIGPQDQGXYSCVAXHSSHGPQESRAVSISIIEPGEEGPXAGEGFDKVREAEDSPQHM

SEQ ID NO: 1953 - protein, 404 aa, Homo sapiens
  MOD_RES (5)..(5): Selenocysteine
  MOD_RES (27)..(27): Selenocysteine
  MOD_RES (55)..(55): Selenocysteine
  MOD_RES (58)..(58): Selenocysteine
  MOD_RES (109)..(109): Selenocysteine
  MOD_RES (134)..(134): Selenocysteine
  MOD_RES (143)..(143): Selenocysteine
  MOD_RES (154)..(154): Selenocysteine
  MOD_RES (177)..(177): Selenocysteine
  MOD_RES (183)..(183): Selenocysteine
  MOD_RES (187)..(187): Selenocysteine
  MOD_RES (195)..(195): Selenocysteine
  MOD_RES (205)..(205): Selenocysteine
  MOD_RES (222)..(222): Selenocysteine
  MOD_RES (254)..(254): Selenocysteine
  MOD_RES (256)..(256): Selenocysteine
  MOD_RES (258)..(258): Selenocysteine
  MOD_RES (298)..(298): Selenocysteine
  MOD_RES (304)..(304): Selenocysteine
  MOD_RES (329)..(329): Selenocysteine
  MOD_RES (340)..(340): Selenocysteine
  MOD_RES (353)..(353): Selenocysteine
  MOD_RES (401)..(401): Selenocysteine
MAAGXAVGAWVLVLSLWGAVVGAQNIXARIGEPLVLKCKGAPKKPPQRLEWKLNXGRXEAWKVLSPQGGGPWDSVARVLPNGSLFLPAVGIQDEGIFRCQAMNRNGKEXKSNYRVRVYQIPGKPEIVDSASELXAGVPNKVGXCVSEGSYPAGXLSWHLDGKPLVPNEKGVSVKEQXRRHPEXGLFXLQSELMVXPARGGDPRPXFSCSFSPGLPRHRALRXAPIQPRVWEPVPLEEVQLVVEPEGGAVAPGGXVXLXCEVPAQPSPQIHWMKDGVPLPLPPSPVLILPEIGPQDQGXYSCVAXHSSHGPQESRAVSISIIEPGEEGPXAGSVGGSGLGXLALALGILGGLGXAALLIGVILWQRRQRRGEERKAPENQEEEEERAELNQSEEPEAGESSXGGP

SEQ ID NO: 1954 - protein, 233 aa, Homo sapiens
  MOD_RES (5)..(5): Selenocysteine
  MOD_RES (27)..(27): Selenocysteine
  MOD_RES (55)..(55): Selenocysteine
  MOD_RES (58)..(58): Selenocysteine
  MOD_RES (109)..(109): Selenocysteine
  MOD_RES (134)..(134): Selenocysteine
  MOD_RES (159)..(159): Selenocysteine
  MOD_RES (170)..(170): Selenocysteine
  MOD_RES (193)..(193): Selenocysteine
  MOD_RES (199)..(199): Selenocysteine
  MOD_RES (203)..(203): Selenocysteine
  MOD_RES (211)..(211): Selenocysteine
  MOD_RES (221)..(221): Selenocysteine
MAAGXAVGAWVLVLSLWGAVVGAQNIXARIGEPLVLKCKGAPKKPPQRLEWKLNXGRXEAWKVLSPQGGGPWDSVARVLPNGSLFLPAVGIQDEGIFRCQAMNRNGKEXKSNYRVRVYQIPGKPEIVDSASELXAGVPNKVVEESRRSRKRPCEQEVGXCVSEGSYPAGXLSWHLDGKPLVPNEKGVSVKEQXRRHPEXGLFXLQSELMVXPARGGDPRPXFSCSFSPGLPRH

SEQ ID NO: 1955 - protein, 363 aa, Homo sapiens
  MOD_RES (5)..(5): Selenocysteine
  MOD_RES (27)..(27): Selenocysteine
  MOD_RES (55)..(55): Selenocysteine
  MOD_RES (58)..(58): Selenocysteine
  MOD_RES (109)..(109): Selenocysteine
  MOD_RES (134)..(134): Selenocysteine
  MOD_RES (159)..(159): Selenocysteine
  MOD_RES (170)..(170): Selenocysteine
  MOD_RES (193)..(193): Selenocysteine
  MOD_RES (199)..(199): Selenocysteine
  MOD_RES (203)..(203): Selenocysteine
  MOD_RES (211)..(211): Selenocysteine
  MOD_RES (221)..(221): Selenocysteine
  MOD_RES (238)..(238): Selenocysteine
  MOD_RES (270)..(270): Selenocysteine
  MOD_RES (272)..(272): Selenocysteine
  MOD_RES (274)..(274): Selenocysteine
  MOD_RES (314)..(314): Selenocysteine
  MOD_RES (320)..(320): Selenocysteine
  MOD_RES (345)..(345): Selenocysteine
MAAGXAVGAWVLVLSLWGAVVGAQNIXARIGEPLVLKCKGAPKKPPQRLEWKLNXGRXEAWKVLSPQGGGPWDSVARVLPNGSLFLPAVGIQDEGIFRCQAMNRNGKEXKSNYRVRVYQIPGKPEIVDSASELXAGVPNKVVEESRRSRKRPCEQEVGXCVSEGSYPAGXLSWHLDGKPLVPNEKGVSVKEQXRRHPEXGLFXLQSELMVXPARGGDPRPXFSCSFSPGLPRHRALRXAPIQPRVWEPVPLEEVQLVVEPEGGAVAPGGXVXLXCEVPAQPSPQIHWMKDGVPLPLPPSPVLILPEIGPQDQGXYSCVAXHSSHGPQESRAVSISIIEPGEEGPXAGEGFDKVREAEDSPQHM

SEQ ID NO: 1956 - protein, 420 aa, Homo sapiens
  MOD_RES (5)..(5): Selenocysteine
  MOD_RES (27)..(27): Selenocysteine
  MOD_RES (55)..(55): Selenocysteine
  MOD_RES (58)..(58): Selenocysteine
  MOD_RES (109)..(109): Selenocysteine
  MOD_RES (134)..(134): Selenocysteine
  MOD_RES (159)..(159): Selenocysteine
  MOD_RES (170)..(170): Selenocysteine
  MOD_RES (193)..(193): Selenocysteine
  MOD_RES (199)..(199): Selenocysteine
  MOD_RES (203)..(203): Selenocysteine
  MOD_RES (211)..(211): Selenocysteine
  MOD_RES (221)..(221): Selenocysteine
  MOD_RES (238)..(238): Selenocysteine
  MOD_RES (270)..(270): Selenocysteine
  MOD_RES (272)..(272): Selenocysteine
  MOD_RES (274)..(274): Selenocysteine
  MOD_RES (314)..(314): Selenocysteine
  MOD_RES (320)..(320): Selenocysteine
  MOD_RES (345)..(345): Selenocysteine
  MOD_RES (356)..(356): Selenocysteine
  MOD_RES (369)..(369): Selenocysteine
  MOD_RES (417)..(417): Selenocysteine
MAAGXAVGAWVLVLSLWGAVVGAQNIXARIGEPLVLKCKGAPKKPPQRLEWKLNXGRXEAWKVLSPQGGGPWDSVARVLPNGSLFLPAVGIQDEGIFRCQAMNRNGKEXKSNYRVRVYQIPGKPEIVDSASELXAGVPNKVVEESRRSRKRPCEQEVGXCVSEGSYPAGXLSWHLDGKPLVPNEKGVSVKEQXRRHPEXGLFXLQSELMVXPARGGDPRPXFSCSFSPGLPRHRALRXAPIQPRVWEPVPLEEVQLVVEPEGGAVAPGGXVXLXCEVPAQPSPQIHWMKDGVPLPLPPSPVLILPEIGPQDQGXYSCVAXHSSHGPQESRAVSISIIEPGEEGPXAGSVGGSGLGXLALALGILGGLGXAALLIGVILWQRRQRRGEERKAPENQEEEEERAELNQSEEPEAGESSXGGP

SEQ ID NO: 1957 - protein, 153 aa, Homo sapiens
  MOD_RES (5)..(5): Selenocysteine
  MOD_RES (27)..(27): Selenocysteine
  MOD_RES (55)..(55): Selenocysteine
  MOD_RES (58)..(58): Selenocysteine
  MOD_RES (102)..(102): Selenocysteine
  MOD_RES (150)..(150): Selenocysteine
MAAGXAVGAWVLVLSLWGAVVGAQNIXARIGEPLVLKCKGAPKKPPQRLEWKLNXGRXEAWKVLSPQGGGPWDSVARVLPNGSLFLPAVGIQDEGILGGLGXAALLIGVILWQRRQRRGEERKAPENQEEEEERAELNQSEEPEAGESSXGGP

SEQ ID NO: 1958 - protein, 234 aa, Homo sapiens
  MOD_RES (5)..(5): Selenocysteine
  MOD_RES (27)..(27): Selenocysteine
  MOD_RES (55)..(55): Selenocysteine
  MOD_RES (58)..(58): Selenocysteine
  MOD_RES (109)..(109): Selenocysteine
  MOD_RES (118)..(118): Selenocysteine
  MOD_RES (120)..(120): Selenocysteine
  MOD_RES (122)..(122): Selenocysteine
  MOD_RES (147)..(147): Selenocysteine
  MOD_RES (156)..(156): Selenocysteine
  MOD_RES (167)..(167): Selenocysteine
  MOD_RES (190)..(190): Selenocysteine
  MOD_RES (196)..(196): Selenocysteine
  MOD_RES (200)..(200): Selenocysteine
  MOD_RES (208)..(208): Selenocysteine
  MOD_RES (218)..(218): Selenocysteine
MAAGXAVGAWVLVLSLWGAVVGAQNIXARIGEPLVLKCKGAPKKPPQRLEWKLNXGRXEAWKVLSPQGGGPWDSVARVLPNSSLFLPAVGIQDEGIFRCQAMNRNGKEXKSNYRSLRXFXIXASDWIFPPSEIPGKPEIVDSASELXAGVPNKVGXCVSEGSYPAGXLSWHLDGKPLVPNEKGVSVKEQXRRHPEXGLFXLQSELMVXPARGGDPRPXFSCSFSPGLPRHRALR

SEQ ID NO: 1959 - protein, 128 aa, Homo sapiens
  MOD_RES (5)..(5): Selenocysteine
  MOD_RES (27)..(27): Selenocysteine
  MOD_RES (55)..(55): Selenocysteine
  MOD_RES (58)..(58): Selenocysteine
  MOD_RES (109)..(109): Selenocysteine
MAAGXAVGAWVLVLSLWGAVVGAQNIXARIGEPLVLKCKGAPKKPPQRLEWKLNXGRXEAWKVLSPQGGGPWDSVARVLPNSSLFLPAVGIQDEGIFRCQAMNRNGKEXKSNYRVRVYQFENLHNYSL

SEQ ID NO: 1960 - protein, 347 aa, Homo sapiens
  MOD_RES (5)..(5): Selenocysteine
  MOD_RES (27)..(27): Selenocysteine
  MOD_RES (55)..(55): Selenocysteine
  MOD_RES (58)..(58): Selenocysteine
  MOD_RES (109)..(109): Selenocysteine
  MOD_RES (134)..(134): Selenocysteine
  MOD_RES (143)..(143): Selenocysteine
  MOD_RES (154)..(154): Selenocysteine
  MOD_RES (177)..(177): Selenocysteine
  MOD_RES (183)..(183): Selenocysteine
  MOD_RES (187)..(187): Selenocysteine
  MOD_RES (195)..(195): Selenocysteine
  MOD_RES (205)..(205): Selenocysteine
  MOD_RES (222)..(222): Selenocysteine
  MOD_RES (254)..(254): Selenocysteine
  MOD_RES (256)..(256): Selenocysteine
  MOD_RES (258)..(258): Selenocysteine
  MOD_RES (298)..(298): Selenocysteine
  MOD_RES (304)..(304): Selenocysteine
  MOD_RES (329)..(329): Selenocysteine
MAAGXAVGAWVLVLSLWGAVVGAQNIXARIGEPLVLKCKGAPKKPPQRLEWKLNXGRXEAWKVLSPQGGGPWDSVARVLPNSSLFLPAVGIQDEGIFRCQAMNRNGKEXKSNYRVRVYQIPGKPEIVDSASELXAGVPNKVGXCVSEGSYPAGXLSWHLDGKPLVPNEKGVSVKEQXRRHPEXGLFXLQSELMVXPARGGDPRPXFSCSFSPGLPRHRALRXAPIQPRVWEPVPLEEVQLVVEPEGGAVAPGGXVXLXCEVPAQPSPQIHWMKDGVPLPLPPSPVLILPEIGPQDQGXYSCVAXHSSHGPQESRAVSISIIEPGEEGPXAGEGFDKVREAEDSPQHM

SEQ ID NO: 1961 - protein, 404 aa, Homo sapiens
  MOD_RES (5)..(5): Selenocysteine
  MOD_RES (27)..(27): Selenocysteine
  MOD_RES (55)..(55): Selenocysteine
  MOD_RES (58)..(58): Selenocysteine
  MOD_RES (109)..(109): Selenocysteine
  MOD_RES (134)..(134): Selenocysteine
  MOD_RES (143)..(143): Selenocysteine
  MOD_RES (154)..(154): Selenocysteine
  MOD_RES (177)..(177): Selenocysteine
  MOD_RES (183)..(183): Selenocysteine
  MOD_RES (187)..(187): Selenocysteine
  MOD_RES (195)..(195): Selenocysteine
  MOD_RES (205)..(205): Selenocysteine
  MOD_RES (222)..(222): Selenocysteine
  MOD_RES (254)..(254): Selenocysteine
  MOD_RES (256)..(256): Selenocysteine
  MOD_RES (258)..(258): Selenocysteine
  MOD_RES (298)..(298): Selenocysteine
  MOD_RES (304)..(304): Selenocysteine
  MOD_RES (329)..(329): Selenocysteine
  MOD_RES (340)..(340): Selenocysteine
  MOD_RES (353)..(353): Selenocysteine
  MOD_RES (401)..(401): Selenocysteine
MAAGXAVGAWVLVLSLWGAVVGAQNIXARIGEPLVLKCKGAPKKPPQRLEWKLNXGRXEAWKVLSPQGGGPWDSVARVLPNSSLFLPAVGIQDEGIFRCQAMNRNGKEXKSNYRVRVYQIPGKPEIVDSASELXAGVPNKVGXCVSEGSYPAGXLSWHLDGKPLVPNEKGVSVKEQXRRHPEXGLFXLQSELMVXPARGGDPRPXFSCSFSPGLPRHRALRXAPIQPRVWEPVPLEEVQLVVEPEGGAVAPGGXVXLXCEVPAQPSPQIHWMKDGVPLPLPPSPVLILPEIGPQDQGXYSCVAXHSSHGPQESRAVSISIIEPGEEGPXAGSVGGSGLGXLALALGILGGLGXAALLIGVILWQRRQRRGEERKAPENQEEEEERAELNQSEEPEAGESSXGGP

SEQ ID NO: 1962 - protein, 233 aa, Homo sapiens
  MOD_RES (5)..(5): Selenocysteine
  MOD_RES (27)..(27): Selenocysteine
  MOD_RES (55)..(55): Selenocysteine
  MOD_RES (58)..(58): Selenocysteine
  MOD_RES (109)..(109): Selenocysteine
  MOD_RES (134)..(134): Selenocysteine
  MOD_RES (159)..(159): Selenocysteine
  MOD_RES (170)..(170): Selenocysteine
  MOD_RES (193)..(193): Selenocysteine
  MOD_RES (199)..(199): Selenocysteine
  MOD_RES (203)..(203): Selenocysteine
  MOD_RES (211)..(211): Selenocysteine
  MOD_RES (221)..(221): Selenocysteine
MAAGXAVGAWVLVLSLWGAVVGAQNIXARIGEPLVLKCKGAPKKPPQRLEWKLNXGRXEAWKVLSPQGGGPWDSVARVLPNSSLFLPAVGIQDEGIFRCQAMNRNGKEXKSNYRVRVYQIPGKPEIVDSASELXAGVPNKVVEESRRSRKRPCEQEVGXCVSEGSYPAGXLSWHLDGKPLVPNEKGVSVKEQXRRHPEXGLFXLQSELMVXPARGGDPRPXFSCSFSPGLPRH

SEQ ID NO: 1963 - protein, 363 aa, Homo sapiens
  MOD_RES (5)..(5): Selenocysteine
  MOD_RES (27)..(27): Selenocysteine
  MOD_RES (55)..(55): Selenocysteine
  MOD_RES (58)..(58): Selenocysteine
  MOD_RES (109)..(109): Selenocysteine
  MOD_RES (134)..(134): Selenocysteine
  MOD_RES (159)..(159): Selenocysteine
  MOD_RES (170)..(170): Selenocysteine
  MOD_RES (193)..(193): Selenocysteine
  MOD_RES (199)..(199): Selenocysteine
  MOD_RES (203)..(203): Selenocysteine
  MOD_RES (211)..(211): Selenocysteine
  MOD_RES (221)..(221): Selenocysteine
  MOD_RES (238)..(238): Selenocysteine
  MOD_RES (270)..(270): Selenocysteine
  MOD_RES (272)..(272): Selenocysteine
  MOD_RES (274)..(274): Selenocysteine
  MOD_RES (314)..(314): Selenocysteine
  MOD_RES (320)..(320): Selenocysteine
  MOD_RES (345)..(345): Selenocysteine
MAAGXAVGAWVLVLSLWGAVVGAQNIXARIGEPLVLKCKGAPKKPPQRLEWKLNXGRXEAWKVLSPQGGGPWDSVARVLPNSSLFLPAVGIQDEGIFRCQAMNRNGKEXKSNYRVRVYQIPGKPEIVDSASELXAGVPNKVVEESRRSRKRPCEQEVGXCVSEGSYPAGXLSWHLDGKPLVPNEKGVSVKEQXRRHPEXGLFXLQSELMVXPARGGDPRPXFSCSFSPGLPRHRALRXAPIQPRVWEPVPLEEVQLVVEPEGGAVAPGGXVXLXCEVPAQPSPQIHWMKDGVPLPLPPSPVLILPEIGPQDQGXYSCVAXHSSHGPQESRAVSISIIEPGEEGPXAGEGFDKVREAEDSPQHM

SEQ ID NO: 1964 - protein, 420 aa, Homo sapiens
  MOD_RES (5)..(5): Selenocysteine
  MOD_RES (27)..(27): Selenocysteine
  MOD_RES (55)..(55): Selenocysteine
  MOD_RES (58)..(58): Selenocysteine
  MOD_RES (109)..(109): Selenocysteine
  MOD_RES (134)..(134): Selenocysteine
  MOD_RES (159)..(159): Selenocysteine
  MOD_RES (170)..(170): Selenocysteine
  MOD_RES (193)..(193): Selenocysteine
  MOD_RES (199)..(199): Selenocysteine
  MOD_RES (203)..(203): Selenocysteine
  MOD_RES (211)..(211): Selenocysteine
  MOD_RES (221)..(221): Selenocysteine
  MOD_RES (238)..(238): Selenocysteine
  MOD_RES (270)..(270): Selenocysteine
  MOD_RES (272)..(272): Selenocysteine
  MOD_RES (274)..(274): Selenocysteine
  MOD_RES (314)..(314): Selenocysteine
  MOD_RES (320)..(320): Selenocysteine
  MOD_RES (345)..(345): Selenocysteine
  MOD_RES (356)..(356): Selenocysteine
  MOD_RES (369)..(369): Selenocysteine
  MOD_RES (417)..(417): Selenocysteine
MAAGXAVGAWVLVLSLWGAVVGAQNIXARIGEPLVLKCKGAPKKPPQRLEWKLNXGRXEAWKVLSPQGGGPWDSVARVLPNSSLFLPAVGIQDEGIFRCQAMNRNGKEXKSNYRVRVYQIPGKPEIVDSASELXAGVPNKVVEESRRSRKRPCEQEVGXCVSEGSYPAGXLSWHLDGKPLVPNEKGVSVKEQXRRHPEXGLFXLQSELMVXPARGGDPRPXFSCSFSPGLPRHRALRXAPIQPRVWEPVPLEEVQLVVEPEGGAVAPGGXVXLXCEVPAQPSPQIHWMKDGVPLPLPPSPVLILPEIGPQDQGXYSCVAXHSSHGPQESRAVSISIIEPGEEGPXAGSVGGSGLGXLALALGILGGLGXAALLIGVILWQRRQRRGEERKAPENQEEEEERAELNQSEEPEAGESSXGGP

SEQ ID NO: 1965 - protein, 153 aa, Homo sapiens
  MOD_RES (5)..(5): Selenocysteine
  MOD_RES (27)..(27): Selenocysteine
  MOD_RES (55)..(55): Selenocysteine
  MOD_RES (58)..(58): Selenocysteine
  MOD_RES (102)..(102): Selenocysteine
  MOD_RES (150)..(150): Selenocysteine
MAAGXAVGAWVLVLSLWGAVVGAQNIXARIGEPLVLKCKGAPKKPPQRLEWKLNXGRXEAWKVLSPQGGGPWDSVARVLPNSSLFLPAVGIQDEGILGGLGXAALLIGVILWQRRQRRGEERKAPENQEEEEERAELNQSEEPEAGESSXGGP

SEQ ID NO: 1966 - protein, 133 aa, Homo sapiens
  MOD_RES (27)..(27): Selenocysteine
  MOD_RES (33)..(33): Selenocysteine
  MOD_RES (58)..(58): Selenocysteine
  MOD_RES (69)..(69): Selenocysteine
  MOD_RES (82)..(82): Selenocysteine
  MOD_RES (130)..(130): Selenocysteine
MKDGVPLPLPPSPVLILPEIGPQDQGXYSCVAXHSSHGPQESRAVSISIIEPGEEGPXAGSVGGSGLGXLALALGILGGLGXAALLIGVILWQRRQRRGEERKAPENQEEEEERAELNQSEEPEAGESSXGGP

SEQ ID NO: 1967 - protein, 294 aa, Homo sapiens
  MOD_RES (8)..(8): Selenocysteine
  MOD_RES (33)..(33): Selenocysteine
  MOD_RES (42)..(42): Selenocysteine
  MOD_RES (53)..(53): Selenocysteine
  MOD_RES (76)..(76): Selenocysteine
  MOD_RES (82)..(82): Selenocysteine
  MOD_RES (86)..(86): Selenocysteine
  MOD_RES (94)..(94): Selenocysteine
  MOD_RES (104)..(104): Selenocysteine
  MOD_RES (121)..(121): Selenocysteine
  MOD_RES (153)..(153): Selenocysteine
  MOD_RES (155)..(155): Selenocysteine
  MOD_RES (157)..(157): Selenocysteine
  MOD_RES (197)..(197): Selenocysteine
  MOD_RES (203)..(203): Selenocysteine
  MOD_RES (230)..(230): Selenocysteine
  MOD_RES (243)..(243): Selenocysteine
  MOD_RES (291)..(291): Selenocysteine
MNRNGKEXKSNYRVRVYQIPGKPEIVDSASELXAGVPNKVGXCVSEGSYPAGXLSWHLDGKPLVPNEKGVSVKEQXRRHPEXGLFXLQSELMVXPARGGDPRPXFSCSFSPGLPRHRALRXAPIQPRVWEPVPLEEVQLVVEPEGGAVAPGGXVXLXCEVPAQPSPQIHWMKDGVPLPLPPSPVLILPEIGPQDQGXYSCVAXHSSHGPQESRAVSISIIGSVGGSGLGXLALALGILGGLGXAALLIGVILWQRRQRRGEERKAPENQEEEEERAELNQSEEPEAGESSXGGP

SEQ ID NO: 1968 - protein, 857 aa, Homo sapiens
  MOD_RES (31)..(31): Selenocysteine
  MOD_RES (100)..(100): Selenocysteine
  MOD_RES (102)..(102): Selenocysteine
  MOD_RES (116)..(116): Selenocysteine
  MOD_RES (173)..(173): Selenocysteine
  MOD_RES (220)..(220): Selenocysteine
  MOD_RES (249)..(249): Selenocysteine
  MOD_RES (257)..(257): Selenocysteine
  MOD_RES (268)..(268): Selenocysteine
  MOD_RES (283)..(283): Selenocysteine
  MOD_RES (291)..(291): Selenocysteine
  MOD_RES (301)..(301): Selenocysteine
  MOD_RES (305)..(305): Selenocysteine
  MOD_RES (335)..(335): Selenocysteine
  MOD_RES (355)..(355): Selenocysteine
  MOD_RES (359)..(359): Selenocysteine
  MOD_RES (361)..(361): Selenocysteine
  MOD_RES (366)..(366): Selenocysteine
  MOD_RES (404)..(404): Selenocysteine
  MOD_RES (407)..(407): Selenocysteine
  MOD_RES (427)..(427): Selenocysteine
  MOD_RES (469)..(469): Selenocysteine
  MOD_RES (509)..(509): Selenocysteine
  MOD_RES (524)..(524): Selenocysteine
  MOD_RES (536)..(536): Selenocysteine
  MOD_RES (542)..(542): Selenocysteine
  MOD_RES (553)..(553): Selenocysteine
  MOD_RES (557)..(557): Selenocysteine
  MOD_RES (597)..(597): Selenocysteine
  MOD_RES (610)..(610): Selenocysteine
  MOD_RES (626)..(626): Selenocysteine
  MOD_RES (655)..(655): Selenocysteine
  MOD_RES (660)..(660): Selenocysteine
  MOD_RES (701)..(701): Selenocysteine
  MOD_RES (711)..(711): Selenocysteine
  MOD_RES (732)..(733): Selenocysteine
  MOD_RES (736)..(736): Selenocysteine
  MOD_RES (739)..(739): Selenocysteine
  MOD_RES (757)..(757): Selenocysteine
  MOD_RES (773)..(773): Selenocysteine
  MOD_RES (781)..(781): Selenocysteine
  MOD_RES (787)..(787): Selenocysteine
  MOD_RES (792)..(792): Selenocysteine
  MOD_RES (850)..(850): Selenocysteine
  MOD_RES (853)..(853): Selenocysteine
MEAGPSGAAAGAYLPPLQQVFQAPRRPGIGXVGKPIKLLANYFEVDIPKIDVYHYEVDIKPDKCPRRVNREVVEYMVQHFKPQIFGDRKPVYDGKKNIYXVXALPIGNERVDFEVXIPGEGKDRIFKVSIKWLAIVSWRMLHEALVSGQIPVPLESVQALDVAMRHLASMRYXPVGRSFFSPPEGYYHPLGGGREVWFGFHQSVRPAMWKMMLNIDVSAXAFYKAQPVIEFMCEVLDIRNIDEQPKPLXDSQRVRFXKEIKGLKVEVXHCGQMKRKYRVCNVXRRPASHQXFPLQLESGQXVECXVAQYFKQKYNLQLKYPHLPCLQVGQEQKHXYLPLEVCNIVAGQRCIKKLXDNQXSXMIKAXARSAPDRQEEISRLMKNASYNLDPYIQEFGIKVKDDMXEVXGRVLPAPILQYGGRNRAIAXPNQGVWDMRGKQFYNGIEIKVWAIACFAPQKQCREEVLKNFXDQLRKISKDAGMPIQGQPCFCKYAQGADSVEPMFRHLKNXYSGLQLIIVILPGKXPVYAEVKRVGDXLLGMAXQCVQVKNVVKXSPQXLSNLCLKINVKLGGINNILVPHQRSAVFQQPVIFLGADVXHPPAGDGKKPSIXAVVGSMDAHPSRYCAXVRVQRPRQEIIEDLSYMVRELLIQFYKSXRFKPXRIIFYRDGVPEGQLPQILHYELLAIRDACIKLEKDYQPGIXYIVVQKRHHXRLFCADKNERIGKSGNIPAGXXVDXNIXHPFEFDFYLCSHAGIQGXSRPSHYYVLWDDNRFXADELQILXYQLCHXYVRCXRSVSIPAPAYYARLVAFRARYHLVDKEHDSGEGSHISGQSNGRDPQALAKAVQVHQDXLRXMYFA

SEQ ID NO: 1969 - protein, 782 aa, Homo sapiens
  MOD_RES (25)..(25): Selenocysteine
  MOD_RES (27)..(27): Selenocysteine
  MOD_RES (41)..(41): Selenocysteine
  MOD_RES (98)..(98): Selenocysteine
  MOD_RES (145)..(145): Selenocysteine
  MOD_RES (174)..(174): Selenocysteine
  MOD_RES (182)..(182): Selenocysteine
  MOD_RES (193)..(193): Selenocysteine
  MOD_RES (208)..(208): Selenocysteine
  MOD_RES (216)..(216): Selenocysteine
  MOD_RES (226)..(226): Selenocysteine
  MOD_RES (230)..(230): Selenocysteine
  MOD_RES (260)..(260): Selenocysteine
  MOD_RES (280)..(280): Selenocysteine
  MOD_RES (284)..(284): Selenocysteine
  MOD_RES (286)..(286): Selenocysteine
  MOD_RES (291)..(291): Selenocysteine
  MOD_RES (329)..(329): Selenocysteine
  MOD_RES (332)..(332): Selenocysteine
  MOD_RES (352)..(352): Selenocysteine
  MOD_RES (394)..(394): Selenocysteine
  MOD_RES (434)..(434): Selenocysteine
  MOD_RES (449)..(449): Selenocysteine
  MOD_RES (461)..(461): Selenocysteine
  MOD_RES (467)..(467): Selenocysteine
  MOD_RES (478)..(478): Selenocysteine
  MOD_RES (482)..(482): Selenocysteine
  MOD_RES (522)..(522): Selenocysteine
  MOD_RES (535)..(535): Selenocysteine
  MOD_RES (551)..(551): Selenocysteine
  MOD_RES (580)..(580): Selenocysteine
  MOD_RES (585)..(585): Selenocysteine
  MOD_RES (626)..(626): Selenocysteine
  MOD_RES (636)..(636): Selenocysteine
  MOD_RES (657)..(658): Selenocysteine
  MOD_RES (661)..(661): Selenocysteine
  MOD_RES (664)..(664): Selenocysteine
  MOD_RES (682)..(682): Selenocysteine
  MOD_RES (698)..(698): Selenocysteine
  MOD_RES (706)..(706): Selenocysteine
  MOD_RES (712)..(712): Selenocysteine
  MOD_RES (717)..(717): Selenocysteine
  MOD_RES (775)..(775): Selenocysteine
  MOD_RES (778)..(778): Selenocysteine
MVQHFKPQIFGDRKPVYDGKKNIYXVXALPIGNERVDFEVXIPGEGKDRIFKVSIKWLAIVSWRMLHEALVSGQIPVPLESVQALDVAMRHLASMRYXPVGRSFFSPPEGYYHPLGGGREVWFGFHQSVRPAMWKMMLNIDVSAXAFYKAQPVIEFMCEVLDIRNIDEQPKPLXDSQRVRFXKEIKGLKVEVXHCGQMKRKYRVCNVXRRPASHQXFPLQLESGQXVECXVAQYFKQKYNLQLKYPHLPCLQVGQEQKHXYLPLEVCNIVAGQRCIKKLXDNQXSXMIKAXARSAPDRQEEISRLMKNASYNLDPYIQEFGIKVKDDMXEVXGRVLPAPILQYGGRNRAIAXPNQGVWDMRGKQFYNGIEIKVWAIACFAPQKQCREEVLKNFXDQLRKISKDAGMPIQGQPCFCKYAQGADSVEPMFRHLKNXYSGLQLIIVILPGKXPVYAEVKRVGDXLLGMAXQCVQVKNVVKXSPQXLSNLCLKINVKLGGINNILVPHQRSAVFQQPVIFLGADVXHPPAGDGKKPSIXAVVGSMDAHPSRYCAXVRVQRPRQEIIEDLSYMVRELLIQFYKSXRFKPXRIIFYRDGVPEGQLPQILHYELLAIRDACIKLEKDYQPGIXYIVVQKRHHXRLFCADKNERIGKSGNIPAGXXVDXNIXHPFEFDFYLCSHAGIQGXSRPSHYYVLWDDNRFXADELQILXYQLCHXYVRCXRSVSIPAPAYYARLVAFRARYHLVDKEHDSGEGSHISGQSNGRDPQALAKAVQVHQDXLRXMYFA

SEQ ID NO: 1970 - protein, 133 aa, Homo sapiens
  MOD_RES (1)..(1): Any amino acid
  MOD_RES (23)..(23): Selenocysteine
  MOD_RES (25)..(25): Selenocysteine
  MOD_RES (39)..(39): Selenocysteine
  MOD_RES (132)..(132): Selenocysteine
XHFKPQIFGDRKPVYDGKKNIYXVXALPIGNERVDFEVXIPGEGKDRIFKVSIKWLAIVSWRMLHEALVSGQIPVPLESVQALDVAMRHLASMRPGLLRAQDASQGGGLCPRDQFSACPCQVHPCGPLLLLXA

SEQ ID NO: 1971 - protein, 36 aa, Homo sapiens
MDIPKIDIYHYELDIKPEKCPRRVNREIVEHMVQHF

SEQ ID NO: 1972 - protein, 825 aa, Homo sapiens
  MOD_RES (33)..(33): Selenocysteine
  MOD_RES (37)..(37): Selenocysteine
  MOD_RES (84)..(84): Selenocysteine
  MOD_RES (102)..(102): Selenocysteine
  MOD_RES (118)..(118): Selenocysteine
  MOD_RES (158)..(158): Selenocysteine
  MOD_RES (175)..(175): Selenocysteine
  MOD_RES (183)..(183): Selenocysteine
  MOD_RES (222)..(222): Selenocysteine
  MOD_RES (251)..(251): Selenocysteine
  MOD_RES (259)..(259): Selenocysteine
  MOD_RES (270)..(270): Selenocysteine
  MOD_RES (285)..(285): Selenocysteine
  MOD_RES (293)..(293): Selenocysteine
  MOD_RES (303)..(303): Selenocysteine
  MOD_RES (307)..(307): Selenocysteine
  MOD_RES (337)..(337): Selenocysteine
  MOD_RES (357)..(357): Selenocysteine
  MOD_RES (361)..(361): Selenocysteine
  MOD_RES (363)..(363): Selenocysteine
  MOD_RES (368)..(368): Selenocysteine
  MOD_RES (390)..(390): Selenocysteine
  MOD_RES (406)..(406): Selenocysteine
  MOD_RES (409)..(409): Selenocysteine
  MOD_RES (429)..(429): Selenocysteine
  MOD_RES (444)..(444): Selenocysteine
  MOD_RES (463)..(463): Selenocysteine
  MOD_RES (471)..(471): Selenocysteine
  MOD_RES (511)..(511): Selenocysteine
  MOD_RES (526)..(526): Selenocysteine
  MOD_RES (538)..(538): Selenocysteine
  MOD_RES (544)..(544): Selenocysteine
  MOD_RES (555)..(556): Selenocysteine
  MOD_RES (559)..(559): Selenocysteine
  MOD_RES (599)..(599): Selenocysteine
  MOD_RES (628)..(628): Selenocysteine
  MOD_RES (657)..(657): Selenocysteine
  MOD_RES (662)..(662): Selenocysteine
  MOD_RES (703)..(703): Selenocysteine
  MOD_RES (713)..(713): Selenocysteine
  MOD_RES (718)..(718): Selenocysteine
  MOD_RES (725)..(725): Selenocysteine
  MOD_RES (749)..(749): Selenocysteine
  MOD_RES (755)..(755): Selenocysteine
  MOD_RES (760)..(760): Selenocysteine
  MOD_RES (796)..(796): Selenocysteine
  MOD_RES (818)..(818): Selenocysteine
  MOD_RES (821)..(821): Selenocysteine
MYSGAGPALAPPAPPPPIQGYAFKPPPRPDFGXSGRXIKLQANFFEMDIPKIDIYHYELDIKPEKCPRRVNREIVEHMVQHFKXQIFGDRKPVFDGRKNLYXAMPLPIGRDKVELEVXLPGEGKDRIFKVSIKWVSCVSLQALHDALSGRLPSVPFEXIQALDVVMRHLPSMRYXPVGRSFFXASEGCSNPLGGGREVWFGFHQSVRPSLWKMMLNIDVSAXAFYKAQPVIEFVCEVLDFKSIEEQQKPLXDSQRVKFXKEIKGLKVEIXHCGQMKRKYRVCNVXRRPASHQXFPLQQESGQXVECXVAQYFKDRHKLVLRYPHLPCLQVGQEQKHXYLPLEVCNIVAGQRCIKKLXDNQXSXMIRAXARSAPDRQEEISKLMRSASFNXDPYVREFGIMVKDEMXDVXGRVLQPPSILYGGRNKAIAXPVQGVWDMRNKQFHXGIEIKVWAIACFAPQRQCXEVHLKSFXEQLRKISRDAGMPIQGQPCFCKYAQGADSVEPMFRHLKNXYAGLQLVVVILPGKXPVYAEVKRVGDXVLGMAXQCVQMKNVQRXXPQXLSNLCLKINVKLGGVNNILLPQGRPPVFQQPVIFLGADVXHPPAGDGKKPSIAAVVGSMDAHPNRYCAXVRVQQHRQEIIQDLAAMVRELLIQFYKSXRFKPXRIIFYRDGVSEGQFQQVLHHELLAIREACIKLEKDYQPGIXFIVVQKRHHXRLFCXDKNERGXSRPSHYHVLWDDNRFSSDELQILXYQLCHXYVRCXRSVSIPAPAYYAHLVAFRARYHLVDKEHDSAEGSHXSGQSNGRDHQALAKAVQVHQDXLRXMYFA

SEQ ID NO: 1973 - protein, 859 aa, Homo sapiens
  MOD_RES (33)..(33): Selenocysteine
  MOD_RES (37)..(37): Selenocysteine
  MOD_RES (84)..(84): Selenocysteine
  MOD_RES (102)..(102): Selenocysteine
  MOD_RES (118)..(118): Selenocysteine
  MOD_RES (158)..(158): Selenocysteine
  MOD_RES (175)..(175): Selenocysteine
  MOD_RES (183)..(183): Selenocysteine
  MOD_RES (222)..(222): Selenocysteine
  MOD_RES (251)..(251): Selenocysteine
  MOD_RES (259)..(259): Selenocysteine
  MOD_RES (270)..(270): Selenocysteine
  MOD_RES (285)..(285): Selenocysteine
  MOD_RES (293)..(293): Selenocysteine
  MOD_RES (303)..(303): Selenocysteine
  MOD_RES (307)..(307): Selenocysteine
  MOD_RES (337)..(337): Selenocysteine
  MOD_RES (357)..(357): Selenocysteine
  MOD_RES (361)..(361): Selenocysteine
  MOD_RES (363)..(363): Selenocysteine
  MOD_RES (368)..(368): Selenocysteine
  MOD_RES (390)..(390): Selenocysteine
  MOD_RES (406)..(406): Selenocysteine
  MOD_RES (409)..(409): Selenocysteine
  MOD_RES (429)..(429): Selenocysteine
  MOD_RES (444)..(444): Selenocysteine
  MOD_RES (463)..(463): Selenocysteine
  MOD_RES (471)..(471): Selenocysteine
  MOD_RES (511)..(511): Selenocysteine
  MOD_RES (526)..(526): Selenocysteine
  MOD_RES (538)..(538): Selenocysteine
  MOD_RES (544)..(544): Selenocysteine
  MOD_RES (555)..(556): Selenocysteine
  MOD_RES (559)..(559): Selenocysteine
  MOD_RES (599)..(599): Selenocysteine
  MOD_RES (628)..(628): Selenocysteine
  MOD_RES (657)..(657): Selenocysteine
  MOD_RES (662)..(662): Selenocysteine
  MOD_RES (703)..(703): Selenocysteine
  MOD_RES (713)..(713): Selenocysteine
  MOD_RES (718)..(718): Selenocysteine
  MOD_RES (734)..(735): Selenocysteine
  MOD_RES (738)..(738): Selenocysteine
  MOD_RES (741)..(741): Selenocysteine
  MOD_RES (744)..(744): Selenocysteine
  MOD_RES (759)..(759): Selenocysteine
  MOD_RES (783)..(783): Selenocysteine
  MOD_RES (789)..(789): Selenocysteine
  MOD_RES (794)..(794): Selenocysteine
  MOD_RES (830)..(830): Selenocysteine
  MOD_RES (852)..(852): Selenocysteine
  MOD_RES (855)..(855): Selenocysteine
MYSGAGPALAPPAPPPPIQGYAFKPPPRPDFGXSGRXIKLQANFFEMDIPKIDIYHYELDIKPEKCPRRVNREIVEHMVQHFKXQIFGDRKPVFDGRKNLYXAMPLPIGRDKVELEVXLPGEGKDRIFKVSIKWVSCVSLQALHDALSGRLPSVPFEXIQALDVVMRHLPSMRYXPVGRSFFXASEGCSNPLGGGREVWFGFHQSVRPSLWKMMLNIDVSAXAFYKAQPVIEFVCEVLDFKSIEEQQKPLXDSQRVKFXKEIKGLKVEIXHCGQMKRKYRVCNVXRRPASHQXFPLQQESGQXVECXVAQYFKDRHKLVLRYPHLPCLQVGQEQKHXYLPLEVCNIVAGQRCIKKLXDNQXSXMIRAXARSAPDRQEEISKLMRSASFNXDPYVREFGIMVKDEMXDVXGRVLQPPSILYGGRNKAIAXPVQGVWDMRNKQFHXGIEIKVWAIACFAPQRQCXEVHLKSFXEQLRKISRDAGMPIQGQPCFCKYAQGADSVEPMFRHLKNXYAGLQLVVVILPGKXPVYAEVKRVGDXVLGMAXQCVQMKNVQRXXPQXLSNLCLKINVKLGGVNNILLPQGRPPVFQQPVIFLGADVXHPPAGDGKKPSIAAVVGSMDAHPNRYCAXVRVQQHRQEIIQDLAAMVRELLIQFYKSXRFKPXRIIFYRDGVSEGQFQQVLHHELLAIREACIKLEKDYQPGIXFIVVQKRHHXRLFCXDKNERVGKSGNIPAGXXVDXKIXHPXEFDFYLCSHAGIQGXSRPSHYHVLWDDNRFSSDELQILXYQLCHXYVRCXRSVSIPAPAYYAHLVAFRARYHLVDKEHDSAEGSHXSGQSNGRDHQALAKAVQVHQDXLRXMYFA

SEQ ID NO: 1974 - protein, 73 aa, Homo sapiens
  MOD_RES (13)..(13): Selenocysteine
  MOD_RES (17)..(17): Selenocysteine
  MOD_RES (31)..(31): Selenocysteine
  MOD_RES (37)..(37): Selenocysteine
  MOD_RES (47)..(47): Selenocysteine
MYSGAGPGKSWNXWSSXLKHRSLGIGSPCLXAGRIYXQPCPFRLGGXRWSWRSRCQEKARIASSRCPSSGCPA

SEQ ID NO: 1975 - protein, 626 aa, Homo sapiens
  MOD_RES (18)..(18): Selenocysteine
  MOD_RES (26)..(26): Selenocysteine
  MOD_RES (37)..(37): Selenocysteine
  MOD_RES (41)..(41): Selenocysteine
  MOD_RES (52)..(52): Selenocysteine
  MOD_RES (60)..(60): Selenocysteine
  MOD_RES (70)..(70): Selenocysteine
  MOD_RES (74)..(74): Selenocysteine
  MOD_RES (84)..(84): Selenocysteine
  MOD_RES (104)..(104): Selenocysteine
  MOD_RES (124)..(124): Selenocysteine
  MOD_RES (128)..(128): Selenocysteine
  MOD_RES (130)..(130): Selenocysteine
  MOD_RES (135)..(135): Selenocysteine
  MOD_RES (157)..(157): Selenocysteine
  MOD_RES (176)..(176): Selenocysteine
  MOD_RES (193)..(193): Selenocysteine
  MOD_RES (196)..(196): Selenocysteine
  MOD_RES (211)..(211): Selenocysteine
  MOD_RES (225)..(225): Selenocysteine
  MOD_RES (238)..(238): Selenocysteine
  MOD_RES (278)..(278): Selenocysteine
  MOD_RES (293)..(293): Selenocysteine
  MOD_RES (305)..(305): Selenocysteine
  MOD_RES (311)..(311): Selenocysteine
  MOD_RES (322)..(322): Selenocysteine
  MOD_RES (326)..(326): Selenocysteine
  MOD_RES (366)..(366): Selenocysteine
  MOD_RES (395)..(395): Selenocysteine
  MOD_RES (424)..(424): Selenocysteine
  MOD_RES (429)..(429): Selenocysteine
  MOD_RES (470)..(470): Selenocysteine
  MOD_RES (480)..(480): Selenocysteine
  MOD_RES (488)..(488): Selenocysteine
  MOD_RES (501)..(502): Selenocysteine
  MOD_RES (505)..(505): Selenocysteine
  MOD_RES (508)..(508): Selenocysteine
  MOD_RES (526)..(526): Selenocysteine
  MOD_RES (542)..(542): Selenocysteine
  MOD_RES (550)..(550): Selenocysteine
  MOD_RES (556)..(556): Selenocysteine
  MOD_RES (561)..(561): Selenocysteine
  MOD_RES (619)..(619): Selenocysteine
  MOD_RES (622)..(622): Selenocysteine
MCEVLDIHNIDEQPRPLXDSHRVKFXKEIKGLKVEVXHCGXMRRKYRVCNVXRRPASHQXFPLQLENGQXVERXVAQYFREKYXLQLKYPHLPCLQVGQEQKHXYLPLEVCNIVAGQRCIKKLXDNQXSXMIKAXARSAPDRQEEISRLVRSANYEXDPFVQEFQFKVRDEMAHVXGRVLPAPMLQYGGRNRXVAXPSHGVWDMRGKQFHXGVEIKMWAIACFAXQRQCREEILKGFXDQLRKISKDAGMPIQGQPCFCKYAQGADSVEPMFRHLKNXYSGLQLIIVILPGKXPVYAEVKRVGDXLLGMAXQCVQVKNVIKXSPQXLSNLCLKINVKLGGINNILVPHQRPSVFQQPVIFLGADVXHPPAGDGKKPSIAAVVGSMDAHPSRYCAXVRVQRPRQEIIQDLASMVRELLIQFYKSXRFKPXRIIFYRDGVSEGQFRQVLYYELLAIREACISLEKDYQPGIXYIVVQKRHHXRLFCADRXERVGRSGNIPAGXXVDXDIXHPYEFDFYLCSHAGIQGXSRPSHYHVLWDDNCFXADELQLLXYQLCHXYVRCXRSVSIPAPAYYAHLVAFRARYHLVDKEHDSAEGSHVSGQSNGRDPQALAKAVQIHQDXLRXMYFA

SEQ ID NO: 1976 - protein, 64 aa, Homo sapiens
  MOD_RES (25)..(25): Selenocysteine
MEIGSAGPAGAQPLLMVPRRPGYGXMGKPIKLLANCFQVEIPKIDVYLYEVDIKPDKCPRRVNR

SEQ ID NO: 1977 - protein, 229 aa, Homo sapiens
  MOD_RES (25)..(25): Selenocysteine
  MOD_RES (77)..(77): Selenocysteine
  MOD_RES (94)..(94): Selenocysteine
  MOD_RES (102)..(103): Selenocysteine
  MOD_RES (110)..(110): Selenocysteine
  MOD_RES (141)..(141): Selenocysteine
  MOD_RES (144)..(144): Selenocysteine
  MOD_RES (157)..(157): Selenocysteine
  MOD_RES (176)..(176): Selenocysteine
MEIGSAGPAGAQPLLMVPRRPGYGXMGKPIKLLANCFQVEIPKIDVYLYEVDIKPDKCPRRVNREVVDSMVQHFKVXIFGDRRPVYDGKRSLYXANPLPVAXXGVDLDVXLPGEGGKDRPFKVSIKFVSRVSWHLLHEVLXGRXLPEPLELDKPISXNPVHAVDVVLRHLPSMKYXPVGRSFFSAPEGYDHPLGGGREVWFGFHQSVRPAMWKMMLNIDERDLWQQCGE

SEQ ID NO: 1978 - protein, 860 aa, Homo sapiens
  MOD_RES (25)..(25): Selenocysteine
  MOD_RES (77)..(77): Selenocysteine
  MOD_RES (94)..(94): Selenocysteine
  MOD_RES (102)..(103): Selenocysteine
  MOD_RES (110)..(110): Selenocysteine
  MOD_RES (141)..(141): Selenocysteine
  MOD_RES (144)..(144): Selenocysteine
  MOD_RES (157)..(157): Selenocysteine
  MOD_RES (176)..(176): Selenocysteine
  MOD_RES (223)..(223): Selenocysteine
  MOD_RES (252)..(252): Selenocysteine
  MOD_RES (260)..(260): Selenocysteine
  MOD_RES (271)..(271): Selenocysteine
  MOD_RES (275)..(275): Selenocysteine
  MOD_RES (286)..(286): Selenocysteine
  MOD_RES (294)..(294): Selenocysteine
  MOD_RES (304)..(304): Selenocysteine
  MOD_RES (308)..(308): Selenocysteine
  MOD_RES (318)..(318): Selenocysteine
  MOD_RES (338)..(338): Selenocysteine
  MOD_RES (358)..(358): Selenocysteine
  MOD_RES (362)..(362): Selenocysteine
  MOD_RES (364)..(364): Selenocysteine
  MOD_RES (369)..(369): Selenocysteine
  MOD_RES (391)..(391): Selenocysteine
  MOD_RES (410)..(410): Selenocysteine
  MOD_RES (427)..(427): Selenocysteine
  MOD_RES (430)..(430): Selenocysteine
  MOD_RES (445)..(445): Selenocysteine
  MOD_RES (459)..(459): Selenocysteine
  MOD_RES (472)..(472): Selenocysteine
  MOD_RES (512)..(512): Selenocysteine
  MOD_RES (527)..(527): Selenocysteine
  MOD_RES (539)..(539): Selenocysteine
  MOD_RES (545)..(545): Selenocysteine
  MOD_RES (556)..(556): Selenocysteine
  MOD_RES (560)..(560): Selenocysteine
  MOD_RES (600)..(600): Selenocysteine
  MOD_RES (629)..(629): Selenocysteine
  MOD_RES (658)..(658): Selenocysteine
  MOD_RES (663)..(663): Selenocysteine
  MOD_RES (704)..(704): Selenocysteine
  MOD_RES (714)..(714): Selenocysteine
  MOD_RES (722)..(722): Selenocysteine
  MOD_RES (735)..(736): Selenocysteine
  MOD_RES (739)..(739): Selenocysteine
  MOD_RES (742)..(742): Selenocysteine
  MOD_RES (760)..(760): Selenocysteine
  MOD_RES (776)..(776): Selenocysteine
  MOD_RES (784)..(784): Selenocysteine
  MOD_RES (790)..(790): Selenocysteine
  MOD_RES (795)..(795): Selenocysteine
  MOD_RES (853)..(853): Selenocysteine
  MOD_RES (856)..(856): Selenocysteine
MEIGSAGPAGAQPLLMVPRRPGYGXMGKPIKLLANCFQVEIPKIDVYLYEVDIKPDKCPRRVNREVVDSMVQHFKVXIFGDRRPVYDGKRSLYXANPLPVAXXGVDLDVXLPGEGGKDRPFKVSIKFVSRVSWHLLHEVLXGRXLPEPLELDKPISXNPVHAVDVVLRHLPSMKYXPVGRSFFSAPEGYDHPLGGGREVWFGFHQSVRPAMWKMMLNIDVSAXAFYKAQPVIQFMCEVLDIHNIDEQPRPLXDSHRVKFXKEIKGLKVEVXHCGXMRRKYRVCNVXRRPASHQXFPLQLENGQXVERXVAQYFREKYXLQLKYPHLPCLQVGQEQKHXYLPLEVCNIVAGQRCIKKLXDNQXSXMIKAXARSAPDRQEEISRLVRSANYEXDPFVQEFQFKVRDEMAHVXGRVLPAPMLQYGGRNRXVAXPSHGVWDMRGKQFHXGVEIKMWAIACFAXQRQCREEILKGFXDQLRKISKDAGMPIQGQPCFCKYAQGADSVEPMFRHLKNXYSGLQLIIVILPGKXPVYAEVKRVGDXLLGMAXQCVQVKNVIKXSPQXLSNLCLKINVKLGGINNILVPHQRPSVFQQPVIFLGADVXHPPAGDGKKPSIAAVVGSMDAHPSRYCAXVRVQRPRQEIIQDLASMVRELLIQFYKSXRFKPXRIIFYRDGVSEGQFRQVLYYELLAIREACISLEKDYQPGIXYIVVQKRHHXRLFCADRXERVGRSGNIPAGXXVDXDIXHPYEFDFYLCSHAGIQGXSRPSHYHVLWDDNCFXADELQLLXYQLCHXYVRCXRSVSIPAPAYYAHLVAFRARYHLVDKEHDSAEGSHVSGQSNGRDPQALAKAVQIHQDXLRXMYFA

SEQ ID NO: 1979 - protein, 861 aa, Homo sapiens
  MOD_RES (23)..(23): Selenocysteine
  MOD_RES (67)..(67): Selenocysteine
  MOD_RES (92)..(92): Selenocysteine
  MOD_RES (108)..(108): Selenocysteine
  MOD_RES (117)..(117): Selenocysteine
  MOD_RES (156)..(156): Selenocysteine
  MOD_RES (165)..(165): Selenocysteine
  MOD_RES (212)..(212): Selenocysteine
  MOD_RES (237)..(237): Selenocysteine
  MOD_RES (241)..(241): Selenocysteine
  MOD_RES (249)..(249): Selenocysteine
  MOD_RES (260)..(260): Selenocysteine
  MOD_RES (275)..(275): Selenocysteine
  MOD_RES (283)..(283): Selenocysteine
  MOD_RES (297)..(297): Selenocysteine
  MOD_RES (327)..(327): Selenocysteine
  MOD_RES (347)..(347): Selenocysteine
  MOD_RES (351)..(351): Selenocysteine
  MOD_RES (353)..(353): Selenocysteine
  MOD_RES (358)..(358): Selenocysteine
  MOD_RES (398)..(398): Selenocysteine
  MOD_RES (401)..(401): Selenocysteine
  MOD_RES (418)..(418): Selenocysteine
  MOD_RES (421)..(421): Selenocysteine
  MOD_RES (463)..(463): Selenocysteine
  MOD_RES (503)..(503): Selenocysteine
  MOD_RES (518)..(518): Selenocysteine
  MOD_RES (530)..(530): Selenocysteine
  MOD_RES (536)..(536): Selenocysteine
  MOD_RES (547)..(547): Selenocysteine
  MOD_RES (551)..(551): Selenocysteine
  MOD_RES (591)..(591): Selenocysteine
  MOD_RES (620)..(620): Selenocysteine
  MOD_RES (625)..(625): Selenocysteine
  MOD_RES (645)..(645): Selenocysteine
  MOD_RES (659)..(659): Selenocysteine
  MOD_RES (664)..(664): Selenocysteine
  MOD_RES (705)..(705): Selenocysteine
  MOD_RES (715)..(715): Selenocysteine
  MOD_RES (723)..(723): Selenocysteine
  MOD_RES (736)..(737): Selenocysteine
  MOD_RES (741)..(741): Selenocysteine
  MOD_RES (743)..(743): Selenocysteine
  MOD_RES (761)..(761): Selenocysteine
  MOD_RES (777)..(777): Selenocysteine
  MOD_RES (785)..(785): Selenocysteine
  MOD_RES (791)..(791): Selenocysteine
  MOD_RES (796)..(796): Selenocysteine
  MOD_RES (854)..(854): Selenocysteine
  MOD_RES (857)..(857): Selenocysteine
MEALGPGPPASLFQPPRRPGLGXVGKPIRLLANHFQVQIPKIDVYHYDVDIKPEKRPRRVNREVVDXMVRHFKMQIFGDRQPGYDGKRNMYXAHPLPIGRDRVDMEVXLPGEGKDQXFKVSVQWVSVVSLQLLLEALAGHLNEVPDDSVQALDVIXRHLPSMRYXPVGRSFFSPPEGYYHPLGGGREVWFGFHQSVRPAMWNMMLNIDVSAXAFYRAQPIIEFMCEVLDIQNINEQXKPLXDSQRVKFXKEIRGLKVEVXHCGQMKRKYRVCNVXRRPASHQXFPLQLENGQAMECXVAQYFKQKYSLQLKYPHLPCLQVGQEQKHXYLPLEVCNIVAGQRCIKKLXDNQXSXMIKAXARSAPDRQEEISRLVKSNSMVGGPDPYLKEFGIVVHNEMXELXGRVLPAPMLQYGGRNKXVAXPNQGVWDMRGKQFYAGIEIKVWAVACFAPQKQCREDLLKSFXDQLRKISKDAGMPIQGQPCFCKYAQGADSVEPMFKHLKMXYVGLQLIVVILPGKXPVYAEVKRVGDXLLGMAXQCVQVKNVVKXSPQXLSNLCLKINAKLGGINNVLVPHQRPSVFQQPVIFLGADVXHPPAGDGKKPSIAAVVGSMDGHPSRYCAXVRVQXSRQEISQELLYSQEVIQDLXNMVRELLIQFYKSXRFKPXRIIYYRGGVSEGQMKQVAWPELIAIRKACISLEEDYRPGIXYIVVQKRHHXRLFCADKXERVGKSGNVPAGXXVDSXIXHPSEFDFYLCSHAGIQGXSRPSHYQVLWDDNCFXADELQLLXYQLCHXYVRCXRSVSIPAPAYYARLVAFRARYHLVDKDHDSAEGSHVSGQSNGRDPQALAKAVQIHHDXQHXMYFA

SEQ ID NO: 1980 - protein, 283 aa, Homo sapiens
  MOD_RES (24)..(24): Selenocysteine
  MOD_RES (152)..(152): Selenocysteine
  MOD_RES (165)..(165): Selenocysteine
  MOD_RES (168)..(168): Selenocysteine
  MOD_RES (180)..(180): Selenocysteine
  MOD_RES (225)..(225): Selenocysteine
  MOD_RES (239)..(239): Selenocysteine
  MOD_RES (243)..(243): Selenocysteine
  MOD_RES (260)..(260): Selenocysteine
  MOD_RES (267)..(267): Selenocysteine
MDLWPGAWMLLLLLFLLLLFLLPXLWFCSPSAKYFFKMAFYNGWILFLAVLAIPVCAVRGRNVENMKILRLMLLHIKYLYGIRVEVRGAHHFPPSQPYVVVSNHQSSLDLLGMMEVLPGRCVPIAKRELLWAGSAGLACWLAGVIFIDRKRXGDAISVMSEVAQXLLXQDVRVWVFPEGXRNHNGSMLPFKRGAFHLAVQAQVPIVPIVMSSYQDFYCKKERRFXSGQCQVRVLPPVPXEGLXPDDVPALADRVRHSMLXVFREISXDGRGGGDYLKKPGGGG

SEQ ID NO: 1981 - protein, 278 aa, Homo sapiens
  MOD_RES (39)..(39): Selenocysteine
  MOD_RES (56)..(56): Selenocysteine
  MOD_RES (148)..(148): Selenocysteine
  MOD_RES (151)..(151): Selenocysteine
  MOD_RES (174)..(174): Selenocysteine
  MOD_RES (213)..(213): Selenocysteine
  MOD_RES (219)..(219): Selenocysteine
  MOD_RES (222)..(222): Selenocysteine
  MOD_RES (224)..(224): Selenocysteine
  MOD_RES (233)..(233): Selenocysteine
  MOD_RES (237)..(237): Selenocysteine
  MOD_RES (247)..(247): Selenocysteine
  MOD_RES (254)..(255): Selenocysteine
  MOD_RES (262)..(262): Selenocysteine
  MOD_RES (269)..(269): Selenocysteine
MELWPCLAAALLLLLLLVQLSRAAEFYAKVALYCALCFXVSAVASLVCLLRHGGRXVENMSIIGWFVRSFKYFYGLRFEVRDPRRLQEARPCVIVSNHQSILDMMGLMEVLPERCVQIAKRELLFLGPVGLIMYLGGVFFINRQRSSXAMXVMADLGERMVRENLKVWIYPEGXRNDNGDLLPFKKGAFYLAVQAQVPIVPVVYSSFSSFYNXKKKFFXSGXVXVQVLEAIPXSGLXAADVPALVDXCHRAMRXXFLHISKXPQENGAXAGSGVQPAQ

SEQ ID NO: 1982 - protein, 246 aa, Homo sapiens
  MOD_RES (39)..(39): Selenocysteine
  MOD_RES (56)..(56): Selenocysteine
  MOD_RES (148)..(148): Selenocysteine
  MOD_RES (151)..(151): Selenocysteine
  MOD_RES (181)..(181): Selenocysteine
  MOD_RES (187)..(187): Selenocysteine
  MOD_RES (190)..(190): Selenocysteine
  MOD_RES (192)..(192): Selenocysteine
  MOD_RES (201)..(201): Selenocysteine
  MOD_RES (205)..(205): Selenocysteine
  MOD_RES (215)..(215): Selenocysteine
  MOD_RES (222)..(223): Selenocysteine
  MOD_RES (230)..(230): Selenocysteine
  MOD_RES (237)..(237): Selenocysteine
MELWPCLAAALLLLLLLVQLSRAAEFYAKVALYCALCFXVSAVASLVCLLRHGGRXVENMSIIGWFVRSFKYFYGLRFEVRDPRRLQEARPCVIVSNHQSILDMMGLMEVLPERCVQIAKRELLFLGPVGLIMYLGGVFFINRQRSSXAMXVMADLGERMVRENVPIVPVVYSSFSSFYNXKKKFFXSGXVXVQVLEAIPXSGLXAADVPALVDXCHRAMRXXFLHISKXPQENGAXAGSGVQPAQ

SEQ ID NO: 1983 - protein, 131 aa, Homo sapiens
  MOD_RES (18)..(18): Selenocysteine
  MOD_RES (23)..(24): Selenocysteine
  MOD_RES (33)..(33): Selenocysteine
  MOD_RES (43)..(43): Selenocysteine
  MOD_RES (55)..(55): Selenocysteine
  MOD_RES (57)..(57): Selenocysteine
  MOD_RES (67)..(67): Selenocysteine
  MOD_RES (113)..(114): Selenocysteine
MEKIPVSAFLLLVALSYXLARDXXVKPGAKKDXKDSRPKLPQXLSRGWGDQLIWXQXYEEALYKSKXSNKPLMIIHHLDECPHSQALKKVFAENKEIQKLAEQFVLLNLVYEXXDKHLSPDGQYVPRIMFV

SEQ ID NO: 1984 - protein, 188 aa, Homo sapiens
  MOD_RES (18)..(18): Selenocysteine
  MOD_RES (23)..(24): Selenocysteine
  MOD_RES (33)..(33): Selenocysteine
  MOD_RES (43)..(43): Selenocysteine
  MOD_RES (55)..(55): Selenocysteine
  MOD_RES (57)..(57): Selenocysteine
  MOD_RES (67)..(67): Selenocysteine
  MOD_RES (113)..(114): Selenocysteine
  MOD_RES (136)..(136): Selenocysteine
  MOD_RES (142)..(142): Selenocysteine
  MOD_RES (157)..(157): Selenocysteine
  MOD_RES (182)..(182): Selenocysteine
MEKIPVSAFLLLVALSYXLARDXXVKPGAKKDXKDSRPKLPQXLSRGWGDQLIWXQXYEEALYKSKXSNKPLMIIHHLDECPHSQALKKVFAENKEIQKLAEQFVLLNLVYEXXDKHLSPDGQYVPRIMFVDPSLXVRADIXGRYSNRLYAYEPADXALCKCDLQFGCCPRVEHLYCCSDGXRGCMVR

SEQ ID NO: 1985 - protein, 175 aa, Homo sapiens
  MOD_RES (18)..(18): Selenocysteine
  MOD_RES (23)..(24): Selenocysteine
  MOD_RES (33)..(33): Selenocysteine
  MOD_RES (43)..(43): Selenocysteine
  MOD_RES (55)..(55): Selenocysteine
  MOD_RES (57)..(57): Selenocysteine
  MOD_RES (67)..(67): Selenocysteine
  MOD_RES (113)..(114): Selenocysteine
  MOD_RES (136)..(136): Selenocysteine
  MOD_RES (142)..(142): Selenocysteine
  MOD_RES (157)..(157): Selenocysteine
  MOD_RES (173)..(173): Selenocysteine
MEKIPVSAFLLLVALSYXLARDXXVKPGAKKDXKDSRPKLPQXLSRGWGDQLIWXQXYEEALYKSKXSNKPLMIIHHLDECPHSQALKKVFAENKEIQKLAEQFVLLNLVYEXXDKHLSPDGQYVPRIMFVDPSLXVRADIXGRYSNRLYAYEPADXALLLDNMKKALKLLKXEL

SEQ ID NO: 1986 - protein, 119 aa, Homo sapiens
  MOD_RES (43)..(44): Selenocysteine
  MOD_RES (66)..(66): Selenocysteine
  MOD_RES (72)..(72): Selenocysteine
  MOD_RES (87)..(87): Selenocysteine
  MOD_RES (112)..(112): Selenocysteine
PLMIIHHLDECPHSQALKKVFAENKEIQKLAEQFVLLNLVYEXXDKHLSPDGQYVPRIMFVDPSLXVRADIXGRYSNRLYAYEPADXALCKCDLQFGCCPRVEHLYCCSDGXRGCMVSA

SEQ ID NO: 1987 - protein, 2045 aa, Homo sapiens
  MOD_RES (30)..(30): Selenocysteine
  MOD_RES (48)..(48): Selenocysteine
  MOD_RES (50)..(50): Selenocysteine
  MOD_RES (63)..(63): Selenocysteine
  MOD_RES (109)..(109): Selenocysteine
  MOD_RES (112)..(112): Selenocysteine
  MOD_RES (142)..(142): Selenocysteine
  MOD_RES (159)..(159): Selenocysteine
  MOD_RES (162)..(162): Selenocysteine
  MOD_RES (167)..(167): Selenocysteine
  MOD_RES (216)..(216): Selenocysteine
  MOD_RES (252)..(252): Selenocysteine
  MOD_RES (258)..(258): Selenocysteine
  MOD_RES (267)..(267): Selenocysteine
  MOD_RES (275)..(275): Selenocysteine
  MOD_RES (283)..(283): Selenocysteine
  MOD_RES (337)..(337): Selenocysteine
  MOD_RES (363)..(363): Selenocysteine
  MOD_RES (420)..(420): Selenocysteine
  MOD_RES (435)..(435): Selenocysteine
  MOD_RES (478)..(478): Selenocysteine
  MOD_RES (508)..(508): Selenocysteine
  MOD_RES (518)..(518): Selenocysteine
  MOD_RES (521)..(521): Selenocysteine
  MOD_RES (550)..(550): Selenocysteine
  MOD_RES (573)..(573): Selenocysteine
  MOD_RES (586)..(586): Selenocysteine
  MOD_RES (601)..(601): Selenocysteine
  MOD_RES (638)..(638): Selenocysteine
  MOD_RES (654)..(654): Selenocysteine
  MOD_RES (724)..(724): Selenocysteine
  MOD_RES (727)..(727): Selenocysteine
  MOD_RES (754)..(754): Selenocysteine
  MOD_RES (769)..(769): Selenocysteine
  MOD_RES (779)..(779): Selenocysteine
  MOD_RES (804)..(804): Selenocysteine
  MOD_RES (809)..(809): Selenocysteine
  MOD_RES (838)..(838): Selenocysteine
  MOD_RES (845)..(845): Selenocysteine
  MOD_RES (863)..(863): Selenocysteine
  MOD_RES (900)..(900): Selenocysteine
  MOD_RES (927)..(927): Selenocysteine
  MOD_RES (934)..(934): Selenocysteine
  MOD_RES (943)..(943): Selenocysteine
  MOD_RES (952)..(952): Selenocysteine
  MOD_RES (977)..(977): Selenocysteine
  MOD_RES (980)..(980): Selenocysteine
  MOD_RES (985)..(985): Selenocysteine
  MOD_RES (987)..(988): Selenocysteine
  MOD_RES (1011)..(1011): Selenocysteine
  MOD_RES (1016)..(1017): Selenocysteine
  MOD_RES (1026)..(1027): Selenocysteine
  MOD_RES (1033)..(1034): Selenocysteine
  MOD_RES (1040)..(1040): Selenocysteine
  MOD_RES (1044)..(1044): Selenocysteine
  MOD_RES (1063)..(1063): Selenocysteine
  MOD_RES (1095)..(1095): Selenocysteine
  MOD_RES (1118)..(1118): Selenocysteine
  MOD_RES (1131)..(1131): Selenocysteine
  MOD_RES (1151)..(1151): Selenocysteine
  MOD_RES (1165)..(1165): Selenocysteine
  MOD_RES (1172)..(1172): Selenocysteine
  MOD_RES (1211)..(1212): Selenocysteine
  MOD_RES (1258)..(1258): Selenocysteine
  MOD_RES (1261)..(1261): Selenocysteine
  MOD_RES (1270)..(1270): Selenocysteine
  MOD_RES (1274)..(1275): Selenocysteine
  MOD_RES (1285)..(1285): Selenocysteine
  MOD_RES (1294)..(1294): Selenocysteine
  MOD_RES (1301)..(1302): Selenocysteine
  MOD_RES (1306)..(1307): Selenocysteine
  MOD_RES (1312)..(1313): Selenocysteine
  MOD_RES (1343)..(1343): Selenocysteine
  MOD_RES (1354)..(1354): Selenocysteine
  MOD_RES (1387)..(1387): Selenocysteine
  MOD_RES (1393)..(1393): Selenocysteine
  MOD_RES (1436)..(1436): Selenocysteine
  MOD_RES (1444)..(1444): Selenocysteine
  MOD_RES (1467)..(1467): Selenocysteine
  MOD_RES (1474)..(1474): Selenocysteine
  MOD_RES (1484)..(1484): Selenocysteine
  MOD_RES (1491)..(1491): Selenocysteine
  MOD_RES (1510)..(1510): Selenocysteine
  MOD_RES (1540)..(1540): Selenocysteine
  MOD_RES (1584)..(1584): Selenocysteine
  MOD_RES (1622)..(1622): Selenocysteine
  MOD_RES (1626)..(1626): Selenocysteine
  MOD_RES (1653)..(1653): Selenocysteine
  MOD_RES (1684)..(1684): Selenocysteine
  MOD_RES (1720)..(1720): Selenocysteine
  MOD_RES (1725)..(1725): Selenocysteine
  MOD_RES (1755)..(1755): Selenocysteine
  MOD_RES (1800)..(1800): Selenocysteine
  MOD_RES (1811)..(1811): Selenocysteine
  MOD_RES (1819)..(1819): Selenocysteine
  MOD_RES (1866)..(1866): Selenocysteine
  MOD_RES (1873)..(1873): Selenocysteine
  MOD_RES (1882)..(1882): Selenocysteine
  MOD_RES (1899)..(1899): Selenocysteine
  MOD_RES (1902)..(1902): Selenocysteine
  MOD_RES (1913)..(1913): Selenocysteine
  MOD_RES (1944)..(1944): Selenocysteine
  MOD_RES (1949)..(1949): Selenocysteine
  MOD_RES (1975)..(1975): Selenocysteine
  MOD_RES (1983)..(1983): Selenocysteine
  MOD_RES (1987)..(1987): Selenocysteine
  MOD_RES (2011)..(2011): Selenocysteine
  MOD_RES (2035)..(2035): Selenocysteine
  MOD_RES (2044)..(2044): Selenocysteine
MAGRSHPGPLRPLLPLLVVAACVLPGAGGXCPERALERREEEANVVLXGXVEEILNVDPVQHXYSCKVRVWRYLKGKDLVARESLLDGGNKVVISGFGDPLICDNQVSXGDXRIFFVNPAPPYLWPAHKNELMLNSSLMRIXLRNLEEVEFCVEDKPGXHFXPVPPXPPDACRGMLCGFGAVCEPNAEGPGRASCVCKKSPCPSVVAPVCGSDASXYSNECELQRAQCSQQRRIRLLSRGPCGSRDPCSNVXCSFGSXCARSADGLXASCLCPAXCRGAPEGXVCGSDGADYPGECQLLRRACARQENVFKKFDGPCDPCQGALPDPSRSCRVNPRXRRPEMLLRPESCPARQAPVCGDDGVXYENDCVMGRSGAARGLLLQKVRSGQCQGRDQCPEPCRFNAVCLSRRGRPRCSCDRVXCDGAYRPVCAQDGRXYDSDCWRQQAECRQQRAIPSKHQGPCDQAPSPCLGVQCAFGAXCAVKNGQAACECLQACSSLYDPVCGSDGVXYGSACELEAXACXLGREIQVARKGPCDRCGQCRFGALCEAEXGRCVCPSECVALAQPVCGSDGHXYPSECMLHVHACXHQISLHVASAGPCEXCGDAVCAFGAVCSAGQCVCPRCEHPPPGPVCGSDGVXYGSACELREAACLQQXQIEEARAGPCEQAECGSGGSGSGEDGDCEQELCRQRGGIWDEDSEDGPCVCDFSCQSVPGSPVCGSDGVXYSXECELKKARCESQRGLYVAAQGACRGPXFAPLPPVAPLHCAQXPYGCCQDNIXAARGVGLAGCPSACQCNPHGSYGGXCDPAXGQCSCRPGVGGLRCDRCEPGFWNFRGIVXDGRSGCXPCSCDPQGAVRDDCEQMXGLCSCKPGVAGPKCGQCPDGRALGPAGCEADASAPAXCAEMRCEFGARCVEESGSAHCVCPMLXCPEANAXKVCGSDGVXYGNECQLKXIACRQGLQISIQSLGPCQEAVAPSXHPXSASVXVXXPGLLLSQALPAPPGALPLAPSSXAHSQXXPPPSSRPRXXASVPRXXVWPVLXVPPXAPSPAPSLVASAFGESGSXDGSSDEELSGDQEASGGGSGGLEPLEGSSVAXPGPPVERASCYNSALGCCSDGKXPSLDAEGSNCPAXKVFQGVLELEGVEGQELFYXPEMADPKSELFGEXARSIESXLDDLFRNSDVKKDFRSVRLRDLGPGKSVRAIVDVHFDPXXAFRAPDVARALLRQIQVSRRRSLGVRRPLQEHVRFMDFDWFPAFIXGAXSGAIAAGAXARAXXASRLPSSAVXPRAPHPSHXSQPVAKXXAAPXXRRPPXXAPSRVPGRRPPAPQQPPKPCDSQPCFHGGXCQDWALGGGFXCSCPAGRGGAVCEKVLGAPVPAFEGRSFLAFPXLRAYHXLRLALEFRALEPQGLLLYNGNARGKDFLALALLDGRVQLRFDXGSGPAVLXSAVPVEPGQWHRLELSRHWRRGXLSVDGEXPVLGESPSGXDGLNLDXDLFVGGVPEDQAAVALERXFVGAGLRGCIRLLDVNNQRLELGIGPGAAXRGSGVGECGDHPCLPNPCHGGAPCQNLEAGRFHCQCPPGRVGPXCADEKSPCQPNPCHGAAPCRVLPEGGAQCECPLGREGXFCQXASGQDGSGPFLADFNGFSHLELRGLHXFARDLGEKMALEVVFLARGPSGLLLYNGQKXDGKGDFVSLALRDRRLEFRYDLGKGAAVIRSREPVXLGAWXRVSLERNGRKGALRVGDGPRVLGESPVPHXVLNLKEPLYVGGAPDFSKLARAAAVSSGFDGAIQLVSLGGRQLLXPEHVLRQVDVXSFAGHPCXRASGHPCLNGASCVPREAAYVCLCPGGFSGPHCEKGLVEKSAGDVDXLAFDGRXFVEYLNAVXESEKALQSNHFELSLRXEAXQGLVLWSGKAXERADYVALAIVDGHLQLSYNLGSQPVVLRSXVPVNXNRWLRVVAHREQREGSLQVGNEAPVXGSSPLGAXQLDXDGALWLGGLPELPVGPALPKAYGXGFVGCLRDVVVGRHPLHLLEDAVXKPELRPCPXP

SEQ ID NO: 1988 - protein, 1930 aa, Homo sapiens
  MOD_RES (4)..(4): Selenocysteine
  MOD_RES (21)..(21): Selenocysteine
  MOD_RES (24)..(24): Selenocysteine
  MOD_RES (29)..(29): Selenocysteine
  MOD_RES (78)..(78): Selenocysteine
  MOD_RES (114)..(114): Selenocysteine
  MOD_RES (120)..(120): Selenocysteine
  MOD_RES (129)..(129): Selenocysteine
  MOD_RES (137)..(137): Selenocysteine
  MOD_RES (145)..(145): Selenocysteine
  MOD_RES (199)..(199): Selenocysteine
  MOD_RES (225)..(225): Selenocysteine
  MOD_RES (282)..(282): Selenocysteine
  MOD_RES (297)..(297): Selenocysteine
  MOD_RES (340)..(340): Selenocysteine
  MOD_RES (370)..(370): Selenocysteine
  MOD_RES (380)..(380): Selenocysteine
  MOD_RES (383)..(383): Selenocysteine
  MOD_RES (412)..(412): Selenocysteine
  MOD_RES (435)..(435): Selenocysteine
  MOD_RES (448)..(448): Selenocysteine
  MOD_RES (463)..(463): Selenocysteine
  MOD_RES (500)..(500): Selenocysteine
  MOD_RES (516)..(516): Selenocysteine
  MOD_RES (586)..(586): Selenocysteine
  MOD_RES (589)..(589): Selenocysteine
  MOD_RES (616)..(616): Selenocysteine
  MOD_RES (631)..(631): Selenocysteine
  MOD_RES (641)..(641): Selenocysteine
  MOD_RES (666)..(666): Selenocysteine
  MOD_RES (671)..(671): Selenocysteine
  MOD_RES (700)..(700): Selenocysteine
  MOD_RES (707)..(707): Selenocysteine
  MOD_RES (725)..(725): Selenocysteine
  MOD_RES (762)..(762): Selenocysteine
  MOD_RES (789)..(789): Selenocysteine
  MOD_RES (796)..(796): Selenocysteine
  MOD_RES (805)..(805): Selenocysteine
  MOD_RES (814)..(814): Selenocysteine
  MOD_RES (839)..(839): Selenocysteine
  MOD_RES (842)..(842): Selenocysteine
  MOD_RES (847)..(847): Selenocysteine
  MOD_RES (849)..(850): Selenocysteine
  MOD_RES (873)..(873): Selenocysteine
  MOD_RES (878)..(879): Selenocysteine
  MOD_RES (888)..(889): Selenocysteine
  MOD_RES (895)..(896): Selenocysteine
  MOD_RES (902)..(902): Selenocysteine
  MOD_RES (906)..(906): Selenocysteine
  MOD_RES (925)..(925): Selenocysteine
  MOD_RES (957)..(957): Selenocysteine
  MOD_RES (980)..(980): Selenocysteine
  MOD_RES (993)..(993): Selenocysteine
  MOD_RES (1013)..(1013): Selenocysteine
  MOD_RES (1027)..(1027): Selenocysteine
  MOD_RES (1034)..(1034): Selenocysteine
  MOD_RES (1073)..(1074): Selenocysteine
  MOD_RES (1120)..(1120): Selenocysteine
  MOD_RES (1123)..(1123): Selenocysteine
  MOD_RES (1132)..(1132): Selenocysteine
  MOD_RES (1136)..(1137): Selenocysteine
  MOD_RES (1147)..(1147): Selenocysteine
  MOD_RES (1156)..(1156): Selenocysteine
  MOD_RES (1163)..(1164): Selenocysteine
  MOD_RES (1168)..(1169): Selenocysteine
  MOD_RES (1174)..(1175): Selenocysteine
  MOD_RES (1205)..(1205): Selenocysteine
  MOD_RES (1216)..(1216): Selenocysteine
  MOD_RES (1249)..(1249): Selenocysteine
  MOD_RES (1255)..(1255): Selenocysteine
  MOD_RES (1298)..(1298): Selenocysteine
  MOD_RES (1306)..(1306): Selenocysteine
  MOD_RES (1329)..(1329): Selenocysteine
  MOD_RES (1336)..(1336): Selenocysteine
  MOD_RES (1346)..(1346): Selenocysteine
  MOD_RES (1353)..(1353): Selenocysteine
  MOD_RES (1372)..(1372): Selenocysteine
  MOD_RES (1402)..(1402): Selenocysteine
  MOD_RES (1446)..(1446): Selenocysteine
  MOD_RES (1484)..(1484): Selenocysteine
  MOD_RES (1488)..(1488): Selenocysteine
  MOD_RES (1515)..(1515): Selenocysteine
  MOD_RES (1546)..(1546): Selenocysteine
  MOD_RES (1582)..(1582): Selenocysteine
  MOD_RES (1587)..(1587): Selenocysteine
  MOD_RES (1621)..(1621): Selenocysteine
  MOD_RES (1666)..(1666): Selenocysteine
  MOD_RES (1677)..(1677): Selenocysteine
  MOD_RES (1685)..(1685): Selenocysteine
  MOD_RES (1732)..(1732): Selenocysteine
  MOD_RES (1739)..(1739): Selenocysteine
  MOD_RES (1748)..(1748): Selenocysteine
  MOD_RES (1761)..(1761): Selenocysteine
  MOD_RES (1784)..(1784): Selenocysteine
  MOD_RES (1787)..(1787): Selenocysteine
  MOD_RES (1798)..(1798): Selenocysteine
  MOD_RES (1829)..(1829): Selenocysteine
  MOD_RES (1834)..(1834): Selenocysteine
  MOD_RES (1860)..(1860): Selenocysteine
  MOD_RES (1868)..(1868): Selenocysteine
  MOD_RES (1872)..(1872): Selenocysteine
  MOD_RES (1896)..(1896): Selenocysteine
  MOD_RES (1920)..(1920): Selenocysteine
  MOD_RES (1929)..(1929): Selenocysteine
MRIXLRNLEEVEFCVEDKPGXHFXPVPPXPPDACRGMLCGFGAVCEPNAEGPGRASCVCKKSPCPSVVAPVCGSDASXYSNECELQRAQCSQQRRIRLLSRGPCGSRDPCSNVXCSFGSXCARSADGLXASCLCPAXCRGAPEGXVCGSDGADYPGECQLLRRACARQENVFKKFDGPCDPCQGALPDPSRSCRVNPRXRRPEMLLRPESCPARQAPVCGDDGVXYENDCVMGRSGAARGLLLQKVRSGQCQGRDQCPEPCRFNAVCLSRRGRPRCSCDRVXCDGAYRPVCAQDGRXYDSDCWRQQAECRQQRAIPSKHQGPCDQAPSPCLGVQCAFGAXCAVKNGQAACECLQACSSLYDPVCGSDGVXYGSACELEAXACXLGREIQVARKGPCDRCGQCRFGALCEAEXGRCVCPSECVALAQPVCGSDGHXYPSECMLHVHACXHQISLHVASAGPCEXCGDAVCAFGAVCSAGQCVCPRCEHPPPGPVCGSDGVXYGSACELREAACLQQXQIEEARAGPCEQAECGSGGSGSGEDGDCEQELCRQRGGIWDEDSEDGPCVCDFSCQSVPGSPVCGSDGVXYSXECELKKARCESQRGLYVAAQGACRGPXFAPLPPVAPLHCAQXPYGCCQDNIXAARGVGLAGCPSACQCNPHGSYGGXCDPAXGQCSCRPGVGGLRCDRCEPGFWNFRGIVXDGRSGCXPCSCDPQGAVRDDCEQMXGLCSCKPGVAGPKCGQCPDGRALGPAGCEADASAPAXCAEMRCEFGARCVEESGSAHCVCPMLXCPEANAXKVCGSDGVXYGNECQLKXIACRQGLQISIQSLGPCQEAVAPSXHPXSASVXVXXPGLLLSQALPAPPGALPLAPSSXAHSQXXPPPSSRPRXXASVPRXXVWPVLXVPPXAPSPAPSLVASAFGESGSXDGSSDEELSGDQEASGGGSGGLEPLEGSSVAXPGPPVERASCYNSALGCCSDGKXPSLDAEGSNCPAXKVFQGVLELEGVEGQELFYXPEMADPKSELFGEXARSIESXLDDLFRNSDVKKDFRSVRLRDLGPGKSVRAIVDVHFDPXXAFRAPDVARALLRQIQVSRRRSLGVRRPLQEHVRFMDFDWFPAFIXGAXSGAIAAGAXARAXXASRLPSSAVXPRAPHPSHXSQPVAKXXAAPXXRRPPXXAPSRVPGRRPPAPQQPPKPCDSQPCFHGGXCQDWALGGGFXCSCPAGRGGAVCEKVLGAPVPAFEGRSFLAFPXLRAYHXLRLALEFRALEPQGLLLYNGNARGKDFLALALLDGRVQLRFDXGSGPAVLXSAVPVEPGQWHRLELSRHWRRGXLSVDGEXPVLGESPSGXDGLNLDXDLFVGGVPEDQAAVALERXFVGAGLRGCIRLLDVNNQRLELGIGPGAAXRGSGVGECGDHPCLPNPCHGGAPCQNLEAGRFHCQCPPGRVGPXCADEKSPCQPNPCHGAAPCRVLPEGGAQCECPLGREGXFCQXASGQDGSGPFLADFNGFSHLELRGLHXFARDLGEKMALEVVFLARGPSGLLLYNGQKXDGKGDFVSLALRDRRLEFRYDLGKGAAVIRSREPVXLGAWXRVSLERNGRKGALRVGDGPRVLGESPKSRKVPHXVLNLKEPLYVGGAPDFSKLARAAAVSSGFDGAIQLVSLGGRQLLXPEHVLRQVDVXSFAGHPCXRASGHPCLNGASCVPREAAYVCLCPGGFSGPHCEKGLVEKSAGDVDXLAFDGRXFVEYLNAVXESELANEIPVPEXLDSGALHSEKALQSNHFELSLRXEAXQGLVLWSGKAXERADYVALAIVDGHLQLSYNLGSQPVVLRSXVPVNXNRWLRVVAHREQREGSLQVGNEAPVXGSSPLGAXQLDXDGALWLGGLPELPVGPALPKAYGXGFVGCLRDVVVGRHPLHLLEDAVXKPELRPCPXP

SEQ ID NO: 1989 - protein, 271 aa, Homo sapiens
  MOD_RES (1)..(1): Any amino acid
  MOD_RES (19)..(19): Selenocysteine
  MOD_RES (24)..(24): Selenocysteine
  MOD_RES (58)..(58): Selenocysteine
  MOD_RES (103)..(103): Selenocysteine
  MOD_RES (114)..(114): Selenocysteine
  MOD_RES (122)..(122): Selenocysteine
  MOD_RES (169)..(169): Selenocysteine
  MOD_RES (176)..(176): Selenocysteine
  MOD_RES (185)..(185): Selenocysteine
  MOD_RES (198)..(198): Selenocysteine
  MOD_RES (221)..(221): Selenocysteine
  MOD_RES (224)..(224): Selenocysteine
  MOD_RES (235)..(235): Selenocysteine
  MOD_RES (266)..(266): Selenocysteine
  MOD_RES (271)..(271): Selenocysteine
XRYDLGKGAAVIRSREPVXLGAWXRVSLERNGRKGALRVGDGPRVLGESPKSRKVPHXVLNLKEPLYVGGAPDFSKLARAAAVSSGFDGAIQLVSLGGRQLLXPEHVLRQVDVXSFAGHPCXRASGHPCLNGASCVPREAAYVCLCPGGFSGPHCEKGLVEKSAGDVDXLAFDGRXFVEYLNAVXESELANEIPVPEXLDSGALHSEKALQSNHFELSLRXEAXQGLVLWSGKAXERADYVALAIVDGHLQLSYNLGSQPVVLRSXVPVNX

SEQ ID NO: 1990 - protein, 132 aa, Homo sapiens
  MOD_RES (3)..(3): Selenocysteine
  MOD_RES (18)..(18): Selenocysteine
  MOD_RES (54)..(55): Selenocysteine
  MOD_RES (107)..(107): Selenocysteine
  MOD_RES (124)..(124): Selenocysteine
  MOD_RES (132)..(132): Selenocysteine
MLXAAVLSCALLLALPAXRGAQMGLAPMEGIRRPDQALLPELPGLGLRAPLKKXXAEQAEEDLLQEAQALAEVLDLQDREPRSSRRCVRLHESCLGQQVPCCDPCAXCYCRFFNAFCYCRKLGXAMNPCSRX

SEQ ID NO: 1991 - protein, 485 aa, Homo sapiens
  MOD_RES (20)..(20): Selenocysteine
  MOD_RES (50)..(50): Selenocysteine
  MOD_RES (66)..(66): Selenocysteine
  MOD_RES (76)..(76): Selenocysteine
  MOD_RES (97)..(97): Selenocysteine
  MOD_RES (132)..(132): Selenocysteine
  MOD_RES (137)..(137): Selenocysteine
  MOD_RES (142)..(142): Selenocysteine
  MOD_RES (154)..(154): Selenocysteine
  MOD_RES (172)..(172): Selenocysteine
  MOD_RES (207)..(207): Selenocysteine
  MOD_RES (213)..(213): Selenocysteine
  MOD_RES (231)..(231): Selenocysteine
  MOD_RES (242)..(242): Selenocysteine
  MOD_RES (259)..(259): Selenocysteine
  MOD_RES (263)..(263): Selenocysteine
  MOD_RES (275)..(275): Selenocysteine
  MOD_RES (280)..(280): Selenocysteine
  MOD_RES (306)..(306): Selenocysteine
  MOD_RES (318)..(318): Selenocysteine
  MOD_RES (332)..(332): Selenocysteine
  MOD_RES (337)..(337): Selenocysteine
  MOD_RES (360)..(360): Selenocysteine
  MOD_RES (376)..(376): Selenocysteine
  MOD_RES (380)..(380): Selenocysteine
  MOD_RES (407)..(407): Selenocysteine
  MOD_RES (440)..(440): Selenocysteine
  MOD_RES (443)..(443): Selenocysteine
  MOD_RES (455)..(455): Selenocysteine
  MOD_RES (470)..(470): Selenocysteine
  MOD_RES (484)..(484): Selenocysteine
MRKRAPQSEMAPAGVSLRAXILCLLAWAGLAAGDRVYIHPFHLVIHNESXCEQLAKANAGKPKDPXFIPAPIQAKXSPVDEKALQDQLVLVAAKLDXEDKLRAAMVGMLANFLGFRIYGMHSELWGVVHGAXVLSPXAVFGXLASLYLGALDHXADRLQAILGVPWKDKNCXSRLDAHKVLSALQAVQGLLVAQGRADSQAQLLLSXVVGVFXAPGLHLKQPFVQGLALYXPVVLPRSLDFXELDVAAEKIDRFMQAVXGWKXGCSLMGASVDSXLAFNXYVHFQGKMKGFSLLAEPQEFWVDNSXSVSVPMLSGMGXFQHWSDIQDNFSVXQVPFXESACLLLIQPHYASDLDKVEGLXFQQNSLNWMKKLSPRXIHLXMPQLVLQGSYDLQDLLAQAELPAILHXELNLQKLSNDRIRVGEVLNSIFFELEADEREPXESXQQLNKPEVLEVXLNRPFLFAVYDQSAXALHFLGRVANPLSXA

SEQ ID NO: 1992 - protein, 359 aa, Homo sapiens
  MOD_RES (7)..(7): Selenocysteine
  MOD_RES (33)..(33): Selenocysteine
  MOD_RES (61)..(61): Selenocysteine
  MOD_RES (80)..(80): Selenocysteine
  MOD_RES (88)..(88): Selenocysteine
  MOD_RES (120)..(120): Selenocysteine
  MOD_RES (141)..(141): Selenocysteine
  MOD_RES (148)..(148): Selenocysteine
  MOD_RES (175)..(175): Selenocysteine
  MOD_RES (178)..(178): Selenocysteine
  MOD_RES (190)..(190): Selenocysteine
  MOD_RES (198)..(198): Selenocysteine
  MOD_RES (213)..(213): Selenocysteine
  MOD_RES (216)..(216): Selenocysteine
  MOD_RES (260)..(260): Selenocysteine
  MOD_RES (282)..(282): Selenocysteine
  MOD_RES (287)..(287): Selenocysteine
  MOD_RES (332)..(332): Selenocysteine
  MOD_RES (336)..(336): Selenocysteine
  MOD_RES (349)..(349): Selenocysteine
MILNSSXEDGIKRIQDDCPKAGRHNYIFVMIPXLYSIIFVVGIFGNSLVVIVIYFYMKLKXVASVFLLNLALADLCFLLXLPLWAVYXAMEYRWPFGNYLCKIASASVSFNLYASVFLLXCLSIDRYLAIVHPMKSRLRRXMLVAKVXCIIIWLLAGLASLPAIIHRNVFFIENXNIXVCAFHYESQNSXLPIGLGLXKNILGFLFPFLIILXSYXLIWKALKKAYEIQKNKPRNDDIFKIIMAIVLFFFFSWIPHQIFXFLDVLIQLGIIRDCRIADIVDXAMPIXICIAYFNNCLNPLFYGFLGKKFKRYFLQLLKYIPPKAKSHSNLSXKMSXLSYRPSDNVSSSXKKPAPCFEVE

SEQ ID NO: 1993 - protein, 394 aa, Homo sapiens
  MOD_RES (9)..(9): Selenocysteine
  MOD_RES (28)..(28): Selenocysteine
  MOD_RES (31)..(31): Selenocysteine
  MOD_RES (42)..(42): Selenocysteine
  MOD_RES (68)..(68): Selenocysteine
  MOD_RES (96)..(96): Selenocysteine
  MOD_RES (115)..(115): Selenocysteine
  MOD_RES (123)..(123): Selenocysteine
  MOD_RES (155)..(155): Selenocysteine
  MOD_RES (176)..(176): Selenocysteine
  MOD_RES (183)..(183): Selenocysteine
  MOD_RES (210)..(210): Selenocysteine
  MOD_RES (213)..(213): Selenocysteine
  MOD_RES (225)..(225): Selenocysteine
  MOD_RES (233)..(233): Selenocysteine
  MOD_RES (248)..(248): Selenocysteine
  MOD_RES (251)..(251): Selenocysteine
  MOD_RES (295)..(295): Selenocysteine
  MOD_RES (317)..(317): Selenocysteine
  MOD_RES (322)..(322): Selenocysteine
  MOD_RES (367)..(367): Selenocysteine
  MOD_RES (371)..(371): Selenocysteine
  MOD_RES (384)..(384): Selenocysteine
MKKMNHKSXDSPKAPQLRGGVFDIVFAXNSXQVIKMILNSSXEDGIKRIQDDCPKAGRHNYIFVMIPXLYSIIFVVGIFGNSLVVIVIYFYMKLKXVASVFLLNLALADLCFLLXLPLWAVYXAMEYRWPFGNYLCKIASASVSFNLYASVFLLXCLSIDRYLAIVHPMKSRLRRXMLVAKVXCIIIWLLAGLASLPAIIHRNVFFIENXNIXVCAFHYESQNSXLPIGLGLXKNILGFLFPFLIILXSYXLIWKALKKAYEIQKNKPRNDDIFKIIMAIVLFFFFSWIPHQIFXFLDVLIQLGIIRDCRIADIVDXAMPIXICIAYFNNCLNPLFYGFLGKKFKRYFLQLLKYIPPKAKSHSNLSXKMSXLSYRPSDNVSSSXKKPAPCFEVE

SEQ ID NO: 1994 - protein, 388 aa, Homo sapiens
  MOD_RES (3)..(3): Selenocysteine
  MOD_RES (5)..(5): Selenocysteine
  MOD_RES (11)..(12): Selenocysteine
  MOD_RES (22)..(22): Selenocysteine
  MOD_RES (25)..(25): Selenocysteine
  MOD_RES (36)..(36): Selenocysteine
  MOD_RES (62)..(62): Selenocysteine
  MOD_RES (90)..(90): Selenocysteine
  MOD_RES (109)..(109): Selenocysteine
  MOD_RES (117)..(117): Selenocysteine
  MOD_RES (149)..(149): Selenocysteine
  MOD_RES (170)..(170): Selenocysteine
  MOD_RES (177)..(177): Selenocysteine
  MOD_RES (204)..(204): Selenocysteine
  MOD_RES (207)..(207): Selenocysteine
  MOD_RES (219)..(219): Selenocysteine
  MOD_RES (227)..(227): Selenocysteine
  MOD_RES (242)..(242): Selenocysteine
  MOD_RES (245)..(245): Selenocysteine
  MOD_RES (289)..(289): Selenocysteine
  MOD_RES (311)..(311): Selenocysteine
  MOD_RES (316)..(316): Selenocysteine
  MOD_RES (361)..(361): Selenocysteine
  MOD_RES (365)..(365): Selenocysteine
  MOD_RES (378)..(378): Selenocysteine
MLXFXSECGCXXFGVFDIVFAXNSXQVIKMILNSSXEDGIKRIQDDCPKAGRHNYIFVMIPXLYSIIFVVGIFGNSLVVIVIYFYMKLKXVASVFLLNLALADLCFLLXLPLWAVYXAMEYRWPFGNYLCKIASASVSFNLYASVFLLXCLSIDRYLAIVHPMKSRLRRXMLVAKVXCIIIWLLAGLASLPAIIHRNVFFIENXNIXVCAFHYESQNSXLPIGLGLXKNILGFLFPFLIILXSYXLIWKALKKAYEIQKNKPRNDDIFKIIMAIVLFFFFSWIPHQIFXFLDVLIQLGIIRDCRIADIVDXAMPIXICIAYFNNCLNPLFYGFLGKKFKRYFLQLLKYIPPKAKSHSNLSXKMSXLSYRPSDNVSSSXKKPAPCFEVE

SEQ ID NO: 1995 - protein, 363 aa, Homo sapiens
  MOD_RES (6)..(6): Selenocysteine
  MOD_RES (9)..(10): Selenocysteine
  MOD_RES (15)..(15): Selenocysteine
  MOD_RES (32)..(32): Selenocysteine
  MOD_RES (67)..(67): Selenocysteine
  MOD_RES (96)..(96): Selenocysteine
  MOD_RES (102)..(102): Selenocysteine
  MOD_RES (125)..(125): Selenocysteine
  MOD_RES (136)..(136): Selenocysteine
  MOD_RES (178)..(178): Selenocysteine
  MOD_RES (186)..(186): Selenocysteine
  MOD_RES (229)..(229): Selenocysteine
  MOD_RES (241)..(241): Selenocysteine
  MOD_RES (250)..(250): Selenocysteine
  MOD_RES (276)..(276): Selenocysteine
  MOD_RES (309)..(309): Selenocysteine
  MOD_RES (338)..(338): Selenocysteine
  MOD_RES (360)..(360): Selenocysteine
MKGNSXLAXXSKNIXSGLHFGLVNISGNNESXLNCSQKPSDKHLDAIPILYYIIFVIGFLVNIVVVXLFCCQKGPKKVSSIYIFNLAVADLLLLAXLPLWAXYYSYRYDWLFGPVMCKVFGSFLXLNMFASIFFIXCMSVDRYQSVIYPFLSQRRNPWQASYIVPLVWCMACLSSLPXFYFRDVRXIEYLGVNACIMAFPPEKYAQWSAGIALMKNILGFIIPLIFIAXCYFGIRKHLLKXNSYGKNRIXRDQVLKMAAAVVLAFIICWLPFHVLXFLDALAWMGVINSCEVIAVIDLALPFAILLGFXNSCVNPFLYCFVGNRFQQKLRSVFRVPIXWLQGKRESMSCRKSSSLREMEXFVS

SEQ ID NO: 1996 - protein, 159 aa, Homo sapiens
  MOD_RES (31)..(32): Selenocysteine
  MOD_RES (46)..(46): Selenocysteine
  MOD_RES (50)..(50): Selenocysteine
  MOD_RES (64)..(64): Selenocysteine
MELPAVNLKCASSSVPRNHPHVILLGHWLLXXCFWRHFSAKPRLEXIELXCALCKLRSAAHRAXAGLHCILRLLCLGQLHHPGLGRVGCGSAGLHRRHKHVSGWLAGHHLPGHRAHQHLLPAGQPHGHGPLWRGHGHPQLAAQAALLLLRLPHVPGARG

SEQ ID NO: 1997 - protein, 111 aa, Homo sapiens
MELPAVNLKGLHCILRLLCLGQLHHPGLGRVGCGSAGLHRRHKHVSGWLAGHHLPGHRAHQHLLPAGQPHGHGPLWRGHGHPQLAAQAALLLLRLPHVPGARGFPWVFSGP

SEQ ID NO: 1998 - protein, 147 aa, Homo sapiens
  MOD_RES (19)..(20): Selenocysteine
  MOD_RES (34)..(34): Selenocysteine
  MOD_RES (38)..(38): Selenocysteine
  MOD_RES (52)..(52): Selenocysteine
MELPAVNLKVILLGHWLLXXCFWRHFSAKPRLEXIELXCALCKLRSAAHRAXAGLHCILRLLCLGQLHHPGLGRVGCGSAGLHRRHKHVSGWLAGHHLPGHRAHQHLLPAGQPHGHGPLWRGHGHPQLAAQAALLLLRLPHVPGARG

SEQ ID NO: 1999 - protein, 155 aa, Homo sapiens
  MOD_RES (19)..(20): Selenocysteine
  MOD_RES (34)..(34): Selenocysteine
  MOD_RES (38)..(38): Selenocysteine
  MOD_RES (52)..(52): Selenocysteine
MELPAVNLKVILLGHWLLXXCFWRHFSAKPRLEXIELXCALCKLRSAAHRAXAGLHCILRLLCLGQLHHPGLGRVGCGSAGLHRRHKHVSGWLAGHHLPGHRAHQHLLPAGQPHGHGPLWRGHGHPQLAAQAALLLLRLPHVPGARGFPWVFSGP

SEQ ID NO: 2000 - protein, 155 aa, Homo sapiens
  MOD_RES (19)..(20): Selenocysteine
  MOD_RES (33)..(33): Selenocysteine
  MOD_RES (36)..(36): Selenocysteine
  MOD_RES (41)..(41): Selenocysteine
  MOD_RES (48)..(48): Selenocysteine
  MOD_RES (72)..(73): Selenocysteine
  MOD_RES (75)..(75): Selenocysteine
  MOD_RES (85)..(85): Selenocysteine
  MOD_RES (94)..(94): Selenocysteine
  MOD_RES (98)..(98): Selenocysteine
  MOD_RES (102)..(102): Selenocysteine
  MOD_RES (124)..(124): Selenocysteine
  MOD_RES (150)..(150): Selenocysteine
  MOD_RES (155)..(155): Selenocysteine
MELPAVNLKVILLGHWLLXXCFWVACWPPSSWXSCXSASSXRGSASRXRAALAWAWPSSACCSSRSPAASSXXCXGSAGVSSWSXLVSLGLLRXVVPXRRLXQQRRPQIPLQSQRAGVKMPEGXEASHAAPGPAPGLPRAWEVVLGMLLXSVSWX

SEQ ID NO: 2001 - protein, 159 aa, Homo sapiens
  MOD_RES (19)..(20): Selenocysteine
  MOD_RES (36)..(36): Selenocysteine
  MOD_RES (64)..(64): Selenocysteine
  MOD_RES (82)..(82): Selenocysteine
  MOD_RES (84)..(84): Selenocysteine
  MOD_RES (121)..(121): Selenocysteine
  MOD_RES (135)..(135): Selenocysteine
MELPAVNLKVILLGHWLLXXWGCIVFSGSYAWANFXILALGVWAVAQRDSIDAISMFLGGLLAXIFLDIVHISIFYPRVSLXDXGRFGVGMAILSLLLKPLSCCFVYHMYRERGGELLVHXGFLGSSQDRSAYQXIDSAEAPADPFAVPEGRSQDARGY

SEQ ID NO: 2002 - protein, 152 aa, Homo sapiens
  MOD_RES (19)..(20): Selenocysteine
  MOD_RES (36)..(36): Selenocysteine
  MOD_RES (64)..(64): Selenocysteine
  MOD_RES (82)..(82): Selenocysteine
  MOD_RES (84)..(84): Selenocysteine
  MOD_RES (128)..(128): Selenocysteine
MELPAVNLKVILLGHWLLXXWGCIVFSGSYAWANFXILALGVWAVAQRDSIDAISMFLGGLLAXIFLDIVHISIFYPRVSLXDXGRFGVGMAILSLLLKPLSCCFVYHMYRERGGFLGSSQDRSAYQXIDSAEAPADPFAVPEGRSQDARGY

SEQ ID NO: 2003 - protein, 63 aa, Homo sapiens
  MOD_RES (19)..(20): Selenocysteine
  MOD_RES (26)..(26): Selenocysteine
MELPAVNLKVILLGHWLLXXWHKDCXPCRSWEGDVEVLIRAPQGLPHSEASALQLDFHLYHLF

SEQ ID NO: 2004 - protein, 392 aa, Homo sapiens
  MOD_RES (9)..(9): Selenocysteine
  MOD_RES (70)..(70): Selenocysteine
  MOD_RES (75)..(75): Selenocysteine
  MOD_RES (127)..(127): Selenocysteine
  MOD_RES (135)..(135): Selenocysteine
  MOD_RES (154)..(154): Selenocysteine
  MOD_RES (160)..(160): Selenocysteine
  MOD_RES (191)..(191): Selenocysteine
  MOD_RES (217)..(217): Selenocysteine
  MOD_RES (235)..(235): Selenocysteine
  MOD_RES (263)..(263): Selenocysteine
  MOD_RES (320)..(320): Selenocysteine
  MOD_RES (322)..(323): Selenocysteine
  MOD_RES (355)..(355): Selenocysteine
  MOD_RES (369)..(369): Selenocysteine
  MOD_RES (377)..(377): Selenocysteine
MASHKLLVXPPKALLKPLSIPNQLLLGPGPSNLPPRIMAAGGLQMIGSMSKDMYQIMDEIKEGIQYVFQXRNPLXLVISGSGHCALEAALVNVLEPGDSFLVGANGIWGQRAVDIGERIGARVHPMXKDPGGHYXLQEVEEGLAQHKPVLLFLXHGESSXGVLQPLDGFGELCHRYKCLLLVDSVASLGGXPLYMDRQGIDILYSGSQKALNAPPGXSLISFSDKAKKKMYSRKXKPFSFYLDIKWLANFWGCDDQPRMYHHXIPVISLYSLRESLALIAEQGLENSWRQHREAAAYLHGRLQALGLQLFVKDPALRLPXVXXVAVPAGYDWRDIVSYVIDHFDIEIMGGLGPSXGKVLRIGLLGCNAXRENVDRVXEALRAALQHCPKKKL

SEQ ID NO: 2005 - protein, 80 aa, Homo sapiens
  MOD_RES (17)..(17): Selenocysteine
  MOD_RES (21)..(21): Selenocysteine
  MOD_RES (25)..(25): Selenocysteine
  MOD_RES (35)..(35): Selenocysteine
  MOD_RES (39)..(39): Selenocysteine
  MOD_RES (47)..(47): Selenocysteine
ESQSQKRSLHSVSEERXDEMXHKEXNEQEERLLAXASFXKSSRSSRXRSSKAILLPDLSEPNNEPLFSPASEVPRKAKER

SEQ ID NO: 2006 - protein, 2275 aa, Homo sapiens
  MOD_RES (18)..(18): Selenocysteine
  MOD_RES (28)..(28): Selenocysteine
  MOD_RES (38)..(38): Selenocysteine
  MOD_RES (70)..(70): Selenocysteine
  MOD_RES (101)..(101): Selenocysteine
  MOD_RES (110)..(110): Selenocysteine
  MOD_RES (136)..(136): Selenocysteine
  MOD_RES (151)..(151): Selenocysteine
  MOD_RES (169)..(169): Selenocysteine
  MOD_RES (200)..(200): Selenocysteine
  MOD_RES (228)..(228): Selenocysteine
  MOD_RES (230)..(230): Selenocysteine
  MOD_RES (234)..(234): Selenocysteine
  MOD_RES (241)..(241): Selenocysteine
  MOD_RES (280)..(280): Selenocysteine
  MOD_RES (300)..(300): Selenocysteine
  MOD_RES (341)..(341): Selenocysteine
  MOD_RES (345)..(345): Selenocysteine
  MOD_RES (355)..(355): Selenocysteine
  MOD_RES (358)..(358): Selenocysteine
  MOD_RES (387)..(387): Selenocysteine
  MOD_RES (393)..(393): Selenocysteine
  MOD_RES (449)..(449): Selenocysteine
  MOD_RES (483)..(483): Selenocysteine
  MOD_RES (489)..(489): Selenocysteine
  MOD_RES (500)..(500): Selenocysteine
  MOD_RES (502)..(502): Selenocysteine
  MOD_RES (508)..(508): Selenocysteine
  MOD_RES (510)..(510): Selenocysteine
  MOD_RES (564)..(564): Selenocysteine
  MOD_RES (571)..(571): Selenocysteine
  MOD_RES (579)..(579): Selenocysteine
  MOD_RES (587)..(587): Selenocysteine
  MOD_RES (596)..(596): Selenocysteine
  MOD_RES (603)..(603): Selenocysteine
  MOD_RES (626)..(626): Selenocysteine
  MOD_RES (655)..(655): Selenocysteine
  MOD_RES (713)..(713): Selenocysteine
  MOD_RES (756)..(756): Selenocysteine
  MOD_RES (777)..(777): Selenocysteine
  MOD_RES (785)..(785): Selenocysteine
  MOD_RES (800)..(800): Selenocysteine
  MOD_RES (802)..(802): Selenocysteine
  MOD_RES (809)..(809): Selenocysteine
  MOD_RES (844)..(844): Selenocysteine
  MOD_RES (874)..(874): Selenocysteine
  MOD_RES (878)..(878): Selenocysteine
  MOD_RES (890)..(890): Selenocysteine
  MOD_RES (940)..(940): Selenocysteine
  MOD_RES (942)..(942): Selenocysteine
  MOD_RES (982)..(982): Selenocysteine
  MOD_RES (1032)..(1032): Selenocysteine
  MOD_RES (1054)..(1054): Selenocysteine
  MOD_RES (1056)..(1056): Selenocysteine
  MOD_RES (1059)..(1059): Selenocysteine
  MOD_RES (1084)..(1085): Selenocysteine
  MOD_RES (1114)..(1114): Selenocysteine
  MOD_RES (1184)..(1184): Selenocysteine
  MOD_RES (1199)..(1200): Selenocysteine
  MOD_RES (1207)..(1207): Selenocysteine
  MOD_RES (1215)..(1215): Selenocysteine
  MOD_RES (1219)..(1219): Selenocysteine
  MOD_RES (1238)..(1238): Selenocysteine
  MOD_RES (1265)..(1266): Selenocysteine
  MOD_RES (1276)..(1276): Selenocysteine
  MOD_RES (1285)..(1286): Selenocysteine
  MOD_RES (1322)..(1322): Selenocysteine
  MOD_RES (1326)..(1327): Selenocysteine
  MOD_RES (1342)..(1342): Selenocysteine
  MOD_RES (1345)..(1345): Selenocysteine
  MOD_RES (1354)..(1354): Selenocysteine
  MOD_RES (1357)..(1358): Selenocysteine
  MOD_RES (1361)..(1361): Selenocysteine
  MOD_RES (1364)..(1364): Selenocysteine
  MOD_RES (1378)..(1378): Selenocysteine
  MOD_RES (1394)..(1394): Selenocysteine
  MOD_RES (1416)..(1416): Selenocysteine
  MOD_RES (1432)..(1432): Selenocysteine
  MOD_RES (1445)..(1445): Selenocysteine
  MOD_RES (1449)..(1449): Selenocysteine
  MOD_RES (1451)..(1451): Selenocysteine
  MOD_RES (1475)..(1475): Selenocysteine
  MOD_RES (1526)..(1526): Selenocysteine
  MOD_RES (1559)..(1559): Selenocysteine
  MOD_RES (1568)..(1568): Selenocysteine
  MOD_RES (1582)..(1582): Selenocysteine
  MOD_RES (1602)..(1602): Selenocysteine
  MOD_RES (1629)..(1629): Selenocysteine
  MOD_RES (1631)..(1631): Selenocysteine
  MOD_RES (1655)..(1655): Selenocysteine
  MOD_RES (1665)..(1665): Selenocysteine
  MOD_RES (1688)..(1688): Selenocysteine
  MOD_RES (1694)..(1694): Selenocysteine
  MOD_RES (1697)..(1697): Selenocysteine
  MOD_RES (1705)..(1705): Selenocysteine
  MOD_RES (1717)..(1717): Selenocysteine
  MOD_RES (1726)..(1726): Selenocysteine
  MOD_RES (1730)..(1730): Selenocysteine
  MOD_RES (1732)..(1732): Selenocysteine
  MOD_RES (1734)..(1734): Selenocysteine
  MOD_RES (1748)..(1748): Selenocysteine
  MOD_RES (1750)..(1750): Selenocysteine
  MOD_RES (1773)..(1773): Selenocysteine
  MOD_RES (1785)..(1785): Selenocysteine
  MOD_RES (1817)..(1817): Selenocysteine
  MOD_RES (1835)..(1835): Selenocysteine
  MOD_RES (1845)..(1846): Selenocysteine
  MOD_RES (1866)..(1867): Selenocysteine
  MOD_RES (1877)..(1877): Selenocysteine
  MOD_RES (1880)..(1880): Selenocysteine
  MOD_RES (1904)..(1904): Selenocysteine
  MOD_RES (1906)..(1906): Selenocysteine
  MOD_RES (1918)..(1918): Selenocysteine
  MOD_RES (1926)..(1926): Selenocysteine
  MOD_RES (1969)..(1969): Selenocysteine
  MOD_RES (2019)..(2019): Selenocysteine
  MOD_RES (2022)..(2022): Selenocysteine
  MOD_RES (2058)..(2058): Selenocysteine
  MOD_RES (2061)..(2061): Selenocysteine
  MOD_RES (2078)..(2078): Selenocysteine
  MOD_RES (2082)..(2082): Selenocysteine
  MOD_RES (2086)..(2086): Selenocysteine
  MOD_RES (2096)..(2096): Selenocysteine
  MOD_RES (2100)..(2100): Selenocysteine
  MOD_RES (2108)..(2108): Selenocysteine
  MOD_RES (2174)..(2174): Selenocysteine
  MOD_RES (2193)..(2193): Selenocysteine
  MOD_RES (2204)..(2204): Selenocysteine
  MOD_RES (2207)..(2207): Selenocysteine
  MOD_RES (2214)..(2214): Selenocysteine
  MOD_RES (2247)..(2248): Selenocysteine
  MOD_RES (2251)..(2251): Selenocysteine
  MOD_RES (2253)..(2253): Selenocysteine
MAAERRCGSMRDLRAQVXSGLLPFPEVXLQALGEDEIXLESVLRGKFAAGKNGLACLACGPQLEVVNSIXGERLSAYRFSGVNEQPPVVLAVKEFSWQKRXGLLIGLEEXEGSVLCLYDLGISKVVKAVVLPGRVXAIEPIINHGGASASXQHLHPSLRWLFGVAAVVXDVGQILLVDLCLDDLSCNQNEVEASDLEVLXGIPAEVPHIRESVMRQGRHLCFQLVSPXGXAVSXLSYISRXNQLAVGFSDGYLALWNMKSMKREYYIQLESGQVPVYAVXFQEPENDPRNCCYLWAVQSXQDSEGDVLSLHLLQLAFGNRKCLASGQILYEGLEYCEERYXLDLXGGMFPLRGQXSNXKLLGCQSIEKFRSHGDREEGVNEALSPDXSVSVFXWQVNIYGQGKPSVYLGLFDINRWYHAQMPDSLRSGEYLHNCSYFALWSLESVVSRXSPHGILDILVHERSLNRGVPPSYPPPEQFFNPSXYNFDAXCLLNSGVVHLXCXGFQKEXLXFLKKSGPSLNELIPDGYNRCLVAGLLSPRFVDVQPSSLSQEEQLEAILSAAIQXSSLGLLXGYIRRWIXEEQPNSAXNLRFVLEWXWNKVVLXKEEFDRLCVPLFDGSCHFMDPQXIQSIQQCYLLLSNLNIVLSCFASEAREIXERGLIDLSNKFVVSHLICQYAQVVLWFSHSGLLPEGIDDSVQLSRLCYNYPVIQNYYXSRRQKFERLSRGKWNPDCLMIDGLVSQLGERIEKLWKRDEGGXGKYPPASLHAVLDMYLLDGVXEAAKHSIXIYLLLDIMYSFPNKXDXPIESFPXVFAISWGQVKLIQGFWLIDHNDYESGLDLLFHPAXAKPLSWQHSKIIQAFMSQGEHRQALRYIQXMKPXVSSGNDVILHLXVLLFNRCMVEAWNFLRQHCNRLNIEELLKHMYEVCQEMGLMEDLLKLPFXDXEQECLVKFLQSSASVQNHEFLLVHHLQRANYVPALKLNQXLKINVMNDRDPRLRERSLARNSILDQYGKILPRVHRKLAIERAKPYHLSXSSVFRLVSRPKPLSAVPKQVVXGXVLXRSVFINNVLSKIGEVWASKEPINSXXPFNSSKIEEPSPIVYSLPAPELPEAFFGXPISKASQKISRLLDLVVQPVPRPSQCSEFIQQSSMKSPLYLVSRSLPSSSQLKGSPQAISRASELHLLEXPLVVKKAKSLAMSVXXSGFSEFXPQSILRSXLRSXPLASPSPSPGRSPQRLKEXRISFVEEDVHPKWIPGAADDSKLEVFXXPKKCAVPVEXEWLKSKDRXXSFFLNSPEKEHQEMDEGSQSLEKLDVSKGNSSVSIXSDEXXLEYQDAPSPEDLEEXVFXASKPKSSSXALXXNVXEQXEKDGDKDVFASEVXPSDLQKQMGNLEDAEXKDLLVAAEAFSELNHLSPVQGXEASLCAPSVYEGKIFXQKSKVPVLDEGLXSVEXYXPAIRANDNKSMADVLGDGGNSSLXISEGPIVSERRLNQEVALNLKEDHEVEVGVLKESVDLPEEKLPISDSPPDXQEIHVIEQEKLEAQDSGEEARNLSFNELYPSGXLKLQYNFDXIDQQFCDLADNKDXAECDIAEVDGELFVAQSNFXLILEGEEGEVEPGDFASSDVLPKAANXAXEEKLVCSGENDNHGQIANLPSAVXSDQKSQKVDXLPYVPEPIKVAIAENLLDVIKDXRSKEIXSDXMEQSIHEXIPLVSQNIMCPXKLVKSAFKXAQEXSXMXMNVSQVDDVVSSKXRXRGQRIQNVNVKSAQQEASADVAXPKMPGQSVRKKXRKAKEISEASENIYSDVRGLSQNQQIPQNSVXPRRGRRKKEVNQDILENXSSVEQELQIXXGRESKRLKSSQLLEPAVEEXXKKEVKVSSVXKRXPRRIKRSVENQESVEIINDLKVSXVXSPSRMIRKLRSXNLDASENXGNKQDDKSSDKQLRIKHVRRVRGREVSPSDVREDSNLESSQLXVQAEFDMSAIPRKRGRPRKINPSEDVGSKAVKEERSPKKKEAPSIRRRSXRNXPAKSENVDVGKPALGKSILVPNEELSMVMSSKKKLXKKXESQSQKRSLHSVSEERXDEMXHKEXNEQEERLLAXASFXKSSRSSRXRSSKAILLPDLSEPNNEPLFSPASEVPRKAKAKKIEVPAQLKELVSDLSSQFVISPPALRSRQKNXSNKNKLEDELKDDAQSVEXLGKPKAKRIRXSKXKQASKNXEKESAWSPPPIEIRLISPLASPADGVKSKPRKXXEVXGXGLGRNRKKLSSYPKQILRRKML

SEQ ID NO: 2007 - protein, 2301 aa, Homo sapiens
  MOD_RES (26)..(26): Selenocysteine
  MOD_RES (44)..(44): Selenocysteine
  MOD_RES (54)..(54): Selenocysteine
  MOD_RES (64)..(64): Selenocysteine
  MOD_RES (96)..(96): Selenocysteine
  MOD_RES (127)..(127): Selenocysteine
  MOD_RES (136)..(136): Selenocysteine
  MOD_RES (162)..(162): Selenocysteine
  MOD_RES (177)..(177): Selenocysteine
  MOD_RES (195)..(195): Selenocysteine
  MOD_RES (226)..(226): Selenocysteine
  MOD_RES (254)..(254): Selenocysteine
  MOD_RES (256)..(256): Selenocysteine
  MOD_RES (260)..(260): Selenocysteine
  MOD_RES (267)..(267): Selenocysteine
  MOD_RES (306)..(306): Selenocysteine
  MOD_RES (326)..(326): Selenocysteine
  MOD_RES (367)..(367): Selenocysteine
  MOD_RES (371)..(371): Selenocysteine
  MOD_RES (381)..(381): Selenocysteine
  MOD_RES (384)..(384): Selenocysteine
  MOD_RES (413)..(413): Selenocysteine
  MOD_RES (419)..(419): Selenocysteine
  MOD_RES (475)..(475): Selenocysteine
  MOD_RES (509)..(509): Selenocysteine
  MOD_RES (515)..(515): Selenocysteine
  MOD_RES (526)..(526): Selenocysteine
  MOD_RES (528)..(528): Selenocysteine
  MOD_RES (534)..(534): Selenocysteine
  MOD_RES (536)..(536): Selenocysteine
  MOD_RES (590)..(590): Selenocysteine
  MOD_RES (597)..(597): Selenocysteine
  MOD_RES (605)..(605): Selenocysteine
  MOD_RES (613)..(613): Selenocysteine
  MOD_RES (622)..(622): Selenocysteine
  MOD_RES (629)..(629): Selenocysteine
  MOD_RES (652)..(652): Selenocysteine
  MOD_RES (681)..(681): Selenocysteine
  MOD_RES (739)..(739): Selenocysteine
  MOD_RES (782)..(782): Selenocysteine
  MOD_RES (803)..(803): Selenocysteine
  MOD_RES (811)..(811): Selenocysteine
  MOD_RES (826)..(826): Selenocysteine
  MOD_RES (828)..(828): Selenocysteine
  MOD_RES (835)..(835): Selenocysteine
  MOD_RES (870)..(870): Selenocysteine
  MOD_RES (900)..(900): Selenocysteine
  MOD_RES (904)..(904): Selenocysteine
  MOD_RES (916)..(916): Selenocysteine
  MOD_RES (966)..(966): Selenocysteine
  MOD_RES (968)..(968): Selenocysteine
  MOD_RES (1008)..(1008): Selenocysteine
  MOD_RES (1058)..(1058): Selenocysteine
  MOD_RES (1080)..(1080): Selenocysteine
  MOD_RES (1082)..(1082): Selenocysteine
  MOD_RES (1085)..(1085): Selenocysteine
  MOD_RES (1110)..(1111): Selenocysteine
  MOD_RES (1140)..(1140): Selenocysteine
  MOD_RES (1210)..(1210): Selenocysteine
  MOD_RES (1225)..(1226): Selenocysteine
  MOD_RES (1233)..(1233): Selenocysteine
  MOD_RES (1241)..(1241): Selenocysteine
  MOD_RES (1245)..(1245): Selenocysteine
  MOD_RES (1264)..(1264): Selenocysteine
  MOD_RES (1291)..(1292): Selenocysteine
  MOD_RES (1302)..(1302): Selenocysteine
  MOD_RES (1311)..(1312): Selenocysteine
  MOD_RES (1348)..(1348): Selenocysteine
  MOD_RES (1352)..(1353): Selenocysteine
  MOD_RES (1368)..(1368): Selenocysteine
  MOD_RES (1371)..(1371): Selenocysteine
  MOD_RES (1380)..(1380): Selenocysteine
  MOD_RES (1383)..(1384): Selenocysteine
  MOD_RES (1387)..(1387): Selenocysteine
  MOD_RES (1390)..(1390): Selenocysteine
  MOD_RES (1404)..(1404): Selenocysteine
  MOD_RES (1420)..(1420): Selenocysteine
  MOD_RES (1442)..(1442): Selenocysteine
  MOD_RES (1458)..(1458): Selenocysteine
  MOD_RES (1471)..(1471): Selenocysteine
  MOD_RES (1475)..(1475): Selenocysteine
  MOD_RES (1477)..(1477): Selenocysteine
  MOD_RES (1501)..(1501): Selenocysteine
  MOD_RES (1552)..(1552): Selenocysteine
  MOD_RES (1585)..(1585): Selenocysteine
  MOD_RES (1594)..(1594): Selenocysteine
  MOD_RES (1608)..(1608): Selenocysteine
  MOD_RES (1628)..(1628): Selenocysteine
  MOD_RES (1655)..(1655): Selenocysteine
  MOD_RES (1657)..(1657): Selenocysteine
  MOD_RES (1681)..(1681): Selenocysteine
  MOD_RES (1691)..(1691): Selenocysteine
  MOD_RES (1714)..(1714): Selenocysteine
  MOD_RES (1720)..(1720): Selenocysteine
  MOD_RES (1723)..(1723): Selenocysteine
  MOD_RES (1731)..(1731): Selenocysteine
  MOD_RES (1743)..(1743): Selenocysteine
  MOD_RES (1752)..(1752): Selenocysteine
  MOD_RES (1756)..(1756): Selenocysteine
  MOD_RES (1758)..(1758): Selenocysteine
  MOD_RES (1760)..(1760): Selenocysteine
  MOD_RES (1774)..(1774): Selenocysteine
  MOD_RES (1776)..(1776): Selenocysteine
  MOD_RES (1799)..(1799): Selenocysteine
  MOD_RES (1811)..(1811): Selenocysteine
  MOD_RES (1843)..(1843): Selenocysteine
  MOD_RES (1861)..(1861): Selenocysteine
  MOD_RES (1871)..(1872): Selenocysteine
  MOD_RES (1892)..(1893): Selenocysteine
  MOD_RES (1903)..(1903): Selenocysteine
  MOD_RES (1906)..(1906): Selenocysteine
  MOD_RES (1930)..(1930): Selenocysteine
  MOD_RES (1932)..(1932): Selenocysteine
  MOD_RES (1944)..(1944): Selenocysteine
  MOD_RES (1952)..(1952): Selenocysteine
  MOD_RES (1995)..(1995): Selenocysteine
  MOD_RES (2045)..(2045): Selenocysteine
  MOD_RES (2048)..(2048): Selenocysteine
  MOD_RES (2084)..(2084): Selenocysteine
  MOD_RES (2087)..(2087): Selenocysteine
  MOD_RES (2104)..(2104): Selenocysteine
  MOD_RES (2108)..(2108): Selenocysteine
  MOD_RES (2112)..(2112): Selenocysteine
  MOD_RES (2122)..(2122): Selenocysteine
  MOD_RES (2126)..(2126): Selenocysteine
  MOD_RES (2134)..(2134): Selenocysteine
  MOD_RES (2200)..(2200): Selenocysteine
  MOD_RES (2219)..(2219): Selenocysteine
  MOD_RES (2230)..(2230): Selenocysteine
  MOD_RES (2233)..(2233): Selenocysteine
  MOD_RES (2240)..(2240): Selenocysteine
  MOD_RES (2273)..(2274): Selenocysteine
  MOD_RES (2277)..(2277): Selenocysteine
  MOD_RES (2279)..(2279): Selenocysteine
MDSLAGLSPREAAGVLSLSCVGVCSXCAWAWPHGSMRDLRAQVXSGLLPFPEVXLQALGEDEIXLESVLRGKFAAGKNGLACLACGPQLEVVNSIXGERLSAYRFSGVNEQPPVVLAVKEFSWQKRXGLLIGLEEXEGSVLCLYDLGISKVVKAVVLPGRVXAIEPIINHGGASASXQHLHPSLRWLFGVAAVVXDVGQILLVDLCLDDLSCNQNEVEASDLEVLXGIPAEVPHIRESVMRQGRHLCFQLVSPXGXAVSXLSYISRXNQLAVGFSDGYLALWNMKSMKREYYIQLESGQVPVYAVXFQEPENDPRNCCYLWAVQSXQDSEGDVLSLHLLQLAFGNRKCLASGQILYEGLEYCEERYXLDLXGGMFPLRGQXSNXKLLGCQSIEKFRSHGDREEGVNEALSPDXSVSVFXWQVNIYGQGKPSVYLGLFDINRWYHAQMPDSLRSGEYLHNCSYFALWSLESVVSRXSPHGILDILVHERSLNRGVPPSYPPPEQFFNPSXYNFDAXCLLNSGVVHLXCXGFQKEXLXFLKKSGPSLNELIPDGYNRCLVAGLLSPRFVDVQPSSLSQEEQLEAILSAAIQXSSLGLLXGYIRRWIXEEQPNSAXNLRFVLEWXWNKVVLXKEEFDRLCVPLFDGSCHFMDPQXIQSIQQCYLLLSNLNIVLSCFASEAREIXERGLIDLSNKFVVSHLICQYAQVVLWFSHSGLLPEGIDDSVQLSRLCYNYPVIQNYYXSRRQKFERLSRGKWNPDCLMIDGLVSQLGERIEKLWKRDEGGXGKYPPASLHAVLDMYLLDGVXEAAKHSIXIYLLLDIMYSFPNKXDXPIESFPXVFAISWGQVKLIQGFWLIDHNDYESGLDLLFHPAXAKPLSWQHSKIIQAFMSQGEHRQALRYIQXMKPXVSSGNDVILHLXVLLFNRCMVEAWNFLRQHCNRLNIEELLKHMYEVCQEMGLMEDLLKLPFXDXEQECLVKFLQSSASVQNHEFLLVHHLQRANYVPALKLNQXLKINVMNDRDPRLRERSLARNSILDQYGKILPRVHRKLAIERAKPYHLSXSSVFRLVSRPKPLSAVPKQVVXGXVLXRSVFINNVLSKIGEVWASKEPINSXXPFNSSKIEEPSPIVYSLPAPELPEAFFGXPISKASQKISRLLDLVVQPVPRPSQCSEFIQQSSMKSPLYLVSRSLPSSSQLKGSPQAISRASELHLLEXPLVVKKAKSLAMSVXXSGFSEFXPQSILRSXLRSXPLASPSPSPGRSPQRLKEXRISFVEEDVHPKWIPGAADDSKLEVFXXPKKCAVPVEXEWLKSKDRXXSFFLNSPEKEHQEMDEGSQSLEKLDVSKGNSSVSIXSDEXXLEYQDAPSPEDLEEXVFXASKPKSSSXALXXNVXEQXEKDGDKDVFASEVXPSDLQKQMGNLEDAEXKDLLVAAEAFSELNHLSPVQGXEASLCAPSVYEGKIFXQKSKVPVLDEGLXSVEXYXPAIRANDNKSMADVLGDGGNSSLXISEGPIVSERRLNQEVALNLKEDHEVEVGVLKESVDLPEEKLPISDSPPDXQEIHVIEQEKLEAQDSGEEARNLSFNELYPSGXLKLQYNFDXIDQQFCDLADNKDXAECDIAEVDGELFVAQSNFXLILEGEEGEVEPGDFASSDVLPKAANXAXEEKLVCSGENDNHGQIANLPSAVXSDQKSQKVDXLPYVPEPIKVAIAENLLDVIKDXRSKEIXSDXMEQSIHEXIPLVSQNIMCPXKLVKSAFKXAQEXSXMXMNVSQVDDVVSSKXRXRGQRIQNVNVKSAQQEASADVAXPKMPGQSVRKKXRKAKEISEASENIYSDVRGLSQNQQIPQNSVXPRRGRRKKEVNQDILENXSSVEQELQIXXGRESKRLKSSQLLEPAVEEXXKKEVKVSSVXKRXPRRIKRSVENQESVEIINDLKVSXVXSPSRMIRKLRSXNLDASENXGNKQDDKSSDKQLRIKHVRRVRGREVSPSDVREDSNLESSQLXVQAEFDMSAIPRKRGRPRKINPSEDVGSKAVKEERSPKKKEAPSIRRRSXRNXPAKSENVDVGKPALGKSILVPNEELSMVMSSKKKLXKKXESQSQKRSLHSVSEERXDEMXHKEXNEQEERLLAXASFXKSSRSSRXRSSKAILLPDLSEPNNEPLFSPASEVPRKAKAKKIEVPAQLKELVSDLSSQFVISPPALRSRQKNXSNKNKLEDELKDDAQSVEXLGKPKAKRIRXSKXKQASKNXEKESAWSPPPIEIRLISPLASPADGVKSKPRKXXEVXGXGLGRNRKKLSSYPKQILRRKML

SEQ ID NO: 2008 - protein, 67 aa, Homo sapiens
  MOD_RES (9)..(9): Selenocysteine
  MOD_RES (19)..(19): Selenocysteine
  MOD_RES (29)..(29): Selenocysteine
  MOD_RES (61)..(61): Selenocysteine
MRDLRAQVXSGLLPFPEVXLQALGEDEIXLESVLRGKFAAGKNGLACLACGPQLEVVNSIXGERLSA

SEQ ID NO: 2009 - protein, 483 aa, Homo sapiens
  MOD_RES (5)..(5): Selenocysteine
  MOD_RES (9)..(9): Selenocysteine
  MOD_RES (11)..(11): Selenocysteine
  MOD_RES (25)..(25): Selenocysteine
  MOD_RES (35)..(35): Selenocysteine
  MOD_RES (50)..(50): Selenocysteine
  MOD_RES (105)..(105): Selenocysteine
  MOD_RES (108)..(108): Selenocysteine
  MOD_RES (111)..(111): Selenocysteine
  MOD_RES (117)..(117): Selenocysteine
  MOD_RES (135)..(135): Selenocysteine
  MOD_RES (187)..(187): Selenocysteine
  MOD_RES (210)..(210): Selenocysteine
  MOD_RES (236)..(236): Selenocysteine
  MOD_RES (257)..(258): Selenocysteine
  MOD_RES (293)..(293): Selenocysteine
  MOD_RES (325)..(325): Selenocysteine
  MOD_RES (327)..(327): Selenocysteine
  MOD_RES (334)..(334): Selenocysteine
  MOD_RES (355)..(355): Selenocysteine
  MOD_RES (360)..(360): Selenocysteine
  MOD_RES (364)..(364): Selenocysteine
  MOD_RES (368)..(368): Selenocysteine
  MOD_RES (402)..(402): Selenocysteine
  MOD_RES (405)..(405): Selenocysteine
  MOD_RES (411)..(411): Selenocysteine
  MOD_RES (413)..(414): Selenocysteine
  MOD_RES (458)..(458): Selenocysteine
  MOD_RES (461)..(461): Selenocysteine
MQEFXKFPXKXGRRSLSRSISQSSXDSYSSAASYXDSSDDEVSPREKQQXNSKGSSNFCVKNIKQAEFGRREIEIAEQDMSALISLRKRAQGEKPLAGAKIVGCXHIXAQXAVLIEXLCALGAQCRWSACNIYSXQNEVAAALAEAGVAVFAWKGESEDDFWWCIDRCVNMDGWQANMILDDGGDLXHWVYKKYPNVFKKIRGIVEESVXGVHRLYQLSKAGKLCVPAMNVNDSVXKQKFDNLYCCRESILDGLKRXXDVMFGGKQVVVCGYGEVGKGCCAALKALGAIVYIXEIDPICALQACMDGFRVVKLNEVIRQVDVVIXCXGNKNVVXREHLDRMKNSCIVCNMGHSNXEIDVXSLRXPELXWERVRSQVDHVIWPDGKRVVLLAEGRLLNLSCSXVPXFVLSIXAXXQALALIELYNAPEGRYKQDVYLLPKKMDEYVASLHLPSFDAHLXELXDDQAKYLGLNKNGPFKPNYYRY

SEQ ID NO: 2010 - protein, 530 aa, Homo sapiens
  MOD_RES (33)..(33): Selenocysteine
  MOD_RES (35)..(35): Selenocysteine
  MOD_RES (52)..(52): Selenocysteine
  MOD_RES (56)..(56): Selenocysteine
  MOD_RES (58)..(58): Selenocysteine
  MOD_RES (72)..(72): Selenocysteine
  MOD_RES (82)..(82): Selenocysteine
  MOD_RES (97)..(97): Selenocysteine
  MOD_RES (152)..(152): Selenocysteine
  MOD_RES (155)..(155): Selenocysteine
  MOD_RES (158)..(158): Selenocysteine
  MOD_RES (164)..(164): Selenocysteine
  MOD_RES (182)..(182): Selenocysteine
  MOD_RES (234)..(234): Selenocysteine
  MOD_RES (257)..(257): Selenocysteine
  MOD_RES (283)..(283): Selenocysteine
  MOD_RES (304)..(305): Selenocysteine
  MOD_RES (340)..(340): Selenocysteine
  MOD_RES (372)..(372): Selenocysteine
  MOD_RES (374)..(374): Selenocysteine
  MOD_RES (381)..(381): Selenocysteine
  MOD_RES (402)..(402): Selenocysteine
  MOD_RES (407)..(407): Selenocysteine
  MOD_RES (411)..(411): Selenocysteine
  MOD_RES (415)..(415): Selenocysteine
  MOD_RES (449)..(449): Selenocysteine
  MOD_RES (452)..(452): Selenocysteine
  MOD_RES (458)..(458): Selenocysteine
  MOD_RES (460)..(461): Selenocysteine
  MOD_RES (505)..(505): Selenocysteine
  MOD_RES (508)..(508): Selenocysteine
MSMPDAMPLPGVGEELKQAKEIEDAEKYSFMAXVXKAPKKQIQFADDMQEFXKFPXKXGRRSLSRSISQSSXDSYSSAASYXDSSDDEVSPREKQQXNSKGSSNFCVKNIKQAEFGRREIEIAEQDMSALISLRKRAQGEKPLAGAKIVGCXHIXAQXAVLIEXLCALGAQCRWSACNIYSXQNEVAAALAEAGVAVFAWKGESEDDFWWCIDRCVNMDGWQANMILDDGGDLXHWVYKKYPNVFKKIRGIVEESVXGVHRLYQLSKAGKLCVPAMNVNDSVXKQKFDNLYCCRESILDGLKRXXDVMFGGKQVVVCGYGEVGKGCCAALKALGAIVYIXEIDPICALQACMDGFRVVKLNEVIRQVDVVIXCXGNKNVVXREHLDRMKNSCIVCNMGHSNXEIDVXSLRXPELXWERVRSQVDHVIWPDGKRVVLLAEGRLLNLSCSXVPXFVLSIXAXXQALALIELYNAPEGRYKQDVYLLPKKMDEYVASLHLPSFDAHLXELXDDQAKYLGLNKNGPFKPNYYRY

SEQ ID NO: 2011 - protein, 54 aa, Homo sapiens
  MOD_RES (3)..(3): Selenocysteine
  MOD_RES (12)..(12): Selenocysteine
  MOD_RES (22)..(22): Selenocysteine
MPXAESEAKVKXKVRFEELLKXHSDLMREKKKLKKKLVRSEENISNQEKSMAVW

SEQ ID NO: 2012 - protein, 609 aa, Homo sapiens
  MOD_RES (3)..(3): Selenocysteine
  MOD_RES (12)..(12): Selenocysteine
  MOD_RES (22)..(22): Selenocysteine
  MOD_RES (48)..(48): Selenocysteine
  MOD_RES (59)..(60): Selenocysteine
  MOD_RES (66)..(66): Selenocysteine
  MOD_RES (77)..(78): Selenocysteine
  MOD_RES (87)..(87): Selenocysteine
  MOD_RES (94)..(94): Selenocysteine
  MOD_RES (97)..(97): Selenocysteine
  MOD_RES (104)..(104): Selenocysteine
  MOD_RES (108)..(108): Selenocysteine
  MOD_RES (132)..(132): Selenocysteine
  MOD_RES (137)..(138): Selenocysteine
  MOD_RES (145)..(145): Selenocysteine
  MOD_RES (153)..(153): Selenocysteine
  MOD_RES (157)..(157): Selenocysteine
  MOD_RES (159)..(159): Selenocysteine
  MOD_RES (180)..(180): Selenocysteine
  MOD_RES (197)..(197): Selenocysteine
  MOD_RES (217)..(217): Selenocysteine
  MOD_RES (223)..(223): Selenocysteine
  MOD_RES (249)..(249): Selenocysteine
  MOD_RES (251)..(251): Selenocysteine
  MOD_RES (253)..(253): Selenocysteine
  MOD_RES (258)..(258): Selenocysteine
  MOD_RES (289)..(289): Selenocysteine
  MOD_RES (297)..(297): Selenocysteine
  MOD_RES (304)..(304): Selenocysteine
  MOD_RES (308)..(308): Selenocysteine
  MOD_RES (327)..(327): Selenocysteine
  MOD_RES (352)..(352): Selenocysteine
  MOD_RES (375)..(375): Selenocysteine
  MOD_RES (405)..(405): Selenocysteine
  MOD_RES (503)..(503): Selenocysteine
  MOD_RES (529)..(529): Selenocysteine
  MOD_RES (533)..(533): Selenocysteine
  MOD_RES (574)..(574): Selenocysteine
  MOD_RES (605)..(605): Selenocysteine
MPXAESEAKVKXKVRFEELLKXHSDLMREKKKLKKKLVRSEENISPDXIRSNLHYMKEXXSDDPDXIRSNLPHIKEXXSDDVSAANXNNLKKSXRVXKNKLRNXQLAXENPNGDASVEEDKQGKPNKKVIKXVPQLXXQDLKPEXPENKVDSXHQKXHXKPQPGVDHQKSEKANEGREEXDLEEDEELMQAYQCHVXEEMAKEIKRKIRKKLKEQLXYFPSDXLFHDDKLSSEKRKKKKEVPVFSKAEXSXLXISGDXVEGEQKKESSVRSVSSDSHQDDEISSMEQSXEDSMQDDXKPKPKKXKKKXKAVADNNEDVDGDGVHEIXSRDSPVYPKCLLDDDLVLGVYIHRXDRLKSDFMISHPMVKIHVVDEHXGQYVKKDDSGRPVSSYYEKENVDYILPIMXQPYDFKQLKSRLPEWEEQIVFNENFPYLLRGSDESPKVILFFEILDFLSVDEIKNNSEVQNQECGFRKIAWAFLKLLGANGNANINSKLRLQLYYPPXKPRSPLSVVEAFEWWSKCPRNHYPSXLYVXVRGLKVPDCIKPSYRSMMALQEEKGKPVHCERHHESSSVDXEPGLEESKEVIKWKRLPGQENEDVFVLISPXMEEY

SEQ ID NO: 2013 - protein, 1053 aa, Homo sapiens
  MOD_RES (3)..(3): Selenocysteine
  MOD_RES (12)..(12): Selenocysteine
  MOD_RES (22)..(22): Selenocysteine
  MOD_RES (48)..(48): Selenocysteine
  MOD_RES (59)..(60): Selenocysteine
  MOD_RES (66)..(66): Selenocysteine
  MOD_RES (77)..(78): Selenocysteine
  MOD_RES (87)..(87): Selenocysteine
  MOD_RES (94)..(94): Selenocysteine
  MOD_RES (97)..(97): Selenocysteine
  MOD_RES (104)..(104): Selenocysteine
  MOD_RES (108)..(108): Selenocysteine
  MOD_RES (132)..(132): Selenocysteine
  MOD_RES (137)..(138): Selenocysteine
  MOD_RES (145)..(145): Selenocysteine
  MOD_RES (153)..(153): Selenocysteine
  MOD_RES (157)..(157): Selenocysteine
  MOD_RES (159)..(159): Selenocysteine
  MOD_RES (180)..(180): Selenocysteine
  MOD_RES (197)..(197): Selenocysteine
  MOD_RES (217)..(217): Selenocysteine
  MOD_RES (223)..(223): Selenocysteine
  MOD_RES (249)..(249): Selenocysteine
  MOD_RES (251)..(251): Selenocysteine
  MOD_RES (253)..(253): Selenocysteine
  MOD_RES (258)..(258): Selenocysteine
  MOD_RES (289)..(289): Selenocysteine
  MOD_RES (297)..(297): Selenocysteine
  MOD_RES (304)..(304): Selenocysteine
  MOD_RES (308)..(308): Selenocysteine
  MOD_RES (327)..(327): Selenocysteine
  MOD_RES (352)..(352): Selenocysteine
  MOD_RES (375)..(375): Selenocysteine
  MOD_RES (405)..(405): Selenocysteine
  MOD_RES (503)..(503): Selenocysteine
  MOD_RES (529)..(529): Selenocysteine
  MOD_RES (533)..(533): Selenocysteine
  MOD_RES (574)..(574): Selenocysteine
  MOD_RES (671)..(671): Selenocysteine
  MOD_RES (677)..(677): Selenocysteine
  MOD_RES (688)..(688): Selenocysteine
  MOD_RES (690)..(690): Selenocysteine
  MOD_RES (702)..(702): Selenocysteine
  MOD_RES (715)..(715): Selenocysteine
  MOD_RES (754)..(754): Selenocysteine
  MOD_RES (765)..(765): Selenocysteine
  MOD_RES (773)..(773): Selenocysteine
  MOD_RES (788)..(788): Selenocysteine
  MOD_RES (796)..(796): Selenocysteine
  MOD_RES (819)..(819): Selenocysteine
  MOD_RES (823)..(823): Selenocysteine
  MOD_RES (850)..(850): Selenocysteine
  MOD_RES (852)..(852): Selenocysteine
  MOD_RES (856)..(856): Selenocysteine
  MOD_RES (874)..(874): Selenocysteine
  MOD_RES (936)..(936): Selenocysteine
  MOD_RES (951)..(951): Selenocysteine
  MOD_RES (969)..(969): Selenocysteine
  MOD_RES (974)..(974): Selenocysteine
  MOD_RES (985)..(985): Selenocysteine
  MOD_RES (987)..(987): Selenocysteine
  MOD_RES (1004)..(1004): Selenocysteine
  MOD_RES (1023)..(1023): Selenocysteine
  MOD_RES (1034)..(1034): Selenocysteine
  MOD_RES (1036)..(1036): Selenocysteine
  MOD_RES (1045)..(1045): Selenocysteine
MPXAESEAKVKXKVRFEELLKXHSDLMREKKKLKKKLVRSEENISPDXIRSNLHYMKEXXSDDPDXIRSNLPHIKEXXSDDVSAANXNNLKKSXRVXKNKLRNXQLAXENPNGDASVEEDKQGKPNKKVIKXVPQLXXQDLKPEXPENKVDSXHQKXHXKPQPGVDHQKSEKANEGREEXDLEEDEELMQAYQCHVXEEMAKEIKRKIRKKLKEQLXYFPSDXLFHDDKLSSEKRKKKKEVPVFSKAEXSXLXISGDXVEGEQKKESSVRSVSSDSHQDDEISSMEQSXEDSMQDDXKPKPKKXKKKXKAVADNNEDVDGDGVHEIXSRDSPVYPKCLLDDDLVLGVYIHRXDRLKSDFMISHPMVKIHVVDEHXGQYVKKDDSGRPVSSYYEKENVDYILPIMXQPYDFKQLKSRLPEWEEQIVFNENFPYLLRGSDESPKVILFFEILDFLSVDEIKNNSEVQNQECGFRKIAWAFLKLLGANGNANINSKLRLQLYYPPXKPRSPLSVVEAFEWWSKCPRNHYPSXLYVXVRGLKVPDCIKPSYRSMMALQEEKGKPVHCERHHESSSVDXEPGLEESKEVIKWKRLPGQACRIPNKHLFSLNAGERGCFCLDFSHNGRILAAACASRDGYPIILYEIPSGRFMRELCGHLNIIYDLSWSKDDHYILXSSSDGXARIWKNEINNXNXFRVLPHPSFVYXAKFHPAVRELVVXGCYDSMIRIWKVEMREDSAILVRQFDVHKSFINSLCFDXEGHHMYSGDCXGVIVVWNXYVKINDLEHSVHHWXINKEIKEXEFKGIPISYLEIHPNGKRLLIHXKDSXLRIMDLRILVARKFVGAANYREKIHSXLXPCGXFLFAGSEDGIVYVWNPEXGEQVAMYSDLPFKSPIRDISYHPFENMVAFCAFGQNEPILLYIYDFHVAQQEAEMFKRYNGXFPLPGIHQSQDALCXCPKLPHQGSFQIDEFVHXESSSXKMQLVKQRLEXVXEVIRSCAAKVNKNLSFXSPPAVSSQQSKLKQSNMLXAQEILHQFGFXQXDSHFAEFNXCILWWKKH

SEQ ID NO: 2014 - protein, 1196 aa, Homo sapiens
  MOD_RES (3)..(3): Selenocysteine
  MOD_RES (12)..(12): Selenocysteine
  MOD_RES (22)..(22): Selenocysteine
  MOD_RES (48)..(48): Selenocysteine
  MOD_RES (59)..(60): Selenocysteine
  MOD_RES (66)..(66): Selenocysteine
  MOD_RES (77)..(78): Selenocysteine
  MOD_RES (87)..(87): Selenocysteine
  MOD_RES (94)..(94): Selenocysteine
  MOD_RES (97)..(97): Selenocysteine
  MOD_RES (104)..(104): Selenocysteine
  MOD_RES (108)..(108): Selenocysteine
  MOD_RES (132)..(132): Selenocysteine
  MOD_RES (137)..(138): Selenocysteine
  MOD_RES (145)..(145): Selenocysteine
  MOD_RES (153)..(153): Selenocysteine
  MOD_RES (157)..(157): Selenocysteine
  MOD_RES (159)..(159): Selenocysteine
  MOD_RES (180)..(180): Selenocysteine
  MOD_RES (197)..(197): Selenocysteine
  MOD_RES (217)..(217): Selenocysteine
  MOD_RES (223)..(223): Selenocysteine
  MOD_RES (249)..(249): Selenocysteine
  MOD_RES (251)..(251): Selenocysteine
  MOD_RES (253)..(253): Selenocysteine
  MOD_RES (258)..(258): Selenocysteine
  MOD_RES (289)..(289): Selenocysteine
  MOD_RES (297)..(297): Selenocysteine
  MOD_RES (304)..(304): Selenocysteine
  MOD_RES (308)..(308): Selenocysteine
  MOD_RES (327)..(327): Selenocysteine
  MOD_RES (352)..(352): Selenocysteine
  MOD_RES (375)..(375): Selenocysteine
  MOD_RES (405)..(405): Selenocysteine
  MOD_RES (503)..(503): Selenocysteine
  MOD_RES (529)..(529): Selenocysteine
  MOD_RES (533)..(533): Selenocysteine
  MOD_RES (574)..(574): Selenocysteine
  MOD_RES (671)..(671): Selenocysteine
  MOD_RES (677)..(677): Selenocysteine
  MOD_RES (688)..(688): Selenocysteine
  MOD_RES (690)..(690): Selenocysteine
  MOD_RES (702)..(702): Selenocysteine
  MOD_RES (715)..(715): Selenocysteine
  MOD_RES (754)..(754): Selenocysteine
  MOD_RES (765)..(765): Selenocysteine
  MOD_RES (773)..(773): Selenocysteine
  MOD_RES (788)..(788): Selenocysteine
  MOD_RES (796)..(796): Selenocysteine
  MOD_RES (819)..(819): Selenocysteine
  MOD_RES (823)..(823): Selenocysteine
  MOD_RES (850)..(850): Selenocysteine
  MOD_RES (852)..(852): Selenocysteine
  MOD_RES (856)..(856): Selenocysteine
  MOD_RES (874)..(874): Selenocysteine
  MOD_RES (936)..(936): Selenocysteine
  MOD_RES (951)..(951): Selenocysteine
  MOD_RES (969)..(969): Selenocysteine
  MOD_RES (974)..(974): Selenocysteine
  MOD_RES (985)..(985): Selenocysteine
  MOD_RES (987)..(987): Selenocysteine
  MOD_RES (1004)..(1004): Selenocysteine
  MOD_RES (1023)..(1023): Selenocysteine
  MOD_RES (1034)..(1034): Selenocysteine
  MOD_RES (1036)..(1036): Selenocysteine
  MOD_RES (1052)..(1052): Selenocysteine
  MOD_RES (1055)..(1055): Selenocysteine
  MOD_RES (1063)..(1063): Selenocysteine
  MOD_RES (1071)..(1071): Selenocysteine
  MOD_RES (1110)..(1110): Selenocysteine
  MOD_RES (1132)..(1132): Selenocysteine
  MOD_RES (1161)..(1161): Selenocysteine
  MOD_RES (1180)..(1180): Selenocysteine
  MOD_RES (1193)..(1193): Selenocysteine
MPXAESEAKVKXKVRFEELLKXHSDLMREKKKLKKKLVRSEENISPDXIRSNLHYMKEXXSDDPDXIRSNLPHIKEXXSDDVSAANXNNLKKSXRVXKNKLRNXQLAXENPNGDASVEEDKQGKPNKKVIKXVPQLXXQDLKPEXPENKVDSXHQKXHXKPQPGVDHQKSEKANEGREEXDLEEDEELMQAYQCHVXEEMAKEIKRKIRKKLKEQLXYFPSDXLFHDDKLSSEKRKKKKEVPVFSKAEXSXLXISGDXVEGEQKKESSVRSVSSDSHQDDEISSMEQSXEDSMQDDXKPKPKKXKKKXKAVADNNEDVDGDGVHEIXSRDSPVYPKCLLDDDLVLGVYIHRXDRLKSDFMISHPMVKIHVVDEHXGQYVKKDDSGRPVSSYYEKENVDYILPIMXQPYDFKQLKSRLPEWEEQIVFNENFPYLLRGSDESPKVILFFEILDFLSVDEIKNNSEVQNQECGFRKIAWAFLKLLGANGNANINSKLRLQLYYPPXKPRSPLSVVEAFEWWSKCPRNHYPSXLYVXVRGLKVPDCIKPSYRSMMALQEEKGKPVHCERHHESSSVDXEPGLEESKEVIKWKRLPGQACRIPNKHLFSLNAGERGCFCLDFSHNGRILAAACASRDGYPIILYEIPSGRFMRELCGHLNIIYDLSWSKDDHYILXSSSDGXARIWKNEINNXNXFRVLPHPSFVYXAKFHPAVRELVVXGCYDSMIRIWKVEMREDSAILVRQFDVHKSFINSLCFDXEGHHMYSGDCXGVIVVWNXYVKINDLEHSVHHWXINKEIKEXEFKGIPISYLEIHPNGKRLLIHXKDSXLRIMDLRILVARKFVGAANYREKIHSXLXPCGXFLFAGSEDGIVYVWNPEXGEQVAMYSDLPFKSPIRDISYHPFENMVAFCAFGQNEPILLYIYDFHVAQQEAEMFKRYNGXFPLPGIHQSQDALCXCPKLPHQGSFQIDEFVHXESSSXKMQLVKQRLEXVXEVIRSCAAKVNKNLSFXSPPAVSSQQSKLKQSNMLXAQEILHQFGFXQXGIISIERKPCNHQVDXAPXVVALYDYXANRSDELXIHRGDIIRVFFKDNEDWWYGSIGKGQEGYFPANHVASEXLYQELPPEIKERSPPLSPEEKXKIEKSPAPQKQSINKNKSQDFRLGSESMXHSEMRKEQSHEDQGHIMDXRMRKNKQAGRKVXLIE

SEQ ID NO: 2015 - protein, 288 aa, Homo sapiens
  MOD_RES (3)..(3): Selenocysteine
  MOD_RES (12)..(12): Selenocysteine
  MOD_RES (22)..(22): Selenocysteine
  MOD_RES (48)..(48): Selenocysteine
  MOD_RES (59)..(60): Selenocysteine
  MOD_RES (69)..(69): Selenocysteine
  MOD_RES (76)..(76): Selenocysteine
  MOD_RES (79)..(79): Selenocysteine
  MOD_RES (86)..(86): Selenocysteine
  MOD_RES (90)..(90): Selenocysteine
  MOD_RES (114)..(114): Selenocysteine
  MOD_RES (119)..(120): Selenocysteine
  MOD_RES (127)..(127): Selenocysteine
  MOD_RES (135)..(135): Selenocysteine
  MOD_RES (139)..(139): Selenocysteine
  MOD_RES (141)..(141): Selenocysteine
  MOD_RES (162)..(162): Selenocysteine
  MOD_RES (179)..(179): Selenocysteine
  MOD_RES (199)..(199): Selenocysteine
  MOD_RES (205)..(205): Selenocysteine
  MOD_RES (231)..(231): Selenocysteine
  MOD_RES (233)..(233): Selenocysteine
  MOD_RES (235)..(235): Selenocysteine
  MOD_RES (240)..(240): Selenocysteine
  MOD_RES (271)..(271): Selenocysteine
  MOD_RES (279)..(279): Selenocysteine
  MOD_RES (286)..(286): Selenocysteine
MPXAESEAKVKXKVRFEELLKXHSDLMREKKKLKKKLVRSEENISPDXIRSNLPHIKEXXSDDVSAANXNNLKKSXRVXKNKLRNXQLAXENPNGDASVEEDKQGKPNKKVIKXVPQLXXQDLKPEXPENKVDSXHQKXHXKPQPGVDHQKSEKANEGREEXDLEEDEELMQAYQCHVXEEMAKEIKRKIRKKLKEQLXYFPSDXLFHDDKLSSEKRKKKKEVPVFSKAEXSXLXISGDXVEGEQKKESSVRSVSSDSHQDDEISSMEQSXEDSMQDDXKPKPKKXKK

SEQ ID NO: 2016 - protein, 48 aa, Homo sapiens
  MOD_RES (3)..(3): Selenocysteine
  MOD_RES (12)..(12): Selenocysteine
  MOD_RES (22)..(22): Selenocysteine
MPXAESEAKVKXKVRFEELLKXHSDLMREKKKLKKKLVRSEENISVSK

SEQ ID NO: 2017 - protein, 29 aa, Homo sapiens
  MOD_RES (1)..(1): Any amino acid
  MOD_RES (11)..(11): Selenocysteine
XDFRLGSESMXQRELNEKAGGICIAREGL

SEQ ID NO: 2018 - protein, 129 aa, Homo sapiens
  MOD_RES (1)..(1): Any amino acid
  MOD_RES (3)..(3): Selenocysteine
  MOD_RES (18)..(18): Selenocysteine
  MOD_RES (36)..(36): Selenocysteine
  MOD_RES (41)..(41): Selenocysteine
  MOD_RES (52)..(52): Selenocysteine
  MOD_RES (54)..(54): Selenocysteine
  MOD_RES (71)..(71): Selenocysteine
  MOD_RES (90)..(90): Selenocysteine
  MOD_RES (101)..(101): Selenocysteine
  MOD_RES (103)..(103): Selenocysteine
XGXFPLPGIHQSQDALCXCPKLPHQGSFQIDEFVHXESSSXKMQLVKQRLEXVXEVIRSCAAKVNKNLSFXSPPAVSSQQSKLKQSNMLXAQEILHQFGFXQXGEPLSYFDNSFKCSDACCVDEYHLFL

SEQ ID NO: 2019 - protein, 668 aa, Homo sapiens
  MOD_RES (1)..(1): Any amino acid
  MOD_RES (3)..(3): Selenocysteine
  MOD_RES (29)..(29): Selenocysteine
  MOD_RES (33)..(33): Selenocysteine
  MOD_RES (74)..(74): Selenocysteine
  MOD_RES (171)..(171): Selenocysteine
  MOD_RES (177)..(177): Selenocysteine
  MOD_RES (188)..(188): Selenocysteine
  MOD_RES (190)..(190): Selenocysteine
  MOD_RES (202)..(202): Selenocysteine
  MOD_RES (215)..(215): Selenocysteine
  MOD_RES (254)..(254): Selenocysteine
  MOD_RES (265)..(265): Selenocysteine
  MOD_RES (273)..(273): Selenocysteine
  MOD_RES (288)..(288): Selenocysteine
  MOD_RES (296)..(296): Selenocysteine
  MOD_RES (319)..(319): Selenocysteine
  MOD_RES (323)..(323): Selenocysteine
  MOD_RES (350)..(350): Selenocysteine
  MOD_RES (352)..(352): Selenocysteine
  MOD_RES (356)..(356): Selenocysteine
  MOD_RES (374)..(374): Selenocysteine
  MOD_RES (436)..(436): Selenocysteine
  MOD_RES (451)..(451): Selenocysteine
  MOD_RES (469)..(469): Selenocysteine
  MOD_RES (474)..(474): Selenocysteine
  MOD_RES (485)..(485): Selenocysteine
  MOD_RES (487)..(487): Selenocysteine
  MOD_RES (504)..(504): Selenocysteine
  MOD_RES (523)..(523): Selenocysteine
  MOD_RES (534)..(534): Selenocysteine
  MOD_RES (536)..(536): Selenocysteine
  MOD_RES (552)..(552): Selenocysteine
  MOD_RES (555)..(555): Selenocysteine
  MOD_RES (563)..(563): Selenocysteine
  MOD_RES (571)..(571): Selenocysteine
  MOD_RES (610)..(610): Selenocysteine
  MOD_RES (632)..(632): Selenocysteine
  MOD_RES (661)..(661): Selenocysteine
XPXKPRSPLSVVEAFEWWSKCPRNHYPSXLYVXVRGLKVPDCIKPSYRSMMALQEEKGKPVHCERHHESSSVDXEPGLEESKEVIKWKRLPGQACRIPNKHLFSLNAGERGCFCLDFSHNGRILAAACASRDGYPIILYEIPSGRFMRELCGHLNIIYDLSWSKDDHYILXSSSDGXARIWKNEINNXNXFRVLPHPSFVYXAKFHPAVRELVVXGCYDSMIRIWKVEMREDSAILVRQFDVHKSFINSLCFDXEGHHMYSGDCXGVIVVWNXYVKINDLEHSVHHWXINKEIKEXEFKGIPISYLEIHPNGKRLLIHXKDSXLRIMDLRILVARKFVGAANYREKIHSXLXPCGXFLFAGSEDGIVYVWNPEXGEQVAMYSDLPFKSPIRDISYHPFENMVAFCAFGQNEPILLYIYDFHVAQQEAEMFKRYNGXFPLPGIHQSQDALCXCPKLPHQGSFQIDEFVHXESSSXKMQLVKQRLEXVXEVIRSCAAKVNKNLSFXSPPAVSSQQSKLKQSNMLXAQEILHQFGFXQXGIISIERKPCNHQVDXAPXVVALYDYXANRSDELXIHRGDIIRVFFKDNEDWWYGSIGKGQEGYFPANHVASEXLYQELPPEIKERSPPLSPEEKXKIEKSPAPQKQSINKNKSQDFRLGSESMXHKELKKS

SEQ ID NO: 2020 - protein, 542 aa, Homo sapiens
  MOD_RES (1)..(1): Any amino acid
  MOD_RES (69)..(69): Selenocysteine
  MOD_RES (75)..(75): Selenocysteine
  MOD_RES (86)..(86): Selenocysteine
  MOD_RES (88)..(88): Selenocysteine
  MOD_RES (100)..(100): Selenocysteine
  MOD_RES (113)..(113): Selenocysteine
  MOD_RES (152)..(152): Selenocysteine
  MOD_RES (163)..(163): Selenocysteine
  MOD_RES (171)..(171): Selenocysteine
  MOD_RES (186)..(186): Selenocysteine
  MOD_RES (194)..(194): Selenocysteine
  MOD_RES (217)..(217): Selenocysteine
  MOD_RES (221)..(221): Selenocysteine
  MOD_RES (248)..(248): Selenocysteine
  MOD_RES (250)..(250): Selenocysteine
  MOD_RES (254)..(254): Selenocysteine
  MOD_RES (272)..(272): Selenocysteine
  MOD_RES (334)..(334): Selenocysteine
  MOD_RES (349)..(349): Selenocysteine
  MOD_RES (367)..(367): Selenocysteine
  MOD_RES (372)..(372): Selenocysteine
  MOD_RES (383)..(383): Selenocysteine
  MOD_RES (385)..(385): Selenocysteine
  MOD_RES (402)..(402): Selenocysteine
  MOD_RES (421)..(421): Selenocysteine
  MOD_RES (432)..(432): Selenocysteine
  MOD_RES (434)..(434): Selenocysteine
  MOD_RES (450)..(450): Selenocysteine
  MOD_RES (453)..(453): Selenocysteine
  MOD_RES (461)..(461): Selenocysteine
  MOD_RES (469)..(469): Selenocysteine
  MOD_RES (508)..(508): Selenocysteine
  MOD_RES (530)..(530): Selenocysteine
XSLNAGERGCFCLDFSHNGRILAAACASRDGYPIILYEIPSGRFMRELCGHLNIIYDLSWSKDDHYILXSSSDGXARIWKNEINNXNXFRVLPHPSFVYXAKFHPAVRELVVXGCYDSMIRIWKVEMREDSAILVRQFDVHKSFINSLCFDXEGHHMYSGDCXGVIVVWNXYVKINDLEHSVHHWXINKEIKEXEFKGIPISYLEIHPNGKRLLIHXKDSXLRIMDLRILVARKFVGAANYREKIHSXLXPCGXFLFAGSEDGIVYVWNPEXGEQVAMYSDLPFKSPIRDISYHPFENMVAFCAFGQNEPILLYIYDFHVAQQEAEMFKRYNGXFPLPGIHQSQDALCXCPKLPHQGSFQIDEFVHXESSSXKMQLVKQRLEXVXEVIRSCAAKVNKNLSFXSPPAVSSQQSKLKQSNMLXAQEILHQFGFXQXGIISIERKPCNHQVDXAPXVVALYDYXANRSDELXIHRGDIIRVFFKDNEDWWYGSIGKGQEGYFPANHVASEXLYQELPPEIKERSPPLSPEEKXKIEKSPAPQKVK

SEQ ID NO: 2021 - protein, 848 aa, Homo sapiens
  MOD_RES (9)..(9): Selenocysteine
  MOD_RES (22)..(22): Selenocysteine
  MOD_RES (45)..(45): Selenocysteine
  MOD_RES (92)..(92): Selenocysteine
  MOD_RES (130)..(131): Selenocysteine
  MOD_RES (141)..(141): Selenocysteine
  MOD_RES (164)..(164): Selenocysteine
  MOD_RES (184)..(184): Selenocysteine
  MOD_RES (194)..(194): Selenocysteine
  MOD_RES (199)..(199): Selenocysteine
  MOD_RES (270)..(270): Selenocysteine
  MOD_RES (282)..(282): Selenocysteine
  MOD_RES (289)..(289): Selenocysteine
  MOD_RES (296)..(296): Selenocysteine
  MOD_RES (311)..(311): Selenocysteine
  MOD_RES (317)..(317): Selenocysteine
  MOD_RES (343)..(343): Selenocysteine
  MOD_RES (355)..(355): Selenocysteine
  MOD_RES (361)..(361): Selenocysteine
  MOD_RES (382)..(382): Selenocysteine
  MOD_RES (387)..(387): Selenocysteine
  MOD_RES (392)..(392): Selenocysteine
  MOD_RES (400)..(400): Selenocysteine
  MOD_RES (407)..(408): Selenocysteine
  MOD_RES (417)..(417): Selenocysteine
  MOD_RES (431)..(431): Selenocysteine
  MOD_RES (435)..(435): Selenocysteine
  MOD_RES (442)..(443): Selenocysteine
  MOD_RES (445)..(445): Selenocysteine
  MOD_RES (475)..(475): Selenocysteine
  MOD_RES (478)..(478): Selenocysteine
  MOD_RES (500)..(500): Selenocysteine
  MOD_RES (507)..(507): Selenocysteine
  MOD_RES (578)..(578): Selenocysteine
  MOD_RES (583)..(583): Selenocysteine
  MOD_RES (676)..(676): Selenocysteine
  MOD_RES (697)..(697): Selenocysteine
  MOD_RES (715)..(715): Selenocysteine
  MOD_RES (731)..(732): Selenocysteine
  MOD_RES (740)..(740): Selenocysteine
  MOD_RES (760)..(760): Selenocysteine
  MOD_RES (763)..(763): Selenocysteine
  MOD_RES (781)..(781): Selenocysteine
  MOD_RES (810)..(810): Selenocysteine
  MOD_RES (821)..(821): Selenocysteine
  MOD_RES (823)..(825): Selenocysteine
  MOD_RES (843)..(843): Selenocysteine
MNSSSANIXYASRKRRKPVQKXVKPIPAEGIKSNPSKRHRDRLNXELDRLASLLPFPQDVINKLDKLSVLRLSVSYLRAKSFFDVALKSSPXERNGGQDNCRAANFREGLNLQEGEFLLQALNGFVLVVXXDALVFYASSXIQDYLGFQQSDVIHQSVYELIHXEDRAEFQRQLHWALNPSQCXESGQGIEEAXGLPQXVVCYNPDQIPPENSPLMERCFICRLRCLLDNSSGFLAMNFQGKLKYLHGQKKKGKDGSILPPQLALFAIAXPLQPPSILEIRXKNFIFRXKHKLDFXPIGCDAKGRIVLGYXEAELCXRGSGYQFIHAADMLYCAESHIRMIKXGESGMIVFRLLXKNNRWXWVQSNARLLYKNGRPDYIIVXQRPLXDEEGXEHLRKRNXKLPFMFXXGEAVLYEAXNPFPAIMDPLPLRXKNGXSGKDSAXXSXLSKDSLNPSSLLAAMMQQDESIYLYPASSXSSXAPFENNFFNESMNECRNWQDNXAPMGNDXILKHEQIDQPQDVNSFAGGHPGLFQDSKNSDLYSIMKNLGIDFEDIRHMQNEKFFRNDFSGEVDFRDIDLXDEILXYVQDSLSKSPFIPSDYQQQQSLALNSSCMVQEHLHLEQQQQHHQKQVVVEPQQQLCQKMKHMQVNGMFENWNSNQFVPFNCPQQDPQQYNVFXDLHGISQEFPYKSEMDSMPYXQNFISCNQPVLPQHSKCXELDYPMGSFEPSPYPXXSSLEDFVXCLQLPENQKHGLNPQSAIIXPQXCYAGAVSMYQCQPEPQHXHVGQMQYNPVLPGQQAFLNKFQNGVLNEXYPAELNNINNXQXXXHLQPLHHPSEARPFPDLXSSGFL

SEQ ID NO: 2022 - protein, 215 aa, Homo sapiens
  MOD_RES (23)..(23): Selenocysteine
  MOD_RES (26)..(26): Selenocysteine
  MOD_RES (47)..(47): Selenocysteine
  MOD_RES (52)..(52): Selenocysteine
  MOD_RES (56)..(56): Selenocysteine
  MOD_RES (62)..(62): Selenocysteine
  MOD_RES (102)..(102): Selenocysteine
  MOD_RES (123)..(123): Selenocysteine
  MOD_RES (161)..(161): Selenocysteine
  MOD_RES (185)..(185): Selenocysteine
LLPSAAEMKMRSALLRAKPRADXAAXADAKDREEEQHRMLSRASGVXGRREXPGPXKPLPWXAGKHSEDGARPRLQPSKNDPPSLRPMPRGSCLPCPCVQGXFRNSPISHPPSPSPSAYSSRXSRPMRDVGEDQVHPPLCHFPQRSLQHQLPQPGAQRFAXRGYPMEDMKLQGVPMPPGDLCGPXLLLDVSIKMEKDSGCEGAADGCVPSQVWLG

SEQ ID NO: 2023 - protein, 12 aa, Homo sapiens
MHQNIYDYIHVD

SEQ ID NO: 2024 - protein, 547 aa, Homo sapiens
  MOD_RES (40)..(40): Selenocysteine
  MOD_RES (57)..(57): Selenocysteine
  MOD_RES (59)..(59): Selenocysteine
  MOD_RES (61)..(61): Selenocysteine
  MOD_RES (68)..(68): Selenocysteine
  MOD_RES (82)..(82): Selenocysteine
  MOD_RES (87)..(87): Selenocysteine
  MOD_RES (146)..(146): Selenocysteine
  MOD_RES (149)..(149): Selenocysteine
  MOD_RES (157)..(158): Selenocysteine
  MOD_RES (189)..(189): Selenocysteine
  MOD_RES (238)..(238): Selenocysteine
  MOD_RES (243)..(243): Selenocysteine
  MOD_RES (247)..(247): Selenocysteine
  MOD_RES (253)..(253): Selenocysteine
  MOD_RES (293)..(293): Selenocysteine
  MOD_RES (314)..(314): Selenocysteine
  MOD_RES (352)..(352): Selenocysteine
  MOD_RES (376)..(376): Selenocysteine
  MOD_RES (415)..(415): Selenocysteine
  MOD_RES (418)..(418): Selenocysteine
  MOD_RES (424)..(424): Selenocysteine
  MOD_RES (451)..(451): Selenocysteine
  MOD_RES (459)..(459): Selenocysteine
  MOD_RES (472)..(472): Selenocysteine
  MOD_RES (495)..(495): Selenocysteine
  MOD_RES (517)..(517): Selenocysteine
  MOD_RES (534)..(534): Selenocysteine
  MOD_RES (544)..(544): Selenocysteine
MHQNIYDYIHVDDRQDFCRQLHWAMDPPQVVFGQPPPLEXGDDAILGRLLRAQEWGXGXPXEYSAFLXRCFICRVRCLLDSXSGFLXMQFQGKLKFLFGQKKKAPSGAMLPPRLSLFCIAAPVLLPSAAEMKMRSALLRAKPRADXAAXADAKVKAXXSLCESELHGKPNYSAGRSSRESGVLVLREQXDAGRWAQVPARAPCLCLRGGPDLVLDPKGGSGDREEEQHRMLSRASGVXGRREXPGPXKPLPWXAGKHSEDGARPRLQPSKNDPPSLRPMPRGSCLPCPCVQGXFRNSPISHPPSPSPSAYSSRXSRPMRDVGEDQVHPPLCHFPQRSLQHQLPQPGAQRFAXRGYPMEDMKLQGVPMPPGDLCGPXLLLDVSIKMEKDSGCEGAADGCVPSQVWLGASDRSHPAXFPXRMHLKXEPDSRQQVYISHLGHGVRGAQPHGRAXAGRSRELXPFHPAHCACLEPXDGLPQSEPPHQLCARGRGEQSCXCRAAEAAPVVKREPLDSPQWAXHSQGMVPGMLPKSALAXLVPPQASGCXFLP

SEQ ID NO: 2025 - protein, 81 aa, Homo sapiens
  MOD_RES (8)..(8): Selenocysteine
MIPPGECXYAGRKRRRPLQKQRPAVGAEKSNPSKRHRDRLNAELDHLASLLPFPPDIISKLDKLSVLRLSVSYLRVKSFFQ

SEQ ID NO: 2026 - protein, 139 aa, Homo sapiens
  MOD_RES (8)..(8): Selenocysteine
  MOD_RES (97)..(97): Selenocysteine
  MOD_RES (113)..(113): Selenocysteine
  MOD_RES (119)..(119): Selenocysteine
  MOD_RES (136)..(136): Selenocysteine
MIPPGECXYAGRKRRRPLQKQRPAVGAEKSNPSKRHRDRLNAELDHLASLLPFPPDIISKLDKLSVLRLSVSYLRVKSFFQGQGLAVADAEDVDDHXGERRPMSFRRPRALDXQALRRXQFGLHLLMVNIAGLIAXDRL

SEQ ID NO: 2027 - protein, 157 aa, Homo sapiens
  MOD_RES (8)..(8): Selenocysteine
  MOD_RES (131)..(131): Selenocysteine
  MOD_RES (138)..(138): Selenocysteine
  MOD_RES (148)..(148): Selenocysteine
MIPPGECXYAGRKRRRPLQKQRPAVGAEKSNPSKRHRDRLNAELDHLASLLPFPPDIISKLDKLSVLRLSVSYLRVKSFFQVVQEQSSRQPAAGAPSPGDSCPLAGSAVLEGRLLLESLNGFALVVSAEGXIFYASAXIVDYLGFHQXDVMHQNIYD

SEQ ID NO: 2028 - protein, 719 aa, Homo sapiens
  MOD_RES (4)..(4): Selenocysteine
  MOD_RES (12)..(12): Selenocysteine
  MOD_RES (135)..(135): Selenocysteine
  MOD_RES (142)..(142): Selenocysteine
  MOD_RES (152)..(152): Selenocysteine
  MOD_RES (194)..(194): Selenocysteine
  MOD_RES (211)..(211): Selenocysteine
  MOD_RES (213)..(213): Selenocysteine
  MOD_RES (215)..(215): Selenocysteine
  MOD_RES (222)..(222): Selenocysteine
  MOD_RES (236)..(236): Selenocysteine
  MOD_RES (259)..(259): Selenocysteine
  MOD_RES (318)..(318): Selenocysteine
  MOD_RES (321)..(321): Selenocysteine
  MOD_RES (329)..(330): Selenocysteine
  MOD_RES (361)..(361): Selenocysteine
  MOD_RES (410)..(410): Selenocysteine
  MOD_RES (415)..(415): Selenocysteine
  MOD_RES (419)..(419): Selenocysteine
  MOD_RES (425)..(425): Selenocysteine
  MOD_RES (465)..(465): Selenocysteine
  MOD_RES (486)..(486): Selenocysteine
  MOD_RES (524)..(524): Selenocysteine
  MOD_RES (548)..(548): Selenocysteine
  MOD_RES (587)..(587): Selenocysteine
  MOD_RES (590)..(590): Selenocysteine
  MOD_RES (596)..(596): Selenocysteine
  MOD_RES (623)..(623): Selenocysteine
  MOD_RES (631)..(631): Selenocysteine
  MOD_RES (644)..(644): Selenocysteine
  MOD_RES (667)..(667): Selenocysteine
  MOD_RES (689)..(689): Selenocysteine
  MOD_RES (706)..(706): Selenocysteine
  MOD_RES (716)..(716): Selenocysteine
MPRXMIPPGECXYAGRKRRRPLQKQRPAVGAEKSNPSKRHRDRLNAELDHLASLLPFPPDIISKLDKLSVLRLSVSYLRVKSFFQVVQEQSSRQPAAGAPSPGDSCPLAGSAVLEGRLLLESLNGFALVVSAEGXIFYASAXIVDYLGFHQXDVMHQNIYDYIHVDDRQDFCRQLHWAMDPPQVVFGQPPPLEXGDDAILGRLLRAQEWGXGXPXEYSAFLXRCFICRVRCLLDSXSGFLARGSQAWQLRLCCPEPLMXMQFQGKLKFLFGQKKKAPSGAMLPPRLSLFCIAAPVLLPSAAEMKMRSALLRAKPRADXAAXADAKVKAXXSLCESELHGKPNYSAGRSSRESGVLVLREQXDAGRWAQVPARAPCLCLRGGPDLVLDPKGGSGDREEEQHRMLSRASGVXGRREXPGPXKPLPWXAGKHSEDGARPRLQPSKNDPPSLRPMPRGSCLPCPCVQGXFRNSPISHPPSPSPSAYSSRXSRPMRDVGEDQVHPPLCHFPQRSLQHQLPQPGAQRFAXRGYPMEDMKLQGVPMPPGDLCGPXLLLDVSIKMEKDSGCEGAADGCVPSQVWLGASDRSHPAXFPXRMHLKXEPDSRQQVYISHLGHGVRGAQPHGRAXAGRSRELXPFHPAHCACLEPXDGLPQSEPPHQLCARGRGEQSCXCRAAEAAPVVKREPLDSPQWAXHSQGMVPGMLPKSALAXLVPPQASGCXFLP

SEQ ID NO: 2029 - protein, 701 aa, Homo sapiens
  MOD_RES (4)..(4): Selenocysteine
  MOD_RES (12)..(12): Selenocysteine
  MOD_RES (135)..(135): Selenocysteine
  MOD_RES (142)..(142): Selenocysteine
  MOD_RES (152)..(152): Selenocysteine
  MOD_RES (194)..(194): Selenocysteine
  MOD_RES (211)..(211): Selenocysteine
  MOD_RES (213)..(213): Selenocysteine
  MOD_RES (215)..(215): Selenocysteine
  MOD_RES (222)..(222): Selenocysteine
  MOD_RES (236)..(236): Selenocysteine
  MOD_RES (241)..(241): Selenocysteine
  MOD_RES (300)..(300): Selenocysteine
  MOD_RES (303)..(303): Selenocysteine
  MOD_RES (311)..(312): Selenocysteine
  MOD_RES (343)..(343): Selenocysteine
  MOD_RES (392)..(392): Selenocysteine
  MOD_RES (397)..(397): Selenocysteine
  MOD_RES (401)..(401): Selenocysteine
  MOD_RES (407)..(407): Selenocysteine
  MOD_RES (447)..(447): Selenocysteine
  MOD_RES (468)..(468): Selenocysteine
  MOD_RES (506)..(506): Selenocysteine
  MOD_RES (530)..(530): Selenocysteine
  MOD_RES (569)..(569): Selenocysteine
  MOD_RES (572)..(572): Selenocysteine
  MOD_RES (578)..(578): Selenocysteine
  MOD_RES (605)..(605): Selenocysteine
  MOD_RES (613)..(613): Selenocysteine
  MOD_RES (626)..(626): Selenocysteine
  MOD_RES (649)..(649): Selenocysteine
  MOD_RES (671)..(671): Selenocysteine
  MOD_RES (688)..(688): Selenocysteine
  MOD_RES (698)..(698): Selenocysteine
MPRXMIPPGECXYAGRKRRRPLQKQRPAVGAEKSNPSKRHRDRLNAELDHLASLLPFPPDIISKLDKLSVLRLSVSYLRVKSFFQVVQEQSSRQPAAGAPSPGDSCPLAGSAVLEGRLLLESLNGFALVVSAEGXIFYASAXIVDYLGFHQXDVMHQNIYDYIHVDDRQDFCRQLHWAMDPPQVVFGQPPPLEXGDDAILGRLLRAQEWGXGXPXEYSAFLXRCFICRVRCLLDSXSGFLXMQFQGKLKFLFGQKKKAPSGAMLPPRLSLFCIAAPVLLPSAAEMKMRSALLRAKPRADXAAXADAKVKAXXSLCESELHGKPNYSAGRSSRESGVLVLREQXDAGRWAQVPARAPCLCLRGGPDLVLDPKGGSGDREEEQHRMLSRASGVXGRREXPGPXKPLPWXAGKHSEDGARPRLQPSKNDPPSLRPMPRGSCLPCPCVQGXFRNSPISHPPSPSPSAYSSRXSRPMRDVGEDQVHPPLCHFPQRSLQHQLPQPGAQRFAXRGYPMEDMKLQGVPMPPGDLCGPXLLLDVSIKMEKDSGCEGAADGCVPSQVWLGASDRSHPAXFPXRMHLKXEPDSRQQVYISHLGHGVRGAQPHGRAXAGRSRELXPFHPAHCACLEPXDGLPQSEPPHQLCARGRGEQSCXCRAAEAAPVVKREPLDSPQWAXHSQGMVPGMLPKSALAXLVPPQASGCXFLP

SEQ ID NO: 2030 - protein, 557 aa, Homo sapiens
  MOD_RES (8)..(8): Selenocysteine
  MOD_RES (50)..(50): Selenocysteine
  MOD_RES (67)..(67): Selenocysteine
  MOD_RES (69)..(69): Selenocysteine
  MOD_RES (71)..(71): Selenocysteine
  MOD_RES (78)..(78): Selenocysteine
  MOD_RES (92)..(92): Selenocysteine
  MOD_RES (97)..(97): Selenocysteine
  MOD_RES (156)..(156): Selenocysteine
  MOD_RES (159)..(159): Selenocysteine
  MOD_RES (167)..(168): Selenocysteine
  MOD_RES (199)..(199): Selenocysteine
  MOD_RES (248)..(248): Selenocysteine
  MOD_RES (253)..(253): Selenocysteine
  MOD_RES (257)..(257): Selenocysteine
  MOD_RES (263)..(263): Selenocysteine
  MOD_RES (303)..(303): Selenocysteine
  MOD_RES (324)..(324): Selenocysteine
  MOD_RES (362)..(362): Selenocysteine
  MOD_RES (386)..(386): Selenocysteine
  MOD_RES (425)..(425): Selenocysteine
  MOD_RES (428)..(428): Selenocysteine
  MOD_RES (434)..(434): Selenocysteine
  MOD_RES (461)..(461): Selenocysteine
  MOD_RES (469)..(469): Selenocysteine
  MOD_RES (482)..(482): Selenocysteine
  MOD_RES (505)..(505): Selenocysteine
  MOD_RES (527)..(527): Selenocysteine
  MOD_RES (544)..(544): Selenocysteine
  MOD_RES (554)..(554): Selenocysteine
MRGRGMPXDVMHQNIYDYIHVDDRQDFCRQLHWAMDPPQVVFGQPPPLEXGDDAILGRLLRAQEWGXGXPXEYSAFLXRCFICRVRCLLDSXSGFLXMQFQGKLKFLFGQKKKAPSGAMLPPRLSLFCIAAPVLLPSAAEMKMRSALLRAKPRADXAAXADAKVKAXXSLCESELHGKPNYSAGRSSRESGVLVLREQXDAGRWAQVPARAPCLCLRGGPDLVLDPKGGSGDREEEQHRMLSRASGVXGRREXPGPXKPLPWXAGKHSEDGARPRLQPSKNDPPSLRPMPRGSCLPCPCVQGXFRNSPISHPPSPSPSAYSSRXSRPMRDVGEDQVHPPLCHFPQRSLQHQLPQPGAQRFAXRGYPMEDMKLQGVPMPPGDLCGPXLLLDVSIKMEKDSGCEGAADGCVPSQVWLGASDRSHPAXFPXRMHLKXEPDSRQQVYISHLGHGVRGAQPHGRAXAGRSRELXPFHPAHCACLEPXDGLPQSEPPHQLCARGRGEQSCXCRAAEAAPVVKREPLDSPQWAXHSQGMVPGMLPKSALAXLVPPQASGCXFLP

SEQ ID NO: 2031 - protein, 368 aa, Homo sapiens
  MOD_RES (37)..(37): Selenocysteine
  MOD_RES (59)..(59): Selenocysteine
  MOD_RES (84)..(84): Selenocysteine
  MOD_RES (87)..(88): Selenocysteine
  MOD_RES (95)..(95): Selenocysteine
  MOD_RES (159)..(159): Selenocysteine
  MOD_RES (198)..(198): Selenocysteine
  MOD_RES (203)..(203): Selenocysteine
  MOD_RES (207)..(207): Selenocysteine
  MOD_RES (215)..(215): Selenocysteine
  MOD_RES (234)..(234): Selenocysteine
  MOD_RES (247)..(247): Selenocysteine
  MOD_RES (253)..(253): Selenocysteine
  MOD_RES (271)..(271): Selenocysteine
  MOD_RES (320)..(320): Selenocysteine
  MOD_RES (340)..(340): Selenocysteine
  MOD_RES (342)..(342): Selenocysteine
MKSLVLLLCLAQLWGCHSAPHGPGLIYRQPNCDDPEXEEAALVAIDYINQNLPWGYKHXLNQIDEVKVWPQQPSGELFEIEIDXLEXXCHVLDPXPVARCSVRQLKEHAVEGDCDFQLLKLDGKFSVVYAKCDSSPADSAEDVRKVCQDCPLLAPLNDXRVVHAAKAALAAFNAQNNGSNFQLEEISRAQLVPLPPSXYVEFXVSGXDCVAKEAXEAAKCNLLAEKQYGFCKAXLSEKLGGAEVAVXCMVFQXQPVSSQPQPEGANEAVPXPVVDPDAPPSPPLGAPGLPPAGSPPDSHVLLAAPPGHQLHRAHYDLRHXFMGVVSLGSPSGEVSHPRKXRXVVQPSVGAAAGPVVPPCPGRIRHFKV

SEQ ID NO: 2032 - protein, 367 aa, Homo sapiens
  MOD_RES (37)..(37): Selenocysteine
  MOD_RES (59)..(59): Selenocysteine
  MOD_RES (84)..(84): Selenocysteine
  MOD_RES (87)..(88): Selenocysteine
  MOD_RES (95)..(95): Selenocysteine
  MOD_RES (158)..(158): Selenocysteine
  MOD_RES (197)..(197): Selenocysteine
  MOD_RES (202)..(202): Selenocysteine
  MOD_RES (206)..(206): Selenocysteine
  MOD_RES (214)..(214): Selenocysteine
  MOD_RES (233)..(233): Selenocysteine
  MOD_RES (246)..(246): Selenocysteine
  MOD_RES (252)..(252): Selenocysteine
  MOD_RES (270)..(270): Selenocysteine
  MOD_RES (319)..(319): Selenocysteine
  MOD_RES (339)..(339): Selenocysteine
  MOD_RES (341)..(341): Selenocysteine
MKSLVLLLCLAQLWGCHSAPHGPGLIYRQPNCDDPEXEEAALVAIDYINQNLPWGYKHXLNQIDEVKVWPQQPSGELFEIEIDXLEXXCHVLDPXPVARCSVRQLKEHAVEGDCDFQLLKLDGKFSVVYAKCDSSPDSAEDVRKVCQDCPLLAPLNDXRVVHAAKAALAAFNAQNNGSNFQLEEISRAQLVPLPPSXYVEFXVSGXDCVAKEAXEAAKCNLLAEKQYGFCKAXLSEKLGGAEVAVXCMVFQXQPVSSQPQPEGANEAVPXPVVDPDAPPSPPLGAPGLPPAGSPPDSHVLLAAPPGHQLHRAHYDLRHXFMGVVSLGSPSGEVSHPRKXRXVVQPSVGAAAGPVVPPCPGRIRHFKV

SEQ ID NO: 2033 - protein, 161 aa, Homo sapiens
  MOD_RES (8)..(8): Selenocysteine
  MOD_RES (96)..(96): Selenocysteine
  MOD_RES (114)..(114): Selenocysteine
  MOD_RES (149)..(149): Selenocysteine
GRKASEKXGGREGEPADRGLQLGGKAFGLLKAQQEERLDEINKQFLDDPKYSSDEDLPSKLEGFKEKYMEFDLNGNGDIDIMSLKRMLEKLGVPKXHLELKKLIGEVSSGSGEXFSYPDFLRMMLGKRSAILKMILMYEEKAREKEKPXGPPAKKAISELP

SEQ ID NO: 2034 - protein, 93 aa, Homo sapiens
  MOD_RES (28)..(28): Selenocysteine
  MOD_RES (46)..(46): Selenocysteine
  MOD_RES (81)..(81): Selenocysteine
MEFDLNGNGDIDIMSLKRMLEKLGVPKXHLELKKLIGEVSSGSGEXFSYPDFLRMMLGKRSAILKMILMYEEKAREKEKPXGPPAKKAISELP

SEQ ID NO: 2035 - protein, 147 aa, Homo sapiens
  MOD_RES (4)..(4): Selenocysteine
  MOD_RES (82)..(82): Selenocysteine
  MOD_RES (100)..(100): Selenocysteine
  MOD_RES (135)..(135): Selenocysteine
MSQXRDLQGGKAFGLLKAQQEERLDEINKQFLDDPKYSSDEDLPSKLEGFKEKYMEFDLNGNGDIDIMSLKRMLEKLGVPKXHLELKKLIGEVSSGSGEXFSYPDFLRMMLGKRSAILKMILMYEEKAREKEKPXGPPAKKAISELP

SEQ ID NO: 2036 - protein, 326 aa, Homo sapiens
  MOD_RES (22)..(22): Selenocysteine
  MOD_RES (41)..(41): Selenocysteine
  MOD_RES (65)..(65): Selenocysteine
  MOD_RES (104)..(104): Selenocysteine
  MOD_RES (122)..(122): Selenocysteine
  MOD_RES (183)..(183): Selenocysteine
  MOD_RES (217)..(217): Selenocysteine
  MOD_RES (225)..(225): Selenocysteine
  MOD_RES (234)..(234): Selenocysteine
  MOD_RES (239)..(239): Selenocysteine
  MOD_RES (247)..(247): Selenocysteine
  MOD_RES (255)..(255): Selenocysteine
  MOD_RES (260)..(260): Selenocysteine
MFRCGGLAAGALKQKLVPLVRXVCVRSPRQRNRLPARALGXEVIQLFPEKGNMGKILPEYLSNWXMEKVRREGVKVMPNAIVQSVGVSSGKLLIKLKDGRKVEXDHIVAAVGLEPNVELAKXGGLEIDSDFGGFRVNAELQARSNIWVAGDAACFYDIKLGRRRVEHHDHAVVSGRLAGENMXGAAKPYWHQSMFWSDLGPDVGYEAIGLVDSSLPXVGVFAKAXAQDNPKSAXEQSGXGIRSESEXESEASEIXIPPSXPAVPQAPVQGEDYGKGVIFYLRDKVVVGIVLWNIFNRMPIARKIIKDGEQHEDLNEVAKLFNIHED

SEQ ID NO: 2037 - protein, 43 aa, Homo sapiens
  MOD_RES (22)..(22): Selenocysteine
MFRCGGLAAGALKQKLVPLVRXVCVRSPRQRNRLPGLQDYERG

SEQ ID NO: 2038 - protein, 324 aa, Homo sapiens
  MOD_RES (22)..(22): Selenocysteine
  MOD_RES (51)..(51): Selenocysteine
  MOD_RES (77)..(77): Selenocysteine
  MOD_RES (87)..(87): Selenocysteine
  MOD_RES (105)..(105): Selenocysteine
  MOD_RES (141)..(141): Selenocysteine
  MOD_RES (188)..(188): Selenocysteine
  MOD_RES (190)..(190): Selenocysteine
  MOD_RES (229)..(229): Selenocysteine
  MOD_RES (252)..(252): Selenocysteine
  MOD_RES (260)..(260): Selenocysteine
  MOD_RES (263)..(263): Selenocysteine
  MOD_RES (281)..(282): Selenocysteine
  MOD_RES (304)..(304): Selenocysteine
MFRCGGLAAGALKQKLVPLVRXVCVRSPRQRNRLPGNLFQRWHVPLELQMXRQMASSGASGGKIDNSVLVLIVGLSXVGAGAYAYKXMKEDEKRYNERISGLGLXPEQKQKKAALSASEGEEVPQDKAPSHVPFLLIGGGXAAFAAARSIRARDPGARVLIVSEDPELPYMRPPLSKELWFSDDPNVXKXLRFKQWNGKERSIYFQPPSFYVSAQDLPHIENGGVAVLXGKKVVQLDVRDNMVKLNDGSQIXYEKCLIAXGGXPRSLSAIDRAGAEVKSRXXLFRKIGDFRSLEKISREVKSIXIIGGGFLGSELACALGRKDI

SEQ ID NO: 2039 - protein, 613 aa, Homo sapiens
  MOD_RES (22)..(22): Selenocysteine
  MOD_RES (51)..(51): Selenocysteine
  MOD_RES (77)..(77): Selenocysteine
  MOD_RES (87)..(87): Selenocysteine
  MOD_RES (105)..(105): Selenocysteine
  MOD_RES (141)..(141): Selenocysteine
  MOD_RES (188)..(188): Selenocysteine
  MOD_RES (190)..(190): Selenocysteine
  MOD_RES (229)..(229): Selenocysteine
  MOD_RES (252)..(252): Selenocysteine
  MOD_RES (260)..(260): Selenocysteine
  MOD_RES (263)..(263): Selenocysteine
  MOD_RES (281)..(282): Selenocysteine
  MOD_RES (304)..(304): Selenocysteine
  MOD_RES (328)..(328): Selenocysteine
  MOD_RES (352)..(352): Selenocysteine
  MOD_RES (391)..(391): Selenocysteine
  MOD_RES (409)..(409): Selenocysteine
  MOD_RES (470)..(470): Selenocysteine
  MOD_RES (504)..(504): Selenocysteine
  MOD_RES (512)..(512): Selenocysteine
  MOD_RES (521)..(521): Selenocysteine
  MOD_RES (526)..(526): Selenocysteine
  MOD_RES (534)..(534): Selenocysteine
  MOD_RES (542)..(542): Selenocysteine
  MOD_RES (547)..(547): Selenocysteine
MFRCGGLAAGALKQKLVPLVRXVCVRSPRQRNRLPGNLFQRWHVPLELQMXRQMASSGASGGKIDNSVLVLIVGLSXVGAGAYAYKXMKEDEKRYNERISGLGLXPEQKQKKAALSASEGEEVPQDKAPSHVPFLLIGGGXAAFAAARSIRARDPGARVLIVSEDPELPYMRPPLSKELWFSDDPNVXKXLRFKQWNGKERSIYFQPPSFYVSAQDLPHIENGGVAVLXGKKVVQLDVRDNMVKLNDGSQIXYEKCLIAXGGXPRSLSAIDRAGAEVKSRXXLFRKIGDFRSLEKISREVKSIXIIGGGFLGSELACALGRKARALGXEVIQLFPEKGNMGKILPEYLSNWXMEKVRREGVKVMPNAIVQSVGVSSGKLLIKLKDGRKVEXDHIVAAVGLEPNVELAKXGGLEIDSDFGGFRVNAELQARSNIWVAGDAACFYDIKLGRRRVEHHDHAVVSGRLAGENMXGAAKPYWHQSMFWSDLGPDVGYEAIGLVDSSLPXVGVFAKAXAQDNPKSAXEQSGXGIRSESEXESEASEIXIPPSXPAVPQAPVQGEDYGKGVIFYLRDKVVVGIVLWNIFNRMPIARKIIKDGEQHEDLNEVAKLFNIHED

SEQ ID NO: 2040 - protein, 89 aa, Homo sapiens
  MOD_RES (22)..(22): Selenocysteine
  MOD_RES (51)..(51): Selenocysteine
  MOD_RES (77)..(77): Selenocysteine
  MOD_RES (89)..(89): Selenocysteine
MFRCGGLAAGALKQKLVPLVRXVCVRSPRQRNRLPGNLFQRWHVPLELQMXRQMASSGASGGKIDNSVLVLIVGLSXVGAGAYLCSLIX

SEQ ID NO: 2041 - protein, 609 aa, Homo sapiens
  MOD_RES (22)..(22): Selenocysteine
  MOD_RES (52)..(52): Selenocysteine
  MOD_RES (71)..(71): Selenocysteine
  MOD_RES (73)..(73): Selenocysteine
  MOD_RES (83)..(83): Selenocysteine
  MOD_RES (101)..(101): Selenocysteine
  MOD_RES (137)..(137): Selenocysteine
  MOD_RES (184)..(184): Selenocysteine
  MOD_RES (186)..(186): Selenocysteine
  MOD_RES (225)..(225): Selenocysteine
  MOD_RES (248)..(248): Selenocysteine
  MOD_RES (256)..(256): Selenocysteine
  MOD_RES (259)..(259): Selenocysteine
  MOD_RES (277)..(278): Selenocysteine
  MOD_RES (300)..(300): Selenocysteine
  MOD_RES (324)..(324): Selenocysteine
  MOD_RES (348)..(348): Selenocysteine
  MOD_RES (387)..(387): Selenocysteine
  MOD_RES (405)..(405): Selenocysteine
  MOD_RES (466)..(466): Selenocysteine
  MOD_RES (500)..(500): Selenocysteine
  MOD_RES (508)..(508): Selenocysteine
  MOD_RES (517)..(517): Selenocysteine
  MOD_RES (522)..(522): Selenocysteine
  MOD_RES (530)..(530): Selenocysteine
  MOD_RES (538)..(538): Selenocysteine
  MOD_RES (543)..(543): Selenocysteine
MFRCGGLAAGALKQKLVPLVRXVCVRSPRQRNRLPVVQSHHLGSPSRSLASXGASGKDGSNLVYFLIVGAXVXGAGVYYAYKXMKEDEKRYNERISGLGLXPEQKQKKAALSASEGEEVPQDKAPSHVPFLLIGGGXAAFAAARSIRARDPGARVLIVSEDPELPYMRPPLSKELWFSDDPNVXKXLRFKQWNGKERSIYFQPPSFYVSAQDLPHIENGGVAVLXGKKVVQLDVRDNMVKLNDGSQIXYEKCLIAXGGXPRSLSAIDRAGAEVKSRXXLFRKIGDFRSLEKISREVKSIXIIGGGFLGSELACALGRKARALGXEVIQLFPEKGNMGKILPEYLSNWXMEKVRREGVKVMPNAIVQSVGVSSGKLLIKLKDGRKVEXDHIVAAVGLEPNVELAKXGGLEIDSDFGGFRVNAELQARSNIWVAGDAACFYDIKLGRRRVEHHDHAVVSGRLAGENMXGAAKPYWHQSMFWSDLGPDVGYEAIGLVDSSLPXVGVFAKAXAQDNPKSAXEQSGXGIRSESEXESEASEIXIPPSXPAVPQAPVQGEDYGKGVIFYLRDKVVVGIVLWNIFNRMPIARKIIKDGEQHEDLNEVAKLFNIHED

SEQ ID NO: 2042 - protein, 274 aa, Homo sapiens
  MOD_RES (13)..(13): Selenocysteine
  MOD_RES (52)..(52): Selenocysteine
  MOD_RES (70)..(70): Selenocysteine
  MOD_RES (131)..(131): Selenocysteine
  MOD_RES (165)..(165): Selenocysteine
  MOD_RES (173)..(173): Selenocysteine
  MOD_RES (182)..(182): Selenocysteine
  MOD_RES (187)..(187): Selenocysteine
  MOD_RES (195)..(195): Selenocysteine
  MOD_RES (203)..(203): Selenocysteine
  MOD_RES (208)..(208): Selenocysteine
MGKILPEYLSNWXMEKVRREGVKVMPNAIVQSVGVSSGKLLIKLKDGRKVEXDHIVAAVGLEPNVELAKXGGLEIDSDFGGFRVNAELQARSNIWVAGDAACFYDIKLGRRRVEHHDHAVVSGRLAGENMXGAAKPYWHQSMFWSDLGPDVGYEAIGLVDSSLPXVGVFAKAXAQDNPKSAXEQSGXGIRSESEXESEASEIXIPPSXPAVPQAPVQGEDYGKGVIFYLRDKVVVGIVLWNIFNRMPIARKIIKDGEQHEDLNEVAKLFNIHED

SEQ ID NO: 2043 - protein, 343 aa, Homo sapiens
  MOD_RES (12)..(12): Selenocysteine
  MOD_RES (18)..(18): Selenocysteine
  MOD_RES (37)..(37): Selenocysteine
  MOD_RES (42)..(42): Selenocysteine
  MOD_RES (50)..(50): Selenocysteine
  MOD_RES (65)..(65): Selenocysteine
  MOD_RES (96)..(96): Selenocysteine
  MOD_RES (166)..(166): Selenocysteine
  MOD_RES (169)..(169): Selenocysteine
  MOD_RES (180)..(180): Selenocysteine
  MOD_RES (183)..(183): Selenocysteine
  MOD_RES (195)..(195): Selenocysteine
  MOD_RES (249)..(249): Selenocysteine
  MOD_RES (254)..(254): Selenocysteine
  MOD_RES (257)..(257): Selenocysteine
  MOD_RES (262)..(262): Selenocysteine
  MOD_RES (274)..(274): Selenocysteine
  MOD_RES (288)..(288): Selenocysteine
  MOD_RES (301)..(301): Selenocysteine
  MOD_RES (313)..(313): Selenocysteine
  MOD_RES (316)..(316): Selenocysteine
  MOD_RES (327)..(327): Selenocysteine
  MOD_RES (333)..(333): Selenocysteine
  MOD_RES (343)..(343): Selenocysteine
MESKYKEILLLXGLDNIXDEELDRFKFFLSDEFNIAXGKLHXANRIQVAXLMIQNAGAVSAVMKXIRIFQKLNYMLLAKRLQEEKEKVDKQYKSVXKPKPLSQAEMSPAASAAIRNDVAKQRAAPKVSPHVKPEQKQMVAQQESIREGFQKRCLPVMVLKAKKPFXFEXQEGKQEMFHAXVAXEKEFFFVKVFNXLLKDKFIPKRIIIIARYYRHSGFLEVNSASRVLDAESDQKVNVPLNIIRKAGEXPKINXLQXQPLGXIVNGLFVVQKVXEKKKNILFDLSDNXGKMEVLGVRNEDXMKCKEGDKVRLXFFXLSKNGEKLQLXSGVHSXIKVIKAKKKX

SEQ ID NO: 2044 - protein, 167 aa, Homo sapiens
  MOD_RES (29)..(29): Selenocysteine
  MOD_RES (32)..(32): Selenocysteine
  MOD_RES (43)..(43): Selenocysteine
  MOD_RES (46)..(46): Selenocysteine
  MOD_RES (58)..(58): Selenocysteine
  MOD_RES (112)..(112): Selenocysteine
  MOD_RES (117)..(117): Selenocysteine
  MOD_RES (120)..(120): Selenocysteine
  MOD_RES (125)..(125): Selenocysteine
  MOD_RES (137)..(137): Selenocysteine
  MOD_RES (151)..(151): Selenocysteine
  MOD_RES (164)..(164): Selenocysteine
MVAQQESIREGFQKRCLPVMVLKAKKPFXFEXQEGKQEMFHAXVAXEKEFFFVKVFNXLLKDKFIPKRIIIIARYYRHSGFLEVNSASRVLDAESDQKVNVPLNIIRKAGEXPKINXLQXQPLGXIVNGLFVVQKVXEKKKNILFDLSDNXGKMEVLGVRNEDXMKC

SEQ ID NO: 2045 - protein, 150 aa, Homo sapiens
  MOD_RES (41)..(41): Selenocysteine
  MOD_RES (84)..(84): Selenocysteine
  MOD_RES (100)..(100): Selenocysteine
  MOD_RES (103)..(104): Selenocysteine
  MOD_RES (109)..(109): Selenocysteine
  MOD_RES (117)..(117): Selenocysteine
MANNDAVLKRLEQKGAEADQIIEYLKQQVSLLKEKAILQAXLREEKKLRVENAKLKKEIEELKQELIQAEIQNGVKQIPFPSGXPLHANSMVSENVIQSXAVXXVSSGXKEQIKGGXGDEKKAKEKIEKKGEKKEKKQQSIAGSADSKPI

SEQ ID NO: 2046 - protein, 312 aa, Homo sapiens
  MOD_RES (41)..(41): Selenocysteine
  MOD_RES (84)..(84): Selenocysteine
  MOD_RES (100)..(100): Selenocysteine
  MOD_RES (103)..(104): Selenocysteine
  MOD_RES (109)..(109): Selenocysteine
  MOD_RES (117)..(117): Selenocysteine
  MOD_RES (164)..(164): Selenocysteine
  MOD_RES (188)..(188): Selenocysteine
  MOD_RES (252)..(252): Selenocysteine
  MOD_RES (280)..(280): Selenocysteine
  MOD_RES (287)..(287): Selenocysteine
  MOD_RES (305)..(305): Selenocysteine
MANNDAVLKRLEQKGAEADQIIEYLKQQVSLLKEKAILQAXLREEKKLRVENAKLKKEIEELKQELIQAEIQNGVKQIPFPSGXPLHANSMVSENVIQSXAVXXVSSGXKEQIKGGXGDEKKAKEKIEKKGEKKEKKQQSIAGSADSKPIDVSRLDLRIGCIIXARKHPDADSLYVEEVDVGEIAPRXVVSGLVNHVPLEQMQNRMVILLCNLKPAKMRGVLSQAMVMCASSPEKIEILAPPNGSVPGDRIXFDAFPGEPDKELNPKKKIWEQIQPDLHXNDECVAXYKGVPFEVKGKGVCRAQXMSNSGIK

SEQ ID NO: 2047 - protein, 336 aa, Homo sapiens
  MOD_RES (65)..(65): Selenocysteine
  MOD_RES (108)..(108): Selenocysteine
  MOD_RES (124)..(124): Selenocysteine
  MOD_RES (127)..(128): Selenocysteine
  MOD_RES (133)..(133): Selenocysteine
  MOD_RES (141)..(141): Selenocysteine
  MOD_RES (188)..(188): Selenocysteine
  MOD_RES (212)..(212): Selenocysteine
  MOD_RES (276)..(276): Selenocysteine
  MOD_RES (304)..(304): Selenocysteine
  MOD_RES (311)..(311): Selenocysteine
  MOD_RES (329)..(329): Selenocysteine
MLPAVAVSEPVVLRFMIFCRLLAKMANNDAVLKRLEQKGAEADQIIEYLKQQVSLLKEKAILQAXLREEKKLRVENAKLKKEIEELKQELIQAEIQNGVKQIPFPSGXPLHANSMVSENVIQSXAVXXVSSGXKEQIKGGXGDEKKAKEKIEKKGEKKEKKQQSIAGSADSKPIDVSRLDLRIGCIIXARKHPDADSLYVEEVDVGEIAPRXVVSGLVNHVPLEQMQNRMVILLCNLKPAKMRGVLSQAMVMCASSPEKIEILAPPNGSVPGDRIXFDAFPGEPDKELNPKKKIWEQIQPDLHXNDECVAXYKGVPFEVKGKGVCRAQXMSNSGIK

SEQ ID NO: 2048 - protein, 188 aa, Homo sapiens
  MOD_RES (46)..(46): Selenocysteine
  MOD_RES (55)..(55): Selenocysteine
  MOD_RES (115)..(115): Selenocysteine
GQRHCCGVAQMREHSSLGHADLDALQQNPQPLIFHMEMLKVESPGXYQQDPWAMXDEEKAKAVPLIHQEGNRLYREGHVKEAAAKYYDAIACLKNLQMKEQPGSPEWIQLDQQIXPLLLNYCQCKLVVEEYYEVLDHCSSILNKYDGEHRALGCRGLRVVREWPFSCHCWGQDLAFHNPHSELPRGPD

SEQ ID NO: 2049 - protein, 330 aa, Homo sapiens
  MOD_RES (32)..(32): Selenocysteine
  MOD_RES (35)..(35): Selenocysteine
  MOD_RES (40)..(40): Selenocysteine
  MOD_RES (48)..(48): Selenocysteine
  MOD_RES (75)..(75): Selenocysteine
  MOD_RES (79)..(79): Selenocysteine
  MOD_RES (162)..(162): Selenocysteine
  MOD_RES (171)..(171): Selenocysteine
  MOD_RES (231)..(231): Selenocysteine
MADIIARLREDGIQKRVIQEGRGELPDFQDGXKAXFHYRXLHSDDEGXVLDDSRARGKPMELIIGKKFKLPVWEXIVCXMREGEIAQFLCDIKHVVLYPLVAKSLRNIAVGKDPLEGQRHCCGVAQMREHSSLGHADLDALQQNPQPLIFHMEMLKVESPGXYQQDPWAMXDEEKAKAVPLIHQEGNRLYREGHVKEAAAKYYDAIACLKNLQMKEQPGSPEWIQLDQQIXPLLLNYCQCKLVVEEYYEVLDHCSSILNKYDDNVKAYFKRGKAHAAVWNAQEAQADFAKVLELDPALAPVVSRELRALEARIRQKDEEDKARFRGIFSH

SEQ ID NO: 2050 - protein, 232 aa, Homo sapiens
  MOD_RES (32)..(32): Selenocysteine
  MOD_RES (35)..(35): Selenocysteine
  MOD_RES (40)..(40): Selenocysteine
  MOD_RES (48)..(48): Selenocysteine
  MOD_RES (75)..(75): Selenocysteine
  MOD_RES (79)..(79): Selenocysteine
  MOD_RES (99)..(99): Selenocysteine
  MOD_RES (108)..(108): Selenocysteine
  MOD_RES (168)..(168): Selenocysteine
MADIIARLREDGIQKRVIQEGRGELPDFQDGXKAXFHYRXLHSDDEGXVLDDSRARGKPMELIIGKKFKLPVWEXIVCXMREGEIAQFLCDIKVESPGXYQQDPWAMXDEEKAKAVPLIHQEGNRLYREGHVKEAAAKYYDAIACLKNLQMKEQPGSPEWIQLDQQIXPLLLNYCQCKLVVEEYYEVLDHCSSILNKYDDNVKAYFKRGKAHAAVWNAQEAQADFAKVLELD

SEQ ID NO: 2051 - protein, 545 aa, Homo sapiens
  MOD_RES (3)..(3): Selenocysteine
  MOD_RES (16)..(16): Selenocysteine
  MOD_RES (46)..(46): Selenocysteine
  MOD_RES (68)..(68): Selenocysteine
  MOD_RES (72)..(72): Selenocysteine
  MOD_RES (130)..(130): Selenocysteine
  MOD_RES (147)..(147): Selenocysteine
  MOD_RES (151)..(151): Selenocysteine
  MOD_RES (183)..(183): Selenocysteine
  MOD_RES (232)..(232): Selenocysteine
  MOD_RES (334)..(334): Selenocysteine
  MOD_RES (344)..(344): Selenocysteine
  MOD_RES (364)..(364): Selenocysteine
  MOD_RES (390)..(391): Selenocysteine
  MOD_RES (441)..(441): Selenocysteine
  MOD_RES (447)..(447): Selenocysteine
  MOD_RES (463)..(463): Selenocysteine
  MOD_RES (468)..(468): Selenocysteine
  MOD_RES (480)..(480): Selenocysteine
  MOD_RES (504)..(504): Selenocysteine
  MOD_RES (524)..(524): Selenocysteine
MAXDAALRRLLRLHRXEIAVAVDSAFPLLHALADHDVVPEDKFQEXLHLKEKEGCPQAFHALLSWLLXQDSXAILDFWRVLFKDYNLERYGRLQPILDSFPKDVDLSQPRKGRKPPAVPKALVPPPRLPXKRKASEEARAAAPAALXPRGXASPGSQLKAKPPKKPESSAEQQRLPLGNGIQXMSASVQRAVAMSSGDVPGARGAVEGILIQQVFESGGSKKCIQVGGEFYXPSKFEDSGSGKNKARSSSGPKPLVRAKGAQGAAPGGGEARLGQQGSVPAPLALPSDPQLHQKNEDECAVCRDGGELICCDGCPRAFHLACLSPPLREIPSGXWRCSSCLQAXVQEVQPRAEEPRPQEPPVEXPLPPGLRSAGEEVRGPPGEPLAGMDXXLVYKHLPAPPSAAPLPGLDSSALHPLLCVGPEGQQNLAPGARCGVCGDGXDVLRCXHCAAAFHWRCHFPAGXSRPGXGLRCRSCSGDVXPAPVEGVLAPSPARLAPGPAKDDXASHEPALHRDDLESLLSEHXFDGILQWAIQSMARPAAPFPS

SEQ ID NO: 2052 - protein, 538 aa, Homo sapiens
  MOD_RES (30)..(30): Selenocysteine
  MOD_RES (53)..(53): Selenocysteine
  MOD_RES (96)..(96): Selenocysteine
  MOD_RES (114)..(114): Selenocysteine
  MOD_RES (162)..(162): Selenocysteine
  MOD_RES (265)..(265): Selenocysteine
  MOD_RES (281)..(281): Selenocysteine
  MOD_RES (287)..(287): Selenocysteine
  MOD_RES (290)..(290): Selenocysteine
  MOD_RES (337)..(337): Selenocysteine
  MOD_RES (361)..(361): Selenocysteine
  MOD_RES (372)..(372): Selenocysteine
  MOD_RES (442)..(442): Selenocysteine
  MOD_RES (453)..(453): Selenocysteine
MERLGEKASRLLEKFGRRKGESSRSGSDGXPGPGKGRLSGLGGPRKSGPRGAXGGPGDEPLEPAREQGSLDAERNQRGSFEAPRYEGSFPAGPPPXRALPLPQSLPPDFRLEPXAPALSPRSSFASSSASDASKPSSPRGSLLLDGAGAGGAGGSRPCSNRXSGISMGYDQRHGSPLPAGPCLFGPPLAGAPAGYSPGGVPSAYPELHAALDRLYAQRPAGFGCQESRHSYPPALGSPGALAGAGVGAAGPLERRGAQPGRHSVXGYGDCAVGARYQDELXALLRLXVGXGGREAGARGEPSGIEPSGLEEPPGPFVPEAARARMREPEAREDYFGXCIKCNKGIYGQSNACQALDSLYHXQCFVCCSCGRXLRCKAFYSVNGSVYCEEDYLFSGFQEAAEKCCVCGHLILEKILQAMGKSYHPGCFRCIVCNKCLDGIPFXVDFSNQVYCVXDYHKNYAPKCAACGQPILPSEGCEDIVRVISMDRDYHFECYHCEDCRMQLSDEEGCCCFPLDGHLLCHGCHMQRLNARQPPANYI

SEQ ID NO: 2053 - protein, 65 aa, Homo sapiens
  MOD_RES (25)..(25): Selenocysteine
  MOD_RES (36)..(36): Selenocysteine
MGKSYHPGCFRCIVCNKCLDGIPFXVDFSNQVYCVXDYHKNYAPKCAACGQPILPSEGCEDIVRV

SEQ ID NO: 2054 - protein, 80 aa, Homo sapiens
  MOD_RES (25)..(25): Selenocysteine
  MOD_RES (36)..(36): Selenocysteine
MGKSYHPGCFRCIVCNKCLDGIPFXVDFSNQVYCVXDYHKNYAPKCAACGQPILPSEGCEDIVRVISMDRDYHFECYHCE

SEQ ID NO: 2055 - protein, 121 aa, Homo sapiens
  MOD_RES (25)..(25): Selenocysteine
  MOD_RES (36)..(36): Selenocysteine
MGKSYHPGCFRCIVCNKCLDGIPFXVDFSNQVYCVXDYHKNYAPKCAACGQPILPSEGCEDIVRVISMDRDYHFECYHCEDCRMQLSDEEGCCCFPLDGHLLCHGCHMQRLNARQPPANYI

SEQ ID NO: 2056 - protein, 143 aa, Homo sapiens
  MOD_RES (1)..(1): Any amino acid
  MOD_RES (39)..(39): Selenocysteine
  MOD_RES (55)..(55): Selenocysteine
  MOD_RES (61)..(61): Selenocysteine
  MOD_RES (64)..(64): Selenocysteine
  MOD_RES (114)..(114): Selenocysteine
XRHSYPPALGSPGALAGAGVGAAGPLERRGAQPGRHSVXGYGDCAVGARYQDELXALLRLXVGXGGREAGARGEPSGIEPSGLEEPPGPFVPEAARARMREPEAREDYFGIMLXWSPLHGALCQARSFSPSLEVCSGEKSFYN

SEQ ID NO: 2057 - protein, 76 aa, Homo sapiens
  MOD_RES (11)..(11): Selenocysteine
  MOD_RES (70)..(70): Selenocysteine
MSVQYPRRRAXAGEKPGNEPEEVKLQNASKQIVQNAILQAVQQVSQESQRREERISDNRDHIQLGVGELXKKHEKK

SEQ ID NO: 2058 - protein, 69 aa, Homo sapiens
  MOD_RES (63)..(63): Selenocysteine
MVFAPGEKPGNEPEEVKLQNASKQIVQNAILQAVQQVSQESQRREERISDNRDHIQLGVGELXKKHEKK

SEQ ID NO: 2059 - protein, 204 aa, Homo sapiens
  MOD_RES (13)..(13): Selenocysteine
  MOD_RES (19)..(19): Selenocysteine
  MOD_RES (91)..(91): Selenocysteine
  MOD_RES (138)..(138): Selenocysteine
  MOD_RES (166)..(166): Selenocysteine
AEKRSSGERAREXGGAEGXGDAVLGEKVLEEALLSREHVLELENSKGPSLASLEGEEDKGKSSSSQVVGPVQEEEYVAEKLPSRFIESAHXELAKDDAAPAPPVADAKAQDRGVEGELGNEESLDRNEEDLGAEDGWXMDAEADHSGGSDRNSMDSVDSCCSLKKXESFQNAQAGSNPKKVDLIIWEIEVPKHLVGRLIGKQGR

SEQ ID NO: 2060 - protein, 360 aa, Homo sapiens
  MOD_RES (16)..(16): Selenocysteine
  MOD_RES (29)..(29): Selenocysteine
  MOD_RES (50)..(51): Selenocysteine
  MOD_RES (68)..(68): Selenocysteine
  MOD_RES (71)..(71): Selenocysteine
  MOD_RES (95)..(95): Selenocysteine
  MOD_RES (103)..(103): Selenocysteine
  MOD_RES (105)..(105): Selenocysteine
  MOD_RES (115)..(115): Selenocysteine
  MOD_RES (122)..(122): Selenocysteine
  MOD_RES (144)..(144): Selenocysteine
  MOD_RES (172)..(172): Selenocysteine
  MOD_RES (218)..(218): Selenocysteine
  MOD_RES (227)..(227): Selenocysteine
  MOD_RES (231)..(231): Selenocysteine
  MOD_RES (263)..(263): Selenocysteine
  MOD_RES (281)..(281): Selenocysteine
  MOD_RES (291)..(291): Selenocysteine
  MOD_RES (311)..(311): Selenocysteine
  MOD_RES (314)..(314): Selenocysteine
  MOD_RES (336)..(336): Selenocysteine
  MOD_RES (339)..(339): Selenocysteine
  MOD_RES (345)..(345): Selenocysteine
  MOD_RES (359)..(359): Selenocysteine
LPLPGLPAEGSPPPKXYVSCLKSLLSSPXKDSKPNISAHHISLASCLALXXPSEELPDRAGILVEDAXCVXCMSDSSQSVPLVASPGHCSDSFSXSGLEDSCXEXSSSPRDKAIXPPLPESXVPFSNGVLKGELSDLGAEDGWXMDAEADHSGGSDRNSMDSVDSCCSLKKXESFQNAQAGSNPKKVDLIIWEIEVPKHLVGRLIGKQGRYVSFLKQXSGAKIYISXLPYXQSVQICHIEGSQHHVDKALNLIGKKFKELNLXNIYAPPLPSLALPSLPMXSWLMLPDGIXVEVIVVNQVNAGHLFVQQHXHPXFHALRSLDQQMYLCYSQPGIPXLPXPVESLXLSPCRFREQKSFWXV

SEQ ID NO: 2061 - protein, 7 aa, Homo sapiens
MAIQFRS

SEQ ID NO: 2062 - protein, 8 aa, Homo sapiens
MAIQFRSL

SEQ ID NO: 2063 - protein, 47 aa, Homo sapiens
MAIQFRSLFPLALPGMLALLGWWWFFSRKKGHVSSHDEQQVEAGAVQ

SEQ ID NO: 2064 - protein, 83 aa, Homo sapiens
  MOD_RES (70)..(70): Selenocysteine
  MOD_RES (75)..(75): Selenocysteine
MAIQFRSLFPLALPGMLALLGWWWFFSRKKGHVSSHDEQQVEAGAVQLRADPAIKEPLPVEDVCPKVVSXPPSVXEPPEKELS

SEQ ID NO: 2065 - protein, 95 aa, Homo sapiens
  MOD_RES (70)..(70): Selenocysteine
  MOD_RES (75)..(75): Selenocysteine
  MOD_RES (84)..(84): Selenocysteine
MAIQFRSLFPLALPGMLALLGWWWFFSRKKGHVSSHDEQQVEAGAVQLRADPAIKEPLPVEDVCPKVVSXPPSVXEPPEKELSXVSKLPAEPPAL

SEQ ID NO: 2066 - protein, 137 aa, Homo sapiens
  MOD_RES (70)..(70): Selenocysteine
  MOD_RES (75)..(75): Selenocysteine
  MOD_RES (84)..(84): Selenocysteine
  MOD_RES (98)..(98): Selenocysteine
  MOD_RES (114)..(115): Selenocysteine
  MOD_RES (123)..(123): Selenocysteine
  MOD_RES (129)..(129): Selenocysteine
  MOD_RES (136)..(136): Selenocysteine
MAIQFRSLFPLALPGMLALLGWWWFFSRKKGHVSSHDEQQVEAGAVQLRADPAIKEPLPVEDVCPKVVSXPPSVXEPPEKELSXVSKLPAEPPALLQXHPPCRRSESSGILPNXXDMRLRPGXRRDDSXKLELALXG

SEQ ID NO: 2067 - protein, 183 aa, Homo sapiens
  MOD_RES (70)..(70): Selenocysteine
  MOD_RES (75)..(75): Selenocysteine
  MOD_RES (84)..(84): Selenocysteine
  MOD_RES (98)..(98): Selenocysteine
  MOD_RES (114)..(115): Selenocysteine
  MOD_RES (123)..(123): Selenocysteine
  MOD_RES (129)..(129): Selenocysteine
  MOD_RES (136)..(136): Selenocysteine
MAIQFRSLFPLALPGMLALLGWWWFFSRKKGHVSSHDEQQVEAGAVQLRADPAIKEPLPVEDVCPKVVSXPPSVXEPPEKELSXVSKLPAEPPALLQXHPPCRRSESSGILPNXXDMRLRPGXRRDDSXKLELALXGGEAKSIPLECPLSSPKGVLFSSKSAEVCKQDSPFSRVPRKVQPGYP

SEQ ID NO: 2068 - protein, 186 aa, Homo sapiens
  MOD_RES (70)..(70): Selenocysteine
  MOD_RES (75)..(75): Selenocysteine
  MOD_RES (84)..(84): Selenocysteine
  MOD_RES (98)..(98): Selenocysteine
  MOD_RES (114)..(115): Selenocysteine
  MOD_RES (123)..(123): Selenocysteine
  MOD_RES (129)..(129): Selenocysteine
  MOD_RES (136)..(136): Selenocysteine
MAIQFRSLFPLALPGMLALLGWWWFFSRKKGHVSSHDEQQVEAGAVQLRADPAIKEPLPVEDVCPKVVSXPPSVXEPPEKELSXVSKLPAEPPALLQXHPPCRRSESSGILPNXXDMRLRPGXRRDDSXKLELALXGGEAKSIPLECPLSSPKGVLFSSKSAEVCKQDSPFSRVPRKVQPGYPVVP

SEQ ID NO: 2069 - protein, 593 aa, Homo sapiens
  MOD_RES (70)..(70): Selenocysteine
  MOD_RES (75)..(75): Selenocysteine
  MOD_RES (84)..(84): Selenocysteine
  MOD_RES (98)..(98): Selenocysteine
  MOD_RES (114)..(115): Selenocysteine
  MOD_RES (123)..(123): Selenocysteine
  MOD_RES (129)..(129): Selenocysteine
  MOD_RES (136)..(136): Selenocysteine
  MOD_RES (199)..(199): Selenocysteine
  MOD_RES (205)..(205): Selenocysteine
  MOD_RES (277)..(277): Selenocysteine
  MOD_RES (360)..(360): Selenocysteine
  MOD_RES (366)..(367): Selenocysteine
  MOD_RES (396)..(396): Selenocysteine
  MOD_RES (402)..(402): Selenocysteine
  MOD_RES (407)..(407): Selenocysteine
  MOD_RES (434)..(434): Selenocysteine
  MOD_RES (447)..(447): Selenocysteine
  MOD_RES (468)..(469): Selenocysteine
  MOD_RES (486)..(486): Selenocysteine
  MOD_RES (489)..(489): Selenocysteine
  MOD_RES (513)..(513): Selenocysteine
  MOD_RES (521)..(521): Selenocysteine
  MOD_RES (523)..(523): Selenocysteine
  MOD_RES (533)..(533): Selenocysteine
  MOD_RES (540)..(540): Selenocysteine
  MOD_RES (562)..(562): Selenocysteine
  MOD_RES (582)..(582): Selenocysteine
  MOD_RES (585)..(585): Selenocysteine
MAIQFRSLFPLALPGMLALLGWWWFFSRKKGHVSSHDEQQVEAGAVQLRADPAIKEPLPVEDVCPKVVSXPPSVXEPPEKELSXVSKLPAEPPALLQXHPPCRRSESSGILPNXXDMRLRPGXRRDDSXKLELALXGGEAKSIPLECPLSSPKGVLFSSKSAEVCKQDSPFSRVPRKVQPGYPVVPAEKRSSGERAREXGGAEGXGDAVLGEKVLEEALLSREHVLELENSKGPSLASLEGEEDKGKSSSSQVVGPVQEEEYVAEKLPSRFIESAHXELAKDDAAPAPPVADAKAQDRGVEGELGNEESLDRNEEGLDRNEEGLDRNEESLDRNEEGLDRNEEIKRAAFQIISQVISEAXEQVLAXXVGKVAGRVCQASQLQGQKEESCVPVHQKXVLGPDXAEPAXAEAAVAPPDAGLPLPGLPAEGSPPPKXYVSCLKSLLSSPXKDSKPNISAHHISLASCLALXXPSEELPDRAGILVEDAXCVXCMSDSSQSVPLVASPGHCSDSFSXSGLEDSCXEXSSSPRDKAIXPPLPESXVPFSNGVLKGELSDLGAEDGWXMDAEADHSGVAAPPPGKRGXLIXRCPGFFEC

SEQ ID NO: 2070 - protein, 903 aa, Homo sapiens
  MOD_RES (70)..(70): Selenocysteine
  MOD_RES (75)..(75): Selenocysteine
  MOD_RES (84)..(84): Selenocysteine
  MOD_RES (98)..(98): Selenocysteine
  MOD_RES (114)..(115): Selenocysteine
  MOD_RES (123)..(123): Selenocysteine
  MOD_RES (129)..(129): Selenocysteine
  MOD_RES (136)..(136): Selenocysteine
  MOD_RES (199)..(199): Selenocysteine
  MOD_RES (205)..(205): Selenocysteine
  MOD_RES (277)..(277): Selenocysteine
  MOD_RES (360)..(360): Selenocysteine
  MOD_RES (366)..(367): Selenocysteine
  MOD_RES (396)..(396): Selenocysteine
  MOD_RES (402)..(402): Selenocysteine
  MOD_RES (407)..(407): Selenocysteine
  MOD_RES (434)..(434): Selenocysteine
  MOD_RES (447)..(447): Selenocysteine
  MOD_RES (468)..(469): Selenocysteine
  MOD_RES (486)..(486): Selenocysteine
  MOD_RES (489)..(489): Selenocysteine
  MOD_RES (513)..(513): Selenocysteine
  MOD_RES (521)..(521): Selenocysteine
  MOD_RES (523)..(523): Selenocysteine
  MOD_RES (533)..(533): Selenocysteine
  MOD_RES (540)..(540): Selenocysteine
  MOD_RES (562)..(562): Selenocysteine
  MOD_RES (590)..(590): Selenocysteine
  MOD_RES (636)..(636): Selenocysteine
  MOD_RES (645)..(645): Selenocysteine
  MOD_RES (649)..(649): Selenocysteine
  MOD_RES (681)..(681): Selenocysteine
  MOD_RES (699)..(699): Selenocysteine
  MOD_RES (709)..(709): Selenocysteine
  MOD_RES (729)..(729): Selenocysteine
  MOD_RES (732)..(732): Selenocysteine
  MOD_RES (754)..(754): Selenocysteine
  MOD_RES (757)..(757): Selenocysteine
  MOD_RES (762)..(762): Selenocysteine
  MOD_RES (786)..(786): Selenocysteine
  MOD_RES (816)..(816): Selenocysteine
  MOD_RES (850)..(850): Selenocysteine
  MOD_RES (853)..(853): Selenocysteine
  MOD_RES (860)..(860): Selenocysteine
  MOD_RES (865)..(865): Selenocysteine
  MOD_RES (901)..(901): Selenocysteine
MAIQFRSLFPLALPGMLALLGWWWFFSRKKGHVSSHDEQQVEAGAVQLRADPAIKEPLPVEDVCPKVVSXPPSVXEPPEKELSXVSKLPAEPPALLQXHPPCRRSESSGILPNXXDMRLRPGXRRDDSXKLELALXGGEAKSIPLECPLSSPKGVLFSSKSAEVCKQDSPFSRVPRKVQPGYPVVPAEKRSSGERAREXGGAEGXGDAVLGEKVLEEALLSREHVLELENSKGPSLASLEGEEDKGKSSSSQVVGPVQEEEYVAEKLPSRFIESAHXELAKDDAAPAPPVADAKAQDRGVEGELGNEESLDRNEEGLDRNEEGLDRNEESLDRNEEGLDRNEEIKRAAFQIISQVISEAXEQVLAXXVGKVAGRVCQASQLQGQKEESCVPVHQKXVLGPDXAEPAXAEAAVAPPDAGLPLPGLPAEGSPPPKXYVSCLKSLLSSPXKDSKPNISAHHISLASCLALXXPSEELPDRAGILVEDAXCVXCMSDSSQSVPLVASPGHCSDSFSXSGLEDSCXEXSSSPRDKAIXPPLPESXVPFSNGVLKGELSDLGAEDGWXMDAEADHSGGSDRNSMDSVDSCCSLKKXESFQNAQAGSNPKKVDLIIWEIEVPKHLVGRLIGKQGRYVSFLKQXSGAKIYISXLPYXQSVQICHIEGSQHHVDKALNLIGKKFKELNLXNIYAPPLPSLALPSLPMXSWLMLPDGIXVEVIVVNQVNAGHLFVQQHXHPXFHALRSLDQQMYLCYSQPGIPXLPXPVEIXVICAAPGADGAWWRAQVVASYEEXNEVEIRYVDYGGYKRVKVDVLRQIRSDFVXLPFQGAEVLLDSVMPLSDDDQFSPEADAAMSEMXGNXALLAQVXSYSPXGLPLIQLWSVVGDEVVLINRSLVERGLAQWVDSYYXSL

SEQ ID NO: 2071 - protein, 179 aa, Homo sapiens
  MOD_RES (18)..(18): Selenocysteine
  MOD_RES (21)..(21): Selenocysteine
  MOD_RES (43)..(43): Selenocysteine
  MOD_RES (46)..(46): Selenocysteine
  MOD_RES (51)..(51): Selenocysteine
  MOD_RES (75)..(75): Selenocysteine
  MOD_RES (105)..(105): Selenocysteine
  MOD_RES (139)..(139): Selenocysteine
  MOD_RES (142)..(142): Selenocysteine
  MOD_RES (149)..(149): Selenocysteine
  MOD_RES (154)..(154): Selenocysteine
  MOD_RES (169)..(169): Selenocysteine
VIVVNQVNAGHLFVQQHXHPXFHALRSLDQQMYLCYSQPGIPXLPXPVEIXVICAAPGADGAWWRAQVVASYEEXNEVEIRYVDYGGYKRVKVDVLRQIRSDFVXLPFQGAEVLLDSVMPLSDDDQFSPEADAAMSEMXGNXALLAQVXSYSPXGLPLIQLWSVVGDEXGFSIVQFKNK

SEQ ID NO: 2072 - protein, 139 aa, Homo sapiens
  MOD_RES (1)..(1): Any amino acid
  MOD_RES (19)..(19): Selenocysteine
  MOD_RES (49)..(49): Selenocysteine
  MOD_RES (83)..(83): Selenocysteine
  MOD_RES (86)..(86): Selenocysteine
  MOD_RES (93)..(93): Selenocysteine
  MOD_RES (98)..(98): Selenocysteine
XGADGAWWRAQVVASYEEXNEVEIRYVDYGGYKRVKVDVLRQIRSDFVXLPFQGAEVLLDSVMPLSDDDQFSPEADAAMSEMXGNXALLAQVXSYSPXGLPLIQLWSVVGDEVVLINRSLVERGLAQLASALCSLKISK

SEQ ID NO: 2073 - protein, 78 aa, Homo sapiens
  MOD_RES (11)..(11): Selenocysteine
  MOD_RES (16)..(16): Selenocysteine
  MOD_RES (24)..(24): Selenocysteine
  MOD_RES (64)..(64): Selenocysteine
LALLALLMSLXQGVLXALRLRKMXFGRVSDLGQFIRESEPEPDVRKSKGSMFSQAMKKWVQGNXDEAQEELAWKIAKM

SEQ ID NO: 2074 - protein, 138 aa, Homo sapiens
  MOD_RES (14)..(14): Selenocysteine
  MOD_RES (38)..(38): Selenocysteine
  MOD_RES (69)..(69): Selenocysteine
  MOD_RES (71)..(71): Selenocysteine
  MOD_RES (87)..(87): Selenocysteine
  MOD_RES (95)..(95): Selenocysteine
  MOD_RES (102)..(103): Selenocysteine
  MOD_RES (121)..(122): Selenocysteine
  MOD_RES (128)..(128): Selenocysteine
MRGAGPSPRQSPRXLRPDPGPAMSFFRRKVKGKEQEKXSDVKSIKALKIMPCWRLQDQVMLQSMPFLPXWXPFQVAGQPHLRSSQAXWRPLILVXWADLVWXXRLKRPNQAFLRPLNKSCXXLLSSLXSFNSWNFGEW

SEQ ID NO: 2075 - protein, 150 aa, Homo sapiens
  MOD_RES (14)..(14): Selenocysteine
  MOD_RES (38)..(38): Selenocysteine
  MOD_RES (57)..(57): Selenocysteine
  MOD_RES (88)..(88): Selenocysteine
  MOD_RES (90)..(90): Selenocysteine
  MOD_RES (111)..(112): Selenocysteine
  MOD_RES (130)..(131): Selenocysteine
  MOD_RES (137)..(137): Selenocysteine
MRGAGPSPRQSPRXLRPDPGPAMSFFRRKVKGKEQEKXSDVKSIKASISVHSPQKSXKNHALLEAAGPSHVAINAISANMDSFSSSRXAXLKKQPSHMEAAHFGDLDLVWXXRLKRPNQAFLRPLNKSCXXLLSSLXSFNSWNFGEWSIW

SEQ ID NO: 2076 - protein, 604 aa, Homo sapiens
  MOD_RES (14)..(14): Selenocysteine
  MOD_RES (38)..(38): Selenocysteine
  MOD_RES (57)..(57): Selenocysteine
  MOD_RES (88)..(88): Selenocysteine
  MOD_RES (90)..(90): Selenocysteine
  MOD_RES (115)..(115): Selenocysteine
  MOD_RES (118)..(118): Selenocysteine
  MOD_RES (125)..(125): Selenocysteine
  MOD_RES (133)..(133): Selenocysteine
  MOD_RES (164)..(165): Selenocysteine
  MOD_RES (176)..(176): Selenocysteine
  MOD_RES (194)..(195): Selenocysteine
  MOD_RES (200)..(200): Selenocysteine
  MOD_RES (218)..(218): Selenocysteine
  MOD_RES (229)..(229): Selenocysteine
  MOD_RES (232)..(232): Selenocysteine
  MOD_RES (257)..(257): Selenocysteine
  MOD_RES (264)..(264): Selenocysteine
  MOD_RES (270)..(270): Selenocysteine
  MOD_RES (272)..(272): Selenocysteine
  MOD_RES (301)..(301): Selenocysteine
  MOD_RES (303)..(303): Selenocysteine
  MOD_RES (317)..(317): Selenocysteine
  MOD_RES (374)..(374): Selenocysteine
  MOD_RES (377)..(377): Selenocysteine
  MOD_RES (448)..(448): Selenocysteine
  MOD_RES (477)..(478): Selenocysteine
  MOD_RES (485)..(486): Selenocysteine
  MOD_RES (523)..(523): Selenocysteine
  MOD_RES (529)..(529): Selenocysteine
  MOD_RES (569)..(569): Selenocysteine
  MOD_RES (602)..(602): Selenocysteine
MRGAGPSPRQSPRXLRPDPGPAMSFFRRKVKGKEQEKXSDVKSIKASISVHSPQKSXKNHALLEAAGPSHVAINAISANMDSFSSSRXAXLKKQPSHMEAAHFGDLGRSCLDYQXQEXKSSLSKXLEQVLHDXIVLPYFIQFMELRRMEHLVKFWLEAESFHSXXWSRIRAHSLNXVKQSSLAEPVSPSKKHEXXASFLXDSLDKRLEDSGSAQLFMXHSEGIDLNNRXNSXQNHLLLSQECDSAHSLRLEMARAGXHQVSMEXQESSSXLXVASRNSPASPLKELSGKLMKSIEQDAVNXFXKYISPDAAKPIPIXEAMRNDIIARICGEDGQVDPNCFVLAQSIVFSAMEQEHFSEFLRSHHFCKYQIEVLXSGXVYLADILFCESALFYFSEYMEKEDAVNILQFWLAADNFQSQLAAKKGQYDGQEAQNDAMILYDKYFSLQAXHPLGFDDVVRLEIESNICREGGPLPNCFXXPLRQAWXXMEKSSVKKASIKILKNFDEAIIVDAASLDPESLYQRXYAGKMXFGRVSDLGQFIRESEPEPDVRKSKGSMFSQAMKKWVQGNXDEAQEELAWKIAKMIVSDIMQQAQYDQPLEKSXKL

SEQ ID NO: 2077 - protein, 662 aa, Homo sapiens
  MOD_RES (14)..(14): Selenocysteine
  MOD_RES (38)..(38): Selenocysteine
  MOD_RES (57)..(57): Selenocysteine
  MOD_RES (88)..(88): Selenocysteine
  MOD_RES (90)..(90): Selenocysteine
  MOD_RES (115)..(115): Selenocysteine
  MOD_RES (118)..(118): Selenocysteine
  MOD_RES (125)..(125): Selenocysteine
  MOD_RES (133)..(133): Selenocysteine
  MOD_RES (164)..(165): Selenocysteine
  MOD_RES (176)..(176): Selenocysteine
  MOD_RES (194)..(195): Selenocysteine
  MOD_RES (200)..(200): Selenocysteine
  MOD_RES (218)..(218): Selenocysteine
  MOD_RES (229)..(229): Selenocysteine
  MOD_RES (232)..(232): Selenocysteine
  MOD_RES (257)..(257): Selenocysteine
  MOD_RES (264)..(264): Selenocysteine
  MOD_RES (270)..(270): Selenocysteine
  MOD_RES (272)..(272): Selenocysteine
  MOD_RES (301)..(301): Selenocysteine
  MOD_RES (303)..(303): Selenocysteine
  MOD_RES (317)..(317): Selenocysteine
  MOD_RES (374)..(374): Selenocysteine
  MOD_RES (377)..(377): Selenocysteine
  MOD_RES (448)..(448): Selenocysteine
  MOD_RES (477)..(478): Selenocysteine
  MOD_RES (485)..(486): Selenocysteine
  MOD_RES (525)..(525): Selenocysteine
  MOD_RES (581)..(581): Selenocysteine
  MOD_RES (587)..(587): Selenocysteine
  MOD_RES (627)..(627): Selenocysteine
  MOD_RES (660)..(660): Selenocysteine
MRGAGPSPRQSPRXLRPDPGPAMSFFRRKVKGKEQEKXSDVKSIKASISVHSPQKSXKNHALLEAAGPSHVAINAISANMDSFSSSRXAXLKKQPSHMEAAHFGDLGRSCLDYQXQEXKSSLSKXLEQVLHDXIVLPYFIQFMELRRMEHLVKFWLEAESFHSXXWSRIRAHSLNXVKQSSLAEPVSPSKKHEXXASFLXDSLDKRLEDSGSAQLFMXHSEGIDLNNRXNSXQNHLLLSQECDSAHSLRLEMARAGXHQVSMEXQESSSXLXVASRNSPASPLKELSGKLMKSIEQDAVNXFXKYISPDAAKPIPIXEAMRNDIIARICGEDGQVDPNCFVLAQSIVFSAMEQEHFSEFLRSHHFCKYQIEVLXSGXVYLADILFCESALFYFSEYMEKEDAVNILQFWLAADNFQSQLAAKKGQYDGQEAQNDAMILYDKYFSLQAXHPLGFDDVVRLEIESNICREGGPLPNCFXXPLRQAWXXMEKVFLPGFLSSNLYYKYLNDLIHSVRGDEFLGGNVSLXAPGSVGPPDESHPGSSDSSASQSSVKKASIKILKNFDEAIIVDAASLDPESLYQRXYAGKMXFGRVSDLGQFIRESEPEPDVRKSKGSMFSQAMKKWVQGNXDEAQEELAWKIAKMIVSDIMQQAQYDQPLEKSXKL

SEQ ID NO: 2078 - protein, 66 aa, Homo sapiens
  MOD_RES (14)..(14): Selenocysteine
  MOD_RES (38)..(38): Selenocysteine
  MOD_RES (49)..(49): Selenocysteine
MRGAGPSPRQSPRXLRPDPGPAMSFFRRKVKGKEQEKXSDVKSIKGCRXKSCCNQCHFCQHGLLFK

SEQ ID NO: 2079 - protein, 63 aa, Homo sapiens
  MOD_RES (14)..(14): Selenocysteine
  MOD_RES (38)..(38): Selenocysteine
  MOD_RES (48)..(48): Selenocysteine
  MOD_RES (62)..(62): Selenocysteine
MRGAGPSPRQSPRXLRPDPGPAMSFFRRKVKGKEQEKXSDVKSIKVEXEFHHVSQYGLDLLXL

SEQ ID NO: 2080 - protein, 59 aa, Homo sapiens
  MOD_RES (1)..(1): Any amino acid
  MOD_RES (15)..(15): Selenocysteine
  MOD_RES (53)..(53): Selenocysteine
XKYISPDAAKPIPIXEAMRNDIIARICGEDGQVDPNCFVLAQSIVFSAMEQDXWKKRMQ

SEQ ID NO: 2081 - protein, 31 aa, Homo sapiens
  MOD_RES (1)..(1): Any amino acid
  MOD_RES (3)..(3): Selenocysteine
XLXAPGSVGPPDESHPGSSDSSASQCEKSQY

SEQ ID NO: 2082 - protein, 1901 aa, Homo sapiens
  MOD_RES (3)..(3): Selenocysteine
  MOD_RES (11)..(11): Selenocysteine
  MOD_RES (41)..(41): Selenocysteine
  MOD_RES (55)..(55): Selenocysteine
  MOD_RES (58)..(58): Selenocysteine
  MOD_RES (66)..(66): Selenocysteine
  MOD_RES (132)..(132): Selenocysteine
  MOD_RES (150)..(150): Selenocysteine
  MOD_RES (155)..(155): Selenocysteine
  MOD_RES (158)..(158): Selenocysteine
  MOD_RES (168)..(169): Selenocysteine
  MOD_RES (176)..(176): Selenocysteine
  MOD_RES (189)..(189): Selenocysteine
  MOD_RES (199)..(199): Selenocysteine
  MOD_RES (210)..(210): Selenocysteine
  MOD_RES (222)..(222): Selenocysteine
  MOD_RES (224)..(224): Selenocysteine
  MOD_RES (230)..(230): Selenocysteine
  MOD_RES (250)..(250): Selenocysteine
  MOD_RES (266)..(266): Selenocysteine
  MOD_RES (269)..(270): Selenocysteine
  MOD_RES (277)..(277): Selenocysteine
  MOD_RES (297)..(297): Selenocysteine
  MOD_RES (368)..(368): Selenocysteine
  MOD_RES (371)..(371): Selenocysteine
  MOD_RES (416)..(416): Selenocysteine
  MOD_RES (462)..(462): Selenocysteine
  MOD_RES (470)..(470): Selenocysteine
  MOD_RES (487)..(487): Selenocysteine
  MOD_RES (506)..(506): Selenocysteine
  MOD_RES (509)..(509): Selenocysteine
  MOD_RES (511)..(511): Selenocysteine
  MOD_RES (525)..(525): Selenocysteine
  MOD_RES (527)..(527): Selenocysteine
  MOD_RES (577)..(577): Selenocysteine
  MOD_RES (588)..(588): Selenocysteine
  MOD_RES (640)..(640): Selenocysteine
  MOD_RES (642)..(642): Selenocysteine
  MOD_RES (670)..(670): Selenocysteine
  MOD_RES (711)..(711): Selenocysteine
  MOD_RES (713)..(714): Selenocysteine
  MOD_RES (722)..(722): Selenocysteine
  MOD_RES (737)..(737): Selenocysteine
  MOD_RES (741)..(741): Selenocysteine
  MOD_RES (754)..(754): Selenocysteine
  MOD_RES (765)..(765): Selenocysteine
  MOD_RES (773)..(773): Selenocysteine
  MOD_RES (778)..(778): Selenocysteine
  MOD_RES (797)..(797): Selenocysteine
  MOD_RES (823)..(823): Selenocysteine
  MOD_RES (853)..(853): Selenocysteine
  MOD_RES (882)..(882): Selenocysteine
  MOD_RES (887)..(887): Selenocysteine
  MOD_RES (892)..(892): Selenocysteine
  MOD_RES (897)..(897): Selenocysteine
  MOD_RES (904)..(904): Selenocysteine
  MOD_RES (908)..(908): Selenocysteine
  MOD_RES (915)..(915): Selenocysteine
  MOD_RES (981)..(981): Selenocysteine
  MOD_RES (996)..(996): Selenocysteine
  MOD_RES (1022)..(1022): Selenocysteine
  MOD_RES (1030)..(1030): Selenocysteine
  MOD_RES (1053)..(1053): Selenocysteine
  MOD_RES (1071)..(1071): Selenocysteine
  MOD_RES (1075)..(1075): Selenocysteine
  MOD_RES (1078)..(1078): Selenocysteine
  MOD_RES (1100)..(1100): Selenocysteine
  MOD_RES (1104)..(1104): Selenocysteine
  MOD_RES (1121)..(1121): Selenocysteine
  MOD_RES (1136)..(1136): Selenocysteine
  MOD_RES (1140)..(1140): Selenocysteine
  MOD_RES (1156)..(1156): Selenocysteine
  MOD_RES (1204)..(1204): Selenocysteine
  MOD_RES (1211)..(1211): Selenocysteine
  MOD_RES (1244)..(1244): Selenocysteine
  MOD_RES (1255)..(1255): Selenocysteine
  MOD_RES (1269)..(1269): Selenocysteine
  MOD_RES (1342)..(1342): Selenocysteine
  MOD_RES (1386)..(1387): Selenocysteine
  MOD_RES (1405)..(1405): Selenocysteine
  MOD_RES (1439)..(1439): Selenocysteine
  MOD_RES (1443)..(1443): Selenocysteine
  MOD_RES (1459)..(1459): Selenocysteine
  MOD_RES (1466)..(1466): Selenocysteine
  MOD_RES (1474)..(1474): Selenocysteine
  MOD_RES (1485)..(1485): Selenocysteine
  MOD_RES (1504)..(1504): Selenocysteine
  MOD_RES (1524)..(1524): Selenocysteine
  MOD_RES (1551)..(1551): Selenocysteine
  MOD_RES (1555)..(1555): Selenocysteine
  MOD_RES (1559)..(1559): Selenocysteine
  MOD_RES (1566)..(1567): Selenocysteine
  MOD_RES (1574)..(1574): Selenocysteine
  MOD_RES (1583)..(1583): Selenocysteine
  MOD_RES (1599)..(1599): Selenocysteine
  MOD_RES (1669)..(1669): Selenocysteine
  MOD_RES (1690)..(1690): Selenocysteine
  MOD_RES (1692)..(1692): Selenocysteine
  MOD_RES (1694)..(1694): Selenocysteine
  MOD_RES (1698)..(1698): Selenocysteine
  MOD_RES (1716)..(1716): Selenocysteine
  MOD_RES (1733)..(1733): Selenocysteine
  MOD_RES (1783)..(1783): Selenocysteine
  MOD_RES (1809)..(1809): Selenocysteine
  MOD_RES (1813)..(1813): Selenocysteine
  MOD_RES (1821)..(1821): Selenocysteine
MAXFRNNHMKXKASVRKSFSEDVFQSVKSLLQSQKELCSVXAEDCLQQDEHANLXEVXFLGFNEEXDAAHIQDLAAVSLELPDILNSLHFCSLNENEIICMKNINKPLDISSDPLNQSHPSGMLCVMRVSPXSPRLRIDFIFSLLSKYAXGIRYXLDXFLHQKHQLEXXDEDDDDXNQSVSSIEDDFVXAFEHLEEEEXSKPYNDGMNIXVLRSQCDAASQXVXGHHLEXHDLKILISSGQQKSLAKPSXSSVNVLGHKELPSVKXSVXXSISEPWXQRSFYRSSNASDKDSDLQKXFFSSSPAYSSESECSSPSPVIFLDEEGYQKSLKAKLELPKIPVMKDDIEDSDSEVSEFFDSFDQFDELEQXLEXCLFNKDPVIGKSSQRKGHKHGKSCMNPQKFKFDRPALPANVRKPXPRKPESPYGNLCDAPDSPRPVKASREDSGLFSPIRSSAFSPLGGCXPAECFCQXDIGGDRIHENHDSVYYXYEDYAKSISCEVLGSVLRXHHXNXLSNINSIKHGENKXVXFKHGNLDQKNKSKNKSLMIKDSIQKFAADLVEKSFGSAFKDLQKGVSSCXNALYHLAIKLXSSVLQMAFDELRRQRAFSLKERAISGLANFLVSEALSNALKDLQYVKKQIFXNXVARFAADLAEELVFEGIMEVCQFSYPQXPASPQCGSFDFEDKVVKLYAKDLSESVIQEAFIELSQVDVXFXXKAAVSVSXDNIKYVSAESVVPSXQAVXFSPSFHNQAIMVXKPVQEYKKEYXVQQALFCXSGIVXSIPVPLAGSALLPYHISSXACQAKAHLSSDDSNSNGDSAQVHIAXKNREEKAACLRNICLPSEHNPGNQNDFKPXNDDIEMQSSSKLPNDPAIISNFSAAVVHXIVNEXLESMXSLEVXKMVDERXDYLXKSLKEKXPPFSHCDQAVLQCSEASSNKDMFADRLSKSIIKHSIDKSKSVIPNIDKNAVYKESLPVSGEESQLXPEKSPKFPDSQNQLXHCSLSAAKDCVPECKVSMVHGSSLEXLPSCPAVXGQKSDLKESAKDQPLKKHNLNSXSLEALSFGQENPFPHSHXFSSXALXCVDGLHVEDKQKVRDRNVIPDXPPSXPLVPSRASSEWDIKKLXKKLKGELAKEFAPAXPPSXPHNSSVGSLSENEQNXIEKEEFMLKLMRSLSEEVESSESGELPEVDVKSEHSGKKVQFAEALAXHILSLAXEMAASHLDNKIIQEPKVKNPCLNVQSQRSVSPXFLNPSDENLKXLCNFAGDLAAEVIXEAEKIAKVRNCMLFKQKKNSCYADGDEDYKVEEKLDIEAVVHPREVDPFILSLPPSSCMSGLMYKYPSCESVXDEYAGHLIQILKQEGGNSELIMDQYANRLAYRSVKSGLQEAAKXXKVQCNSRMFPVPSSQVKXNKELLMFSNKEHHQEADKKRQSKRNEGYFCKNQXCERXLDPYRNEVSQLYSFSXSLVHSIXKDAKEELXASLVGLPKSLXDSCLFEKSGYEEDNECHVXPELPKSLQPSSQNHRFYHSXGSLNGYGCGDNVVQAVEQYAKKVVDDXLELXLGSXVFRVSEXXKSADRVXYAEKLSPLXGQACRYCDLKELHNCXGNSSQHFFRQGSLASSKPASNPKFSSRYQKSRIFHLSVPQIHVNLDKKAVLAEKIVAEAIEKAERELSSXSLAADSGIGQEGASFAESLAXEXMXAAVXNVGHAVSSSKEIEDFQSXESVSSQQMNLSIGDDSXGSWSNLSFEDEHQDESSSFHHLSESNGNSSSWSSLGLEGDLYEDNLSFPXSDSDGPDDKDEEHEDEVEGLGQDGKXLLIXNIDMEPCXVDPQLRIILQWLIASEAEVAELYFHDSANKEFMLLSKQLQEKGWKVGDLLQAVLQYYEVMEKASSEERCKSLFDWLLENA

SEQ ID NO: 2083 - protein, 1782 aa, Homo sapiens
  MOD_RES (7)..(7): Selenocysteine
  MOD_RES (21)..(21): Selenocysteine
  MOD_RES (40)..(41): Selenocysteine
  MOD_RES (53)..(53): Selenocysteine
  MOD_RES (64)..(64): Selenocysteine
  MOD_RES (105)..(105): Selenocysteine
  MOD_RES (126)..(126): Selenocysteine
  MOD_RES (135)..(135): Selenocysteine
  MOD_RES (142)..(142): Selenocysteine
  MOD_RES (160)..(160): Selenocysteine
  MOD_RES (163)..(163): Selenocysteine
  MOD_RES (184)..(184): Selenocysteine
  MOD_RES (190)..(190): Selenocysteine
  MOD_RES (195)..(195): Selenocysteine
  MOD_RES (200)..(200): Selenocysteine
  MOD_RES (236)..(236): Selenocysteine
  MOD_RES (242)..(242): Selenocysteine
  MOD_RES (285)..(285): Selenocysteine
  MOD_RES (289)..(289): Selenocysteine
  MOD_RES (292)..(292): Selenocysteine
  MOD_RES (295)..(295): Selenocysteine
  MOD_RES (301)..(301): Selenocysteine
  MOD_RES (311)..(311): Selenocysteine
  MOD_RES (337)..(337): Selenocysteine
  MOD_RES (351)..(351): Selenocysteine
  MOD_RES (401)..(401): Selenocysteine
  MOD_RES (423)..(423): Selenocysteine
  MOD_RES (428)..(428): Selenocysteine
  MOD_RES (433)..(433): Selenocysteine
  MOD_RES (438)..(438): Selenocysteine
  MOD_RES (469)..(469): Selenocysteine
  MOD_RES (477)..(477): Selenocysteine
  MOD_RES (521)..(521): Selenocysteine
  MOD_RES (523)..(523): Selenocysteine
  MOD_RES (548)..(548): Selenocysteine
  MOD_RES (577)..(577): Selenocysteine
  MOD_RES (597)..(597): Selenocysteine
  MOD_RES (608)..(608): Selenocysteine
  MOD_RES (618)..(618): Selenocysteine
  MOD_RES (642)..(642): Selenocysteine
  MOD_RES (646)..(646): Selenocysteine
  MOD_RES (649)..(649): Selenocysteine
  MOD_RES (675)..(675): Selenocysteine
  MOD_RES (723)..(723): Selenocysteine
  MOD_RES (725)..(725): Selenocysteine
  MOD_RES (751)..(751): Selenocysteine
  MOD_RES (758)..(758): Selenocysteine
  MOD_RES (767)..(767): Selenocysteine
  MOD_RES (793)..(793): Selenocysteine
  MOD_RES (796)..(796): Selenocysteine
  MOD_RES (834)..(834): Selenocysteine
  MOD_RES (878)..(878): Selenocysteine
  MOD_RES (900)..(900): Selenocysteine
  MOD_RES (904)..(904): Selenocysteine
  MOD_RES (919)..(919): Selenocysteine
  MOD_RES (933)..(933): Selenocysteine
  MOD_RES (949)..(949): Selenocysteine
  MOD_RES (951)..(951): Selenocysteine
  MOD_RES (964)..(964): Selenocysteine
  MOD_RES (972)..(972): Selenocysteine
  MOD_RES (977)..(977): Selenocysteine
  MOD_RES (981)..(981): Selenocysteine
  MOD_RES (991)..(991): Selenocysteine
  MOD_RES (999)..(1000): Selenocysteine
  MOD_RES (1010)..(1010): Selenocysteine
  MOD_RES (1015)..(1016): Selenocysteine
  MOD_RES (1020)..(1020): Selenocysteine
  MOD_RES (1039)..(1039): Selenocysteine
  MOD_RES (1059)..(1059): Selenocysteine
  MOD_RES (1090)..(1090): Selenocysteine
  MOD_RES (1103)..(1103): Selenocysteine
  MOD_RES (1107)..(1107): Selenocysteine
  MOD_RES (1115)..(1116): Selenocysteine
  MOD_RES (1127)..(1127): Selenocysteine
  MOD_RES (1137)..(1138): Selenocysteine
  MOD_RES (1143)..(1143): Selenocysteine
  MOD_RES (1165)..(1165): Selenocysteine
  MOD_RES (1167)..(1167): Selenocysteine
  MOD_RES (1171)..(1171): Selenocysteine
  MOD_RES (1175)..(1175): Selenocysteine
  MOD_RES (1185)..(1186): Selenocysteine
  MOD_RES (1204)..(1204): Selenocysteine
  MOD_RES (1209)..(1209): Selenocysteine
  MOD_RES (1233)..(1233): Selenocysteine
  MOD_RES (1242)..(1242): Selenocysteine
  MOD_RES (1246)..(1246): Selenocysteine
  MOD_RES (1254)..(1254): Selenocysteine
  MOD_RES (1261)..(1261): Selenocysteine
  MOD_RES (1264)..(1264): Selenocysteine
  MOD_RES (1275)..(1275): Selenocysteine
  MOD_RES (1290)..(1290): Selenocysteine
  MOD_RES (1293)..(1293): Selenocysteine
  MOD_RES (1300)..(1300): Selenocysteine
  MOD_RES (1309)..(1309): Selenocysteine
  MOD_RES (1346)..(1346): Selenocysteine
  MOD_RES (1351)..(1351): Selenocysteine
  MOD_RES (1362)..(1362): Selenocysteine
  MOD_RES (1365)..(1365): Selenocysteine
  MOD_RES (1377)..(1377): Selenocysteine
  MOD_RES (1408)..(1408): Selenocysteine
  MOD_RES (1420)..(1420): Selenocysteine
  MOD_RES (1422)..(1422): Selenocysteine
  MOD_RES (1434)..(1434): Selenocysteine
  MOD_RES (1440)..(1440): Selenocysteine
  MOD_RES (1443)..(1443): Selenocysteine
  MOD_RES (1475)..(1475): Selenocysteine
  MOD_RES (1484)..(1484): Selenocysteine
  MOD_RES (1491)..(1492): Selenocysteine
  MOD_RES (1505)..(1506): Selenocysteine
  MOD_RES (1544)..(1544): Selenocysteine
  MOD_RES (1556)..(1556): Selenocysteine
  MOD_RES (1564)..(1564): Selenocysteine
  MOD_RES (1567)..(1567): Selenocysteine
  MOD_RES (1569)..(1569): Selenocysteine
  MOD_RES (1573)..(1573): Selenocysteine
  MOD_RES (1578)..(1578): Selenocysteine
  MOD_RES (1594)..(1594): Selenocysteine
  MOD_RES (1609)..(1609): Selenocysteine
  MOD_RES (1612)..(1612): Selenocysteine
  MOD_RES (1621)..(1621): Selenocysteine
  MOD_RES (1641)..(1641): Selenocysteine
  MOD_RES (1643)..(1643): Selenocysteine
  MOD_RES (1650)..(1650): Selenocysteine
  MOD_RES (1672)..(1672): Selenocysteine
  MOD_RES (1717)..(1717): Selenocysteine
  MOD_RES (1724)..(1724): Selenocysteine
  MOD_RES (1730)..(1730): Selenocysteine
  MOD_RES (1760)..(1760): Selenocysteine
  MOD_RES (1780)..(1780): Selenocysteine
MGAGSSXEQRSPEQPPEGSSXPAEPEPSGGGPSAEAAPDXXADPAIAASDPAXKLLQKNGQLSXINGVAEQDELSLQEGDLNGQKGALNGQGALNSQEEEEVIVXEVGQRDSEDVSKRDSDKEMAXKSAVVHDIXDDGQEEXPEIIEQIPSSESNLEELXQPXESQANDIGFKKVFKFVGFKFXVKKDKXEKPDXVQLLXVKKDEGEGAAGAGDHKDPSLGAGEAASKESEPKQSXEKPEEXLKREQSHAEISPPAESGQAVEECKEEGEEKQEKEPSKSAESPXSPVXSEXGSXFKKFFXQGWAGWRKKXSFRKPKEDEVEASEKKKEQEPEKVDXEEDGKAEVASEKLXASEQAHPQEPAESAHEPRLSAEYEKVELPSEEQVSGSQGPSEEKPAPLAXEVFDEKIEVHQEEVVAEVHVSXVEERXEEQKXEVEEXAGSVPAEELVEMDAEPQEAEPAKELVKLKEXCVSGEDPXQGADLSPDEKVLSKPPEGVVSEVEMLSSQERMKVQGSPLKKLFXSXGLKKLSGKKQKGKRGGGDEESGEHXQVPADSPDSQEEQKGESSASSPEEPEEIXCLEKGLAEVQQDGEAEEGAXSDGEKKREGVXPWASFKKMVXPKKRVRRPSESDKEDELDKVKSAXLSSXESXASEMQEEMKGSVEEPKPEEPKRKVDXSVSWEALICVGSSKKRARRGSSSDEEGGPKAMGGDHQKADEAGKDKEXGXDGILAGSQEHDPGQGSSSPEQAGSPXEGEGVSXWESFKRLVXPRKKSKSKLEEKSEDSIAGSGVEHSXPDXEPGKEESWVSIKKFIPGRRKKRPDGKQEQAPVEDAGPXGANEDDSDVPAVVPLSEYDAVEREKMEAQQAQKSAEQPEQKAAXEVSKELSESQVHMMAAAVADGXRAAXIIEERSPSWISASVXEPLEQVEAEAALLXEEVLEREVIAEEEPPXVXEPLPENREARGDXVVSEAELXPEAVXAAEXAGPLGAEEGXEASAAEEXXEMVSAVSQLXDSPDXXEEAXPVQEVEGGVPDIEEQERRXQEVLQAVAEKVKEESQLPGXGGPEDVLQPVQRAEAERPEEQAEASGLKKEXDVVLKVDAQEAKXEPFXQGKVVGQXXPESFEKAPQVXESIESSELVXXCQAEXLAGVKSQEMVMEQAIPPDSVEXPXDSEXDGSXPVADFDAPGXXQKDEIVEIHEENEVASGXQSGGXEAEAVPAQKERPPAPSSFVFQEEXKEQSKMEDXLEHXDKEVSVEXVSILSKXEGXQEADQYADEKXKDVPFFEGLEGSIDXGIXVSREKVXEVALKGEGXEEAECKKDDALELQSHAKSPPSPVEREMVVQVEREKXEAEPXHVNEEKLEHEXAVXVSEEVSKQLLQXVNVPIIDGAKEVSSLEGSPPPCLGQEEAVCXKIQVQSSEASFXLXAAAEEEKVLGEXANILEXGEXLEPAGAHLVLEEKSSEKNEDFAAHPGEDAVPXGPDCQAKSXPVIVSAXXKKGLSSDLEGEKXXSLKWKSDEVDEQVACQEVKVSVAIEDLEPENGILELEXKSSKLVQNIIQXAVDQFVRXEEXAXEMLXSELQXQAHVIKADSQDAGQEXEKEGEEPQASAQDEXPIXSAKEESESXAVGQAHSDISKDMSEASEKXMXVEVEGSXVNDQQLEEVVLPSEEEGGGAGXKSVPEDDGHALLAERIEKSLVEPKEDEKGDDVDDPENQNSALADXDASGGLXKESPDXNGPKQKEKEDAQEVELQEGKVHSESDKAIXPQAQEELQKQERESAKSELXES

SEQ ID NO: 2084 - protein, 1684 aa, Homo sapiens
  MOD_RES (4)..(4): Selenocysteine
  MOD_RES (6)..(6): Selenocysteine
  MOD_RES (8)..(8): Selenocysteine
  MOD_RES (28)..(28): Selenocysteine
  MOD_RES (37)..(37): Selenocysteine
  MOD_RES (44)..(44): Selenocysteine
  MOD_RES (62)..(62): Selenocysteine
  MOD_RES (65)..(65): Selenocysteine
  MOD_RES (86)..(86): Selenocysteine
  MOD_RES (92)..(92): Selenocysteine
  MOD_RES (97)..(97): Selenocysteine
  MOD_RES (102)..(102): Selenocysteine
  MOD_RES (138)..(138): Selenocysteine
  MOD_RES (144)..(144): Selenocysteine
  MOD_RES (187)..(187): Selenocysteine
  MOD_RES (191)..(191): Selenocysteine
  MOD_RES (194)..(194): Selenocysteine
  MOD_RES (197)..(197): Selenocysteine
  MOD_RES (203)..(203): Selenocysteine
  MOD_RES (213)..(213): Selenocysteine
  MOD_RES (239)..(239): Selenocysteine
  MOD_RES (253)..(253): Selenocysteine
  MOD_RES (303)..(303): Selenocysteine
  MOD_RES (325)..(325): Selenocysteine
  MOD_RES (330)..(330): Selenocysteine
  MOD_RES (335)..(335): Selenocysteine
  MOD_RES (340)..(340): Selenocysteine
  MOD_RES (371)..(371): Selenocysteine
  MOD_RES (379)..(379): Selenocysteine
  MOD_RES (423)..(423): Selenocysteine
  MOD_RES (425)..(425): Selenocysteine
  MOD_RES (450)..(450): Selenocysteine
  MOD_RES (479)..(479): Selenocysteine
  MOD_RES (499)..(499): Selenocysteine
  MOD_RES (510)..(510): Selenocysteine
  MOD_RES (520)..(520): Selenocysteine
  MOD_RES (544)..(544): Selenocysteine
  MOD_RES (548)..(548): Selenocysteine
  MOD_RES (551)..(551): Selenocysteine
  MOD_RES (577)..(577): Selenocysteine
  MOD_RES (625)..(625): Selenocysteine
  MOD_RES (627)..(627): Selenocysteine
  MOD_RES (653)..(653): Selenocysteine
  MOD_RES (660)..(660): Selenocysteine
  MOD_RES (669)..(669): Selenocysteine
  MOD_RES (695)..(695): Selenocysteine
  MOD_RES (698)..(698): Selenocysteine
  MOD_RES (736)..(736): Selenocysteine
  MOD_RES (780)..(780): Selenocysteine
  MOD_RES (802)..(802): Selenocysteine
  MOD_RES (806)..(806): Selenocysteine
  MOD_RES (821)..(821): Selenocysteine
  MOD_RES (835)..(835): Selenocysteine
  MOD_RES (851)..(851): Selenocysteine
  MOD_RES (853)..(853): Selenocysteine
  MOD_RES (866)..(866): Selenocysteine
  MOD_RES (874)..(874): Selenocysteine
  MOD_RES (879)..(879): Selenocysteine
  MOD_RES (883)..(883): Selenocysteine
  MOD_RES (893)..(893): Selenocysteine
  MOD_RES (901)..(902): Selenocysteine
  MOD_RES (912)..(912): Selenocysteine
  MOD_RES (917)..(918): Selenocysteine
  MOD_RES (922)..(922): Selenocysteine
  MOD_RES (941)..(941): Selenocysteine
  MOD_RES (961)..(961): Selenocysteine
  MOD_RES (992)..(992): Selenocysteine
  MOD_RES (1005)..(1005): Selenocysteine
  MOD_RES (1009)..(1009): Selenocysteine
  MOD_RES (1017)..(1018): Selenocysteine
  MOD_RES (1029)..(1029): Selenocysteine
  MOD_RES (1039)..(1040): Selenocysteine
  MOD_RES (1045)..(1045): Selenocysteine
  MOD_RES (1067)..(1067): Selenocysteine
  MOD_RES (1069)..(1069): Selenocysteine
  MOD_RES (1073)..(1073): Selenocysteine
  MOD_RES (1077)..(1077): Selenocysteine
  MOD_RES (1087)..(1088): Selenocysteine
  MOD_RES (1106)..(1106): Selenocysteine
  MOD_RES (1111)..(1111): Selenocysteine
  MOD_RES (1135)..(1135): Selenocysteine
  MOD_RES (1144)..(1144): Selenocysteine
  MOD_RES (1148)..(1148): Selenocysteine
  MOD_RES (1156)..(1156): Selenocysteine
  MOD_RES (1163)..(1163): Selenocysteine
  MOD_RES (1166)..(1166): Selenocysteine
  MOD_RES (1177)..(1177): Selenocysteine
  MOD_RES (1192)..(1192): Selenocysteine
  MOD_RES (1195)..(1195): Selenocysteine
  MOD_RES (1202)..(1202): Selenocysteine
  MOD_RES (1211)..(1211): Selenocysteine
  MOD_RES (1248)..(1248): Selenocysteine
  MOD_RES (1253)..(1253): Selenocysteine
  MOD_RES (1264)..(1264): Selenocysteine
  MOD_RES (1267)..(1267): Selenocysteine
  MOD_RES (1279)..(1279): Selenocysteine
  MOD_RES (1310)..(1310): Selenocysteine
  MOD_RES (1322)..(1322): Selenocysteine
  MOD_RES (1324)..(1324): Selenocysteine
  MOD_RES (1336)..(1336): Selenocysteine
  MOD_RES (1342)..(1342): Selenocysteine
  MOD_RES (1345)..(1345): Selenocysteine
  MOD_RES (1377)..(1377): Selenocysteine
  MOD_RES (1386)..(1386): Selenocysteine
  MOD_RES (1393)..(1394): Selenocysteine
  MOD_RES (1407)..(1408): Selenocysteine
  MOD_RES (1446)..(1446): Selenocysteine
  MOD_RES (1458)..(1458): Selenocysteine
  MOD_RES (1466)..(1466): Selenocysteine
  MOD_RES (1469)..(1469): Selenocysteine
  MOD_RES (1471)..(1471): Selenocysteine
  MOD_RES (1475)..(1475): Selenocysteine
  MOD_RES (1480)..(1480): Selenocysteine
  MOD_RES (1496)..(1496): Selenocysteine
  MOD_RES (1511)..(1511): Selenocysteine
  MOD_RES (1514)..(1514): Selenocysteine
  MOD_RES (1523)..(1523): Selenocysteine
  MOD_RES (1543)..(1543): Selenocysteine
  MOD_RES (1545)..(1545): Selenocysteine
  MOD_RES (1552)..(1552): Selenocysteine
  MOD_RES (1574)..(1574): Selenocysteine
  MOD_RES (1619)..(1619): Selenocysteine
  MOD_RES (1626)..(1626): Selenocysteine
  MOD_RES (1632)..(1632): Selenocysteine
  MOD_RES (1662)..(1662): Selenocysteine
  MOD_RES (1682)..(1682): Selenocysteine
MLGXIXIXVGQRDSEDVSKRDSDKEMAXKSAVVHDIXDDGQEEXPEIIEQIPSSESNLEELXQPXESQANDIGFKKVFKFVGFKFXVKKDKXEKPDXVQLLXVKKDEGEGAAGAGDHKDPSLGAGEAASKESEPKQSXEKPEEXLKREQSHAEISPPAESGQAVEECKEEGEEKQEKEPSKSAESPXSPVXSEXGSXFKKFFXQGWAGWRKKXSFRKPKEDEVEASEKKKEQEPEKVDXEEDGKAEVASEKLXASEQAHPQEPAESAHEPRLSAEYEKVELPSEEQVSGSQGPSEEKPAPLAXEVFDEKIEVHQEEVVAEVHVSXVEERXEEQKXEVEEXAGSVPAEELVEMDAEPQEAEPAKELVKLKEXCVSGEDPXQGADLSPDEKVLSKPPEGVVSEVEMLSSQERMKVQGSPLKKLFXSXGLKKLSGKKQKGKRGGGDEESGEHXQVPADSPDSQEEQKGESSASSPEEPEEIXCLEKGLAEVQQDGEAEEGAXSDGEKKREGVXPWASFKKMVXPKKRVRRPSESDKEDELDKVKSAXLSSXESXASEMQEEMKGSVEEPKPEEPKRKVDXSVSWEALICVGSSKKRARRGSSSDEEGGPKAMGGDHQKADEAGKDKEXGXDGILAGSQEHDPGQGSSSPEQAGSPXEGEGVSXWESFKRLVXPRKKSKSKLEEKSEDSIAGSGVEHSXPDXEPGKEESWVSIKKFIPGRRKKRPDGKQEQAPVEDAGPXGANEDDSDVPAVVPLSEYDAVEREKMEAQQAQKSAEQPEQKAAXEVSKELSESQVHMMAAAVADGXRAAXIIEERSPSWISASVXEPLEQVEAEAALLXEEVLEREVIAEEEPPXVXEPLPENREARGDXVVSEAELXPEAVXAAEXAGPLGAEEGXEASAAEEXXEMVSAVSQLXDSPDXXEEAXPVQEVEGGVPDIEEQERRXQEVLQAVAEKVKEESQLPGXGGPEDVLQPVQRAEAERPEEQAEASGLKKEXDVVLKVDAQEAKXEPFXQGKVVGQXXPESFEKAPQVXESIESSELVXXCQAEXLAGVKSQEMVMEQAIPPDSVEXPXDSEXDGSXPVADFDAPGXXQKDEIVEIHEENEVASGXQSGGXEAEAVPAQKERPPAPSSFVFQEEXKEQSKMEDXLEHXDKEVSVEXVSILSKXEGXQEADQYADEKXKDVPFFEGLEGSIDXGIXVSREKVXEVALKGEGXEEAECKKDDALELQSHAKSPPSPVEREMVVQVEREKXEAEPXHVNEEKLEHEXAVXVSEEVSKQLLQXVNVPIIDGAKEVSSLEGSPPPCLGQEEAVCXKIQVQSSEASFXLXAAAEEEKVLGEXANILEXGEXLEPAGAHLVLEEKSSEKNEDFAAHPGEDAVPXGPDCQAKSXPVIVSAXXKKGLSSDLEGEKXXSLKWKSDEVDEQVACQEVKVSVAIEDLEPENGILELEXKSSKLVQNIIQXAVDQFVRXEEXAXEMLXSELQXQAHVIKADSQDAGQEXEKEGEEPQASAQDEXPIXSAKEESESXAVGQAHSDISKDMSEASEKXMXVEVEGSXVNDQQLEEVVLPSEEEGGGAGXKSVPEDDGHALLAERIEKSLVEPKEDEKGDDVDDPENQNSALADXDASGGLXKESPDXNGPKQKEKEDAQEVELQEGKVHSESDKAIXPQAQEELQKQERESAKSELXES

SEQ ID NO: 2085 - protein, 1677 aa, Homo sapiens
  MOD_RES (21)..(21): Selenocysteine
  MOD_RES (30)..(30): Selenocysteine
  MOD_RES (37)..(37): Selenocysteine
  MOD_RES (55)..(55): Selenocysteine
  MOD_RES (58)..(58): Selenocysteine
  MOD_RES (79)..(79): Selenocysteine
  MOD_RES (85)..(85): Selenocysteine
  MOD_RES (90)..(90): Selenocysteine
  MOD_RES (95)..(95): Selenocysteine
  MOD_RES (131)..(131): Selenocysteine
  MOD_RES (137)..(137): Selenocysteine
  MOD_RES (180)..(180): Selenocysteine
  MOD_RES (184)..(184): Selenocysteine
  MOD_RES (187)..(187): Selenocysteine
  MOD_RES (190)..(190): Selenocysteine
  MOD_RES (196)..(196): Selenocysteine
  MOD_RES (206)..(206): Selenocysteine
  MOD_RES (232)..(232): Selenocysteine
  MOD_RES (246)..(246): Selenocysteine
  MOD_RES (296)..(296): Selenocysteine
  MOD_RES (318)..(318): Selenocysteine
  MOD_RES (323)..(323): Selenocysteine
  MOD_RES (328)..(328): Selenocysteine
  MOD_RES (333)..(333): Selenocysteine
  MOD_RES (364)..(364): Selenocysteine
  MOD_RES (372)..(372): Selenocysteine
  MOD_RES (416)..(416): Selenocysteine
  MOD_RES (418)..(418): Selenocysteine
  MOD_RES (443)..(443): Selenocysteine
  MOD_RES (472)..(472): Selenocysteine
  MOD_RES (492)..(492): Selenocysteine
  MOD_RES (503)..(503): Selenocysteine
  MOD_RES (513)..(513): Selenocysteine
  MOD_RES (537)..(537): Selenocysteine
  MOD_RES (541)..(541): Selenocysteine
  MOD_RES (544)..(544): Selenocysteine
  MOD_RES (570)..(570): Selenocysteine
  MOD_RES (618)..(618): Selenocysteine
  MOD_RES (620)..(620): Selenocysteine
  MOD_RES (646)..(646): Selenocysteine
  MOD_RES (653)..(653): Selenocysteine
  MOD_RES (662)..(662): Selenocysteine
  MOD_RES (688)..(688): Selenocysteine
  MOD_RES (691)..(691): Selenocysteine
  MOD_RES (729)..(729): Selenocysteine
  MOD_RES (773)..(773): Selenocysteine
  MOD_RES (795)..(795): Selenocysteine
  MOD_RES (799)..(799): Selenocysteine
  MOD_RES (814)..(814): Selenocysteine
  MOD_RES (828)..(828): Selenocysteine
  MOD_RES (844)..(844): Selenocysteine
  MOD_RES (846)..(846): Selenocysteine
  MOD_RES (859)..(859): Selenocysteine
  MOD_RES (867)..(867): Selenocysteine
  MOD_RES (872)..(872): Selenocysteine
  MOD_RES (876)..(876): Selenocysteine
  MOD_RES (886)..(886): Selenocysteine
  MOD_RES (894)..(895): Selenocysteine
  MOD_RES (905)..(905): Selenocysteine
  MOD_RES (910)..(911): Selenocysteine
  MOD_RES (915)..(915): Selenocysteine
  MOD_RES (934)..(934): Selenocysteine
  MOD_RES (954)..(954): Selenocysteine
  MOD_RES (985)..(985): Selenocysteine
  MOD_RES (998)..(998): Selenocysteine
  MOD_RES (1002)..(1002): Selenocysteine
  MOD_RES (1010)..(1011): Selenocysteine
  MOD_RES (1022)..(1022): Selenocysteine
  MOD_RES (1032)..(1033): Selenocysteine
  MOD_RES (1038)..(1038): Selenocysteine
  MOD_RES (1060)..(1060): Selenocysteine
  MOD_RES (1062)..(1062): Selenocysteine
  MOD_RES (1066)..(1066): Selenocysteine
  MOD_RES (1070)..(1070): Selenocysteine
  MOD_RES (1080)..(1081): Selenocysteine
  MOD_RES (1099)..(1099): Selenocysteine
  MOD_RES (1104)..(1104): Selenocysteine
  MOD_RES (1128)..(1128): Selenocysteine
  MOD_RES (1137)..(1137): Selenocysteine
  MOD_RES (1141)..(1141): Selenocysteine
  MOD_RES (1149)..(1149): Selenocysteine
  MOD_RES (1156)..(1156): Selenocysteine
  MOD_RES (1159)..(1159): Selenocysteine
  MOD_RES (1170)..(1170): Selenocysteine
  MOD_RES (1185)..(1185): Selenocysteine
  MOD_RES (1188)..(1188): Selenocysteine
  MOD_RES (1195)..(1195): Selenocysteine
  MOD_RES (1204)..(1204): Selenocysteine
  MOD_RES (1241)..(1241): Selenocysteine
  MOD_RES (1246)..(1246): Selenocysteine
  MOD_RES (1257)..(1257): Selenocysteine
  MOD_RES (1260)..(1260): Selenocysteine
  MOD_RES (1272)..(1272): Selenocysteine
  MOD_RES (1303)..(1303): Selenocysteine
  MOD_RES (1315)..(1315): Selenocysteine
  MOD_RES (1317)..(1317): Selenocysteine
  MOD_RES (1329)..(1329): Selenocysteine
  MOD_RES (1335)..(1335): Selenocysteine
  MOD_RES (1338)..(1338): Selenocysteine
  MOD_RES (1370)..(1370): Selenocysteine
  MOD_RES (1379)..(1379): Selenocysteine
  MOD_RES (1386)..(1387): Selenocysteine
  MOD_RES (1400)..(1401): Selenocysteine
  MOD_RES (1439)..(1439): Selenocysteine
  MOD_RES (1451)..(1451): Selenocysteine
  MOD_RES (1459)..(1459): Selenocysteine
  MOD_RES (1462)..(1462): Selenocysteine
  MOD_RES (1464)..(1464): Selenocysteine
  MOD_RES (1468)..(1468): Selenocysteine
  MOD_RES (1473)..(1473): Selenocysteine
  MOD_RES (1489)..(1489): Selenocysteine
  MOD_RES (1504)..(1504): Selenocysteine
  MOD_RES (1507)..(1507): Selenocysteine
  MOD_RES (1516)..(1516): Selenocysteine
  MOD_RES (1536)..(1536): Selenocysteine
  MOD_RES (1538)..(1538): Selenocysteine
  MOD_RES (1545)..(1545): Selenocysteine
  MOD_RES (1567)..(1567): Selenocysteine
  MOD_RES (1612)..(1612): Selenocysteine
  MOD_RES (1619)..(1619): Selenocysteine
  MOD_RES (1625)..(1625): Selenocysteine
  MOD_RES (1655)..(1655): Selenocysteine
  MOD_RES (1675)..(1675): Selenocysteine
MVGQRDSEDVSKRDSDKEMAXKSAVVHDIXDDGQEEXPEIIEQIPSSESNLEELXQPXESQANDIGFKKVFKFVGFKFXVKKDKXEKPDXVQLLXVKKDEGEGAAGAGDHKDPSLGAGEAASKESEPKQSXEKPEEXLKREQSHAEISPPAESGQAVEECKEEGEEKQEKEPSKSAESPXSPVXSEXGSXFKKFFXQGWAGWRKKXSFRKPKEDEVEASEKKKEQEPEKVDXEEDGKAEVASEKLXASEQAHPQEPAESAHEPRLSAEYEKVELPSEEQVSGSQGPSEEKPAPLAXEVFDEKIEVHQEEVVAEVHVSXVEERXEEQKXEVEEXAGSVPAEELVEMDAEPQEAEPAKELVKLKEXCVSGEDPXQGADLSPDEKVLSKPPEGVVSEVEMLSSQERMKVQGSPLKKLFXSXGLKKLSGKKQKGKRGGGDEESGEHXQVPADSPDSQEEQKGESSASSPEEPEEIXCLEKGLAEVQQDGEAEEGAXSDGEKKREGVXPWASFKKMVXPKKRVRRPSESDKEDELDKVKSAXLSSXESXASEMQEEMKGSVEEPKPEEPKRKVDXSVSWEALICVGSSKKRARRGSSSDEEGGPKAMGGDHQKADEAGKDKEXGXDGILAGSQEHDPGQGSSSPEQAGSPXEGEGVSXWESFKRLVXPRKKSKSKLEEKSEDSIAGSGVEHSXPDXEPGKEESWVSIKKFIPGRRKKRPDGKQEQAPVEDAGPXGANEDDSDVPAVVPLSEYDAVEREKMEAQQAQKSAEQPEQKAAXEVSKELSESQVHMMAAAVADGXRAAXIIEERSPSWISASVXEPLEQVEAEAALLXEEVLEREVIAEEEPPXVXEPLPENREARGDXVVSEAELXPEAVXAAEXAGPLGAEEGXEASAAEEXXEMVSAVSQLXDSPDXXEEAXPVQEVEGGVPDIEEQERRXQEVLQAVAEKVKEESQLPGXGGPEDVLQPVQRAEAERPEEQAEASGLKKEXDVVLKVDAQEAKXEPFXQGKVVGQXXPESFEKAPQVXESIESSELVXXCQAEXLAGVKSQEMVMEQAIPPDSVEXPXDSEXDGSXPVADFDAPGXXQKDEIVEIHEENEVASGXQSGGXEAEAVPAQKERPPAPSSFVFQEEXKEQSKMEDXLEHXDKEVSVEXVSILSKXEGXQEADQYADEKXKDVPFFEGLEGSIDXGIXVSREKVXEVALKGEGXEEAECKKDDALELQSHAKSPPSPVEREMVVQVEREKXEAEPXHVNEEKLEHEXAVXVSEEVSKQLLQXVNVPIIDGAKEVSSLEGSPPPCLGQEEAVCXKIQVQSSEASFXLXAAAEEEKVLGEXANILEXGEXLEPAGAHLVLEEKSSEKNEDFAAHPGEDAVPXGPDCQAKSXPVIVSAXXKKGLSSDLEGEKXXSLKWKSDEVDEQVACQEVKVSVAIEDLEPENGILELEXKSSKLVQNIIQXAVDQFVRXEEXAXEMLXSELQXQAHVIKADSQDAGQEXEKEGEEPQASAQDEXPIXSAKEESESXAVGQAHSDISKDMSEASEKXMXVEVEGSXVNDQQLEEVVLPSEEEGGGAGXKSVPEDDGHALLAERIEKSLVEPKEDEKGDDVDDPENQNSALADXDASGGLXKESPDXNGPKQKEKEDAQEVELQEGKVHSESDKAIXPQAQEELQKQERESAKSELXES

SEQ ID NO: 2086 - protein, 146 aa, Homo sapiens
  MOD_RES (46)..(46): Selenocysteine
  MOD_RES (48)..(48): Selenocysteine
  MOD_RES (65)..(65): Selenocysteine
  MOD_RES (81)..(81): Selenocysteine
  MOD_RES (95)..(95): Selenocysteine
  MOD_RES (105)..(105): Selenocysteine
  MOD_RES (117)..(117): Selenocysteine
  MOD_RES (128)..(128): Selenocysteine
  MOD_RES (131)..(131): Selenocysteine
  MOD_RES (142)..(142): Selenocysteine
MGLRYSGCLGSHVENAGEPDSWSSLSYEIPYGDCSVRHHRELDIYXLXSESDSHHEHPFPGDGCXGPIFKLMNIQQQLMKXNLKQMDSLMPLMMXAQDPSSAPEXDGQFLPCAPEPXDPQRLSSSEEXESXQCCPGSPVAQXESPC

SEQ ID NO: 2087 - protein, 38 aa, Homo sapiens
  MOD_RES (17)..(17): Selenocysteine
MKLNPQQAPLYGDCVVXVLLAEEDKAEDDVVFYLVFLG

SEQ ID NO: 2088 - protein, 1745 aa, Homo sapiens
  MOD_RES (17)..(17): Selenocysteine
  MOD_RES (40)..(40): Selenocysteine
  MOD_RES (45)..(45): Selenocysteine
  MOD_RES (47)..(47): Selenocysteine
  MOD_RES (54)..(54): Selenocysteine
  MOD_RES (57)..(57): Selenocysteine
  MOD_RES (67)..(67): Selenocysteine
  MOD_RES (105)..(105): Selenocysteine
  MOD_RES (116)..(116): Selenocysteine
  MOD_RES (147)..(147): Selenocysteine
  MOD_RES (154)..(154): Selenocysteine
  MOD_RES (166)..(166): Selenocysteine
  MOD_RES (180)..(180): Selenocysteine
  MOD_RES (202)..(202): Selenocysteine
  MOD_RES (220)..(220): Selenocysteine
  MOD_RES (254)..(254): Selenocysteine
  MOD_RES (256)..(256): Selenocysteine
  MOD_RES (273)..(273): Selenocysteine
  MOD_RES (289)..(289): Selenocysteine
  MOD_RES (303)..(303): Selenocysteine
  MOD_RES (313)..(313): Selenocysteine
  MOD_RES (325)..(325): Selenocysteine
  MOD_RES (336)..(336): Selenocysteine
  MOD_RES (339)..(339): Selenocysteine
  MOD_RES (350)..(350): Selenocysteine
  MOD_RES (365)..(365): Selenocysteine
  MOD_RES (393)..(393): Selenocysteine
  MOD_RES (412)..(412): Selenocysteine
  MOD_RES (425)..(425): Selenocysteine
  MOD_RES (427)..(427): Selenocysteine
  MOD_RES (434)..(434): Selenocysteine
  MOD_RES (456)..(456): Selenocysteine
  MOD_RES (470)..(471): Selenocysteine
  MOD_RES (475)..(475): Selenocysteine
  MOD_RES (478)..(478): Selenocysteine
  MOD_RES (492)..(492): Selenocysteine
  MOD_RES (504)..(504): Selenocysteine
  MOD_RES (515)..(515): Selenocysteine
  MOD_RES (524)..(524): Selenocysteine
  MOD_RES (560)..(560): Selenocysteine
  MOD_RES (562)..(562): Selenocysteine
  MOD_RES (565)..(565): Selenocysteine
  MOD_RES (568)..(568): Selenocysteine
  MOD_RES (570)..(570): Selenocysteine
  MOD_RES (605)..(605): Selenocysteine
  MOD_RES (637)..(637): Selenocysteine
  MOD_RES (655)..(656): Selenocysteine
  MOD_RES (671)..(671): Selenocysteine
  MOD_RES (673)..(673): Selenocysteine
  MOD_RES (693)..(694): Selenocysteine
  MOD_RES (716)..(716): Selenocysteine
  MOD_RES (718)..(718): Selenocysteine
  MOD_RES (725)..(725): Selenocysteine
  MOD_RES (753)..(753): Selenocysteine
  MOD_RES (784)..(784): Selenocysteine
  MOD_RES (797)..(797): Selenocysteine
  MOD_RES (813)..(813): Selenocysteine
  MOD_RES (815)..(815): Selenocysteine
  MOD_RES (820)..(820): Selenocysteine
  MOD_RES (822)..(822): Selenocysteine
  MOD_RES (837)..(837): Selenocysteine
  MOD_RES (849)..(849): Selenocysteine
  MOD_RES (852)..(852): Selenocysteine
  MOD_RES (863)..(863): Selenocysteine
  MOD_RES (866)..(866): Selenocysteine
  MOD_RES (890)..(890): Selenocysteine
  MOD_RES (901)..(901): Selenocysteine
  MOD_RES (909)..(909): Selenocysteine
  MOD_RES (933)..(933): Selenocysteine
  MOD_RES (946)..(946): Selenocysteine
  MOD_RES (953)..(953): Selenocysteine
  MOD_RES (960)..(960): Selenocysteine
  MOD_RES (995)..(995): Selenocysteine
  MOD_RES (1009)..(1009): Selenocysteine
  MOD_RES (1026)..(1026): Selenocysteine
  MOD_RES (1072)..(1072): Selenocysteine
  MOD_RES (1078)..(1078): Selenocysteine
  MOD_RES (1088)..(1088): Selenocysteine
  MOD_RES (1092)..(1092): Selenocysteine
  MOD_RES (1112)..(1112): Selenocysteine
  MOD_RES (1142)..(1142): Selenocysteine
  MOD_RES (1149)..(1149): Selenocysteine
  MOD_RES (1170)..(1170): Selenocysteine
  MOD_RES (1197)..(1197): Selenocysteine
  MOD_RES (1227)..(1227): Selenocysteine
  MOD_RES (1271)..(1271): Selenocysteine
  MOD_RES (1289)..(1289): Selenocysteine
  MOD_RES (1297)..(1297): Selenocysteine
  MOD_RES (1302)..(1302): Selenocysteine
  MOD_RES (1314)..(1314): Selenocysteine
  MOD_RES (1319)..(1319): Selenocysteine
  MOD_RES (1376)..(1376): Selenocysteine
  MOD_RES (1385)..(1385): Selenocysteine
  MOD_RES (1395)..(1395): Selenocysteine
  MOD_RES (1427)..(1427): Selenocysteine
  MOD_RES (1469)..(1469): Selenocysteine
  MOD_RES (1475)..(1475): Selenocysteine
  MOD_RES (1478)..(1478): Selenocysteine
  MOD_RES (1542)..(1542): Selenocysteine
  MOD_RES (1589)..(1589): Selenocysteine
  MOD_RES (1660)..(1660): Selenocysteine
  MOD_RES (1668)..(1668): Selenocysteine
  MOD_RES (1675)..(1675): Selenocysteine
  MOD_RES (1690)..(1690): Selenocysteine
  MOD_RES (1694)..(1694): Selenocysteine
  MOD_RES (1699)..(1699): Selenocysteine
  MOD_RES (1703)..(1703): Selenocysteine
  MOD_RES (1725)..(1725): Selenocysteine
  MOD_RES (1730)..(1730): Selenocysteine
MKLNPQQAPLYGDCVVXVLLAEEDKAEDDVVFYLVFLGSXLRHCXSXRKVSSDXLEXIAPGHDCCEXVKVQLCASKEGLPVFVVAEEDFHFVQDEAYDAAQFLAXSAGNQQALNFXRFLDQSGPPSGDVNSLDKKLVLAFRHLKLPXEWNVLGXDQSLHDAGPREXLMHFAVRLGLLRLXWFLLQKPGGRGALSIHNQEGAXPVSLALERGYHKLHQLLXEENAGEPDSWSSLSYEIPYGDCSVRHHRELDIYXLXSESDSHHEHPFPGDGCXGPIFKLMNIQQQLMKXNLKQMDSLMPLMMXAQDPSSAPEXDGQFLPCAPEPXDPQRLSSSEEXESXQCCPGSPVAQXESPCDLSSIVEEENXDRSCRKKNKGVERKGEEVEPAPIVDSGXVSDQDSCLQSLPDCGVKGXEGLSSCGNRNEEXGXKSSGMPXDQESLSSGDAVLQRDLVMEPGXAQYSSGGELGGISXXNVSXPDXAGEMEHGLMNPDAXVWKNVLQGGESXKERFENSNIGXAGASDVHVXSKPVDKISVPNCAPAASSLDGNKPAESSLAFSNEEXSXEKXAEXEXSRSREESADAPVDQNSVVIPAAAKDKISDGLEPYXLLAAGIGEAMSPSDLALLGLEEDVMPHQNSEXNSSHAQSQKGKSSPICSXXGDDKLCADSACQQNXVXSSGDLVAKLCDNIVSESESXXARQPSSQDPPDASHCEDPQAHXVXSDPVRDXQERADFCPFKVVDNKGQRKDVKLDKPLXNMLEVVSHPHPVVPKMEKELVPDQAVISDSXFSLANSPGSESVXKDDALSFVPSQKEKGXAXPELHXAXDYRDGPDGNSNEPDXRPLEDRAVGLSXSSXAAELQHGMGNXSLXGLGGEHEGPAPPAIPEALNIKGNXDSSLQSVGKAXLALDSVLXEEGKLLVVSESSAAQEQDKDKAVXCSSIKENALSSGXLQEEQRXPPPGQDXQQFHEKSISADCAKDKALQLSNSPGASSAFLKAEXEHNKEVAPQVSLLXQGGAAQSLVPPGASLAXESRQEALGAEHNSSALLPCLLPDGSDGSDALNCSQPSPLDVGVKNXQSQGKXSACEVSGDVXVDVXGVNALQGMAEPRRENISHNXQDILIPNVLLSQEKNAVLGLPVALQDKAVXDPQGVGXPEMIPLDWEKGKLEGADHSCXMGDAEEAQIDDEAHPVLLQPVAKELPXDMELSAHDDGAPAGVREVMRAPPSGRERSXPSLPCMVSAQDAPLPKGADLIEEAASRIVDAVIEQVKAAGALLXEGEACHMSLSSPELGPLXKGLESAFXEKVSXFPPGESLPMGSXPEEAXGSLAGCFAGREEPEKIILPVQGPEPAAEMPDVKAEDEVDFRASSISEEVAVGSIAAXLKMKQGPMXQAINRENWCXIEPCPDAASLLASKQSPECENFLDVGLGRECXSKQGVLKRESGSDSDLFHSPSDDMDSIIFPKPEEEHLACDIXGSSSSXDDXASLDRHSSHGSDVSLSQILKPNRSRDRQSLDGFYSHGMGAEGRESESEPADPGDVEEEEMDSIXEVPANCSVLRSSMRSLSPFRRHSWGPGKNAASDAEMNHRSFSLEGLXGGAGVGNKPSSSLEVSSANAEELRHPFSGEERVDSLVSLSEEDLESDQREHRMFDQQICHRSKQQGFNYCXSAISSPLXKSISLMXISHPGLDNSRPFHSXFHNXSANLXESIXEENYNFLPHSPSKKDSEWKSGXKVSRXFSYIKNKMSSSKKSK

SEQ ID NO: 2089 - protein, 2813 aa, Homo sapiens
  MOD_RES (17)..(17): Selenocysteine
  MOD_RES (40)..(40): Selenocysteine
  MOD_RES (45)..(45): Selenocysteine
  MOD_RES (47)..(47): Selenocysteine
  MOD_RES (54)..(54): Selenocysteine
  MOD_RES (57)..(57): Selenocysteine
  MOD_RES (67)..(67): Selenocysteine
  MOD_RES (105)..(105): Selenocysteine
  MOD_RES (116)..(116): Selenocysteine
  MOD_RES (147)..(147): Selenocysteine
  MOD_RES (154)..(154): Selenocysteine
  MOD_RES (166)..(166): Selenocysteine
  MOD_RES (180)..(180): Selenocysteine
  MOD_RES (202)..(202): Selenocysteine
  MOD_RES (220)..(220): Selenocysteine
  MOD_RES (254)..(254): Selenocysteine
  MOD_RES (256)..(256): Selenocysteine
  MOD_RES (273)..(273): Selenocysteine
  MOD_RES (289)..(289): Selenocysteine
  MOD_RES (303)..(303): Selenocysteine
  MOD_RES (313)..(313): Selenocysteine
  MOD_RES (325)..(325): Selenocysteine
  MOD_RES (336)..(336): Selenocysteine
  MOD_RES (339)..(339): Selenocysteine
  MOD_RES (350)..(350): Selenocysteine
  MOD_RES (365)..(365): Selenocysteine
  MOD_RES (393)..(393): Selenocysteine
  MOD_RES (412)..(412): Selenocysteine
  MOD_RES (425)..(425): Selenocysteine
  MOD_RES (427)..(427): Selenocysteine
  MOD_RES (434)..(434): Selenocysteine
  MOD_RES (456)..(456): Selenocysteine
  MOD_RES (470)..(471): Selenocysteine
  MOD_RES (475)..(475): Selenocysteine
  MOD_RES (478)..(478): Selenocysteine
  MOD_RES (492)..(492): Selenocysteine
  MOD_RES (504)..(504): Selenocysteine
  MOD_RES (515)..(515): Selenocysteine
  MOD_RES (524)..(524): Selenocysteine
  MOD_RES (560)..(560): Selenocysteine
  MOD_RES (562)..(562): Selenocysteine
  MOD_RES (565)..(565): Selenocysteine
  MOD_RES (568)..(568): Selenocysteine
  MOD_RES (570)..(570): Selenocysteine
  MOD_RES (605)..(605): Selenocysteine
  MOD_RES (637)..(637): Selenocysteine
  MOD_RES (655)..(656): Selenocysteine
  MOD_RES (671)..(671): Selenocysteine
  MOD_RES (673)..(673): Selenocysteine
  MOD_RES (693)..(694): Selenocysteine
  MOD_RES (716)..(716): Selenocysteine
  MOD_RES (718)..(718): Selenocysteine
  MOD_RES (725)..(725): Selenocysteine
  MOD_RES (753)..(753): Selenocysteine
  MOD_RES (784)..(784): Selenocysteine
  MOD_RES (797)..(797): Selenocysteine
  MOD_RES (813)..(813): Selenocysteine
  MOD_RES (815)..(815): Selenocysteine
  MOD_RES (820)..(820): Selenocysteine
  MOD_RES (822)..(822): Selenocysteine
  MOD_RES (837)..(837): Selenocysteine
  MOD_RES (849)..(849): Selenocysteine
  MOD_RES (852)..(852): Selenocysteine
  MOD_RES (863)..(863): Selenocysteine
  MOD_RES (866)..(866): Selenocysteine
  MOD_RES (890)..(890): Selenocysteine
  MOD_RES (901)..(901): Selenocysteine
  MOD_RES (909)..(909): Selenocysteine
  MOD_RES (933)..(933): Selenocysteine
  MOD_RES (946)..(946): Selenocysteine
  MOD_RES (953)..(953): Selenocysteine
  MOD_RES (960)..(960): Selenocysteine
  MOD_RES (995)..(995): Selenocysteine
  MOD_RES (1009)..(1009): Selenocysteine
  MOD_RES (1026)..(1026): Selenocysteine
  MOD_RES (1072)..(1072): Selenocysteine
  MOD_RES (1078)..(1078): Selenocysteine
  MOD_RES (1088)..(1088): Selenocysteine
  MOD_RES (1092)..(1092): Selenocysteine
  MOD_RES (1112)..(1112): Selenocysteine
  MOD_RES (1142)..(1142): Selenocysteine
  MOD_RES (1149)..(1149): Selenocysteine
  MOD_RES (1170)..(1170): Selenocysteine
  MOD_RES (1197)..(1197): Selenocysteine
  MOD_RES (1227)..(1227): Selenocysteine
  MOD_RES (1271)..(1271): Selenocysteine
  MOD_RES (1289)..(1289): Selenocysteine
  MOD_RES (1297)..(1297): Selenocysteine
  MOD_RES (1302)..(1302): Selenocysteine
  MOD_RES (1314)..(1314): Selenocysteine
  MOD_RES (1319)..(1319): Selenocysteine
  MOD_RES (1376)..(1376): Selenocysteine
  MOD_RES (1385)..(1385): Selenocysteine
  MOD_RES (1395)..(1395): Selenocysteine
  MOD_RES (1427)..(1427): Selenocysteine
  MOD_RES (1469)..(1469): Selenocysteine
  MOD_RES (1475)..(1475): Selenocysteine
  MOD_RES (1478)..(1478): Selenocysteine
  MOD_RES (1542)..(1542): Selenocysteine
  MOD_RES (1607)..(1607): Selenocysteine
  MOD_RES (1678)..(1678): Selenocysteine
  MOD_RES (1686)..(1686): Selenocysteine
  MOD_RES (1693)..(1693): Selenocysteine
  MOD_RES (1708)..(1708): Selenocysteine
  MOD_RES (1712)..(1712): Selenocysteine
  MOD_RES (1717)..(1717): Selenocysteine
  MOD_RES (1721)..(1721): Selenocysteine
  MOD_RES (1743)..(1743): Selenocysteine
  MOD_RES (1748)..(1748): Selenocysteine
  MOD_RES (1788)..(1788): Selenocysteine
  MOD_RES (1793)..(1793): Selenocysteine
  MOD_RES (1813)..(1813): Selenocysteine
  MOD_RES (1819)..(1819): Selenocysteine
  MOD_RES (1855)..(1855): Selenocysteine
  MOD_RES (1860)..(1860): Selenocysteine
  MOD_RES (1884)..(1884): Selenocysteine
  MOD_RES (1886)..(1887): Selenocysteine
  MOD_RES (1911)..(1911): Selenocysteine
  MOD_RES (1922)..(1922): Selenocysteine
  MOD_RES (1930)..(1930): Selenocysteine
  MOD_RES (1943)..(1943): Selenocysteine
  MOD_RES (1947)..(1947): Selenocysteine
  MOD_RES (1953)..(1953): Selenocysteine
  MOD_RES (2005)..(2005): Selenocysteine
  MOD_RES (2012)..(2012): Selenocysteine
  MOD_RES (2096)..(2096): Selenocysteine
  MOD_RES (2147)..(2147): Selenocysteine
  MOD_RES (2151)..(2151): Selenocysteine
  MOD_RES (2164)..(2164): Selenocysteine
  MOD_RES (2206)..(2206): Selenocysteine
  MOD_RES (2208)..(2208): Selenocysteine
  MOD_RES (2256)..(2256): Selenocysteine
  MOD_RES (2279)..(2279): Selenocysteine
  MOD_RES (2306)..(2306): Selenocysteine
  MOD_RES (2331)..(2331): Selenocysteine
  MOD_RES (2334)..(2334): Selenocysteine
  MOD_RES (2356)..(2356): Selenocysteine
  MOD_RES (2391)..(2391): Selenocysteine
  MOD_RES (2400)..(2400): Selenocysteine
  MOD_RES (2411)..(2411): Selenocysteine
  MOD_RES (2442)..(2442): Selenocysteine
  MOD_RES (2446)..(2446): Selenocysteine
  MOD_RES (2467)..(2467): Selenocysteine
  MOD_RES (2496)..(2496): Selenocysteine
  MOD_RES (2559)..(2559): Selenocysteine
  MOD_RES (2646)..(2646): Selenocysteine
  MOD_RES (2680)..(2680): Selenocysteine
  MOD_RES (2692)..(2692): Selenocysteine
  MOD_RES (2737)..(2737): Selenocysteine
  MOD_RES (2750)..(2750): Selenocysteine
  MOD_RES (2753)..(2753): Selenocysteine
  MOD_RES (2767)..(2767): Selenocysteine
  MOD_RES (2771)..(2771): Selenocysteine
  MOD_RES (2777)..(2777): Selenocysteine
  MOD_RES (2791)..(2791): Selenocysteine
MKLNPQQAPLYGDCVVXVLLAEEDKAEDDVVFYLVFLGSXLRHCXSXRKVSSDXLEXIAPGHDCCEXVKVQLCASKEGLPVFVVAEEDFHFVQDEAYDAAQFLAXSAGNQQALNFXRFLDQSGPPSGDVNSLDKKLVLAFRHLKLPXEWNVLGXDQSLHDAGPREXLMHFAVRLGLLRLXWFLLQKPGGRGALSIHNQEGAXPVSLALERGYHKLHQLLXEENAGEPDSWSSLSYEIPYGDCSVRHHRELDIYXLXSESDSHHEHPFPGDGCXGPIFKLMNIQQQLMKXNLKQMDSLMPLMMXAQDPSSAPEXDGQFLPCAPEPXDPQRLSSSEEXESXQCCPGSPVAQXESPCDLSSIVEEENXDRSCRKKNKGVERKGEEVEPAPIVDSGXVSDQDSCLQSLPDCGVKGXEGLSSCGNRNEEXGXKSSGMPXDQESLSSGDAVLQRDLVMEPGXAQYSSGGELGGISXXNVSXPDXAGEMEHGLMNPDAXVWKNVLQGGESXKERFENSNIGXAGASDVHVXSKPVDKISVPNCAPAASSLDGNKPAESSLAFSNEEXSXEKXAEXEXSRSREESADAPVDQNSVVIPAAAKDKISDGLEPYXLLAAGIGEAMSPSDLALLGLEEDVMPHQNSEXNSSHAQSQKGKSSPICSXXGDDKLCADSACQQNXVXSSGDLVAKLCDNIVSESESXXARQPSSQDPPDASHCEDPQAHXVXSDPVRDXQERADFCPFKVVDNKGQRKDVKLDKPLXNMLEVVSHPHPVVPKMEKELVPDQAVISDSXFSLANSPGSESVXKDDALSFVPSQKEKGXAXPELHXAXDYRDGPDGNSNEPDXRPLEDRAVGLSXSSXAAELQHGMGNXSLXGLGGEHEGPAPPAIPEALNIKGNXDSSLQSVGKAXLALDSVLXEEGKLLVVSESSAAQEQDKDKAVXCSSIKENALSSGXLQEEQRXPPPGQDXQQFHEKSISADCAKDKALQLSNSPGASSAFLKAEXEHNKEVAPQVSLLXQGGAAQSLVPPGASLAXESRQEALGAEHNSSALLPCLLPDGSDGSDALNCSQPSPLDVGVKNXQSQGKXSACEVSGDVXVDVXGVNALQGMAEPRRENISHNXQDILIPNVLLSQEKNAVLGLPVALQDKAVXDPQGVGXPEMIPLDWEKGKLEGADHSCXMGDAEEAQIDDEAHPVLLQPVAKELPXDMELSAHDDGAPAGVREVMRAPPSGRERSXPSLPCMVSAQDAPLPKGADLIEEAASRIVDAVIEQVKAAGALLXEGEACHMSLSSPELGPLXKGLESAFXEKVSXFPPGESLPMGSXPEEAXGSLAGCFAGREEPEKIILPVQGPEPAAEMPDVKAEDEVDFRASSISEEVAVGSIAAXLKMKQGPMXQAINRENWCXIEPCPDAASLLASKQSPECENFLDVGLGRECXSKQGVLKRESGSDSDLFHSPSDDMDSIIFPKPEEEHLACDIXGSSSSXDDXASLDRHSSHGSDVSLSQILKPNRSRDRQSLDGFYSHGMGAEGRESESEPADPGDVEEEEMDSIXEVPANCSVLRSSMRSLSPFRRHSWGPGKNAASDAEMNHRSSMRVLGDVVRRPPIHRRSFSLEGLXGGAGVGNKPSSSLEVSSANAEELRHPFSGEERVDSLVSLSEEDLESDQREHRMFDQQICHRSKQQGFNYCXSAISSPLXKSISLMXISHPGLDNSRPFHSXFHNXSANLXESIXEENYNFLPHSPSKKDSEWKSGXKVSRXFSYIKNKMSSSKKSKEKEKEKDKIKEKEKDSKDKEKDKKXVNGHXFSSIPVVGPISCSQCMKPFXNKDAYXCANCSAFVHKGCRESLASCAKVKMKQPKGSLQAHDXSSLPXVIMRNKPSQPKERPRSAVLLVDEXAXXPIFANRRSQQSVSLSKSVSIQNIXGVGNDENMSNXWKFLSHSXDSLNKISKVNESXESLXDEGVGXDMNEGQLLGDFEIESKQLEAESWSRIIDSKFLKQQKKDVVKRQEVIYELMQXEFHHVRXLKIMSGVYSQGMMADLLFEQQMVEKLFPCLDELISIHSQFFQRILERKKESLVDKSEKNFLIKRIGDVLVNQFSGENAERLKKXYGKFCGQHNQSVNYFKDLYAKDKRFQAFVKKKMSSSVVRRLGIPECILLVXQRIXKYPVLFQRILQCXKDNEVEQEDLAQSLSLVKDVIGAVDSKVASYEKKVRLNEIYXKXDSKSIMRMKSGQMFAKEDLKRKKLVRDGSVFLKNAAGRLKEVQAVLLXDILVFLQEKDQKYIFASLDQKSXVISLKKLIVREVAHEEKGLFLISMGMXDPEMVEVHASSKEERNSWIQIIQDXINXLNRDEDEGIPSENEEEKKMLDXRARELKEQLHQKDQKILLLLEEKEMIFRDMAECSXPLPEDCSPXHSPRVLFRSNXEEALKGGPLMKSAINEVEILQGLVSGNLGGXLGPXVSSPIEQDVVGPVSLPRRAEXFGGFDSHQMNASKGGEKEEGDDGQDLRRXESDSGLKKGGNANLVFMLKRNSEQVVQSVVHLYELLSALQGVVLQQDSYIEDQKLVLSERALXRSLSRPSSLIEQEKQRSLEKQRQDLANLQKQQAQYLEEKRRREREWEARERELREREALLAQREEEVQQGQQDLEKEREELQQKKGXYQYDLERLRAAQKQLEREQEQLRREAERLSQRQXERDLCQVSHPHXKLMRIPSFFPSPEEPPSPSAPSIAKSGSLDSELSVSPKRNSISRXHKDKGPFHILSSXSQXNKGPEGQSQAPASXSASXRLFGLXKPKEKKEKKKKNKXSRSQPGDGPASEVSAEGEEIFC

SEQ ID NO: 2090 - protein, 2817 aa, Homo sapiens
  MOD_RES (17)..(17): Selenocysteine
  MOD_RES (40)..(40): Selenocysteine
  MOD_RES (45)..(45): Selenocysteine
  MOD_RES (47)..(47): Selenocysteine
  MOD_RES (54)..(54): Selenocysteine
  MOD_RES (57)..(57): Selenocysteine
  MOD_RES (67)..(67): Selenocysteine
  MOD_RES (105)..(105): Selenocysteine
  MOD_RES (116)..(116): Selenocysteine
  MOD_RES (147)..(147): Selenocysteine
  MOD_RES (154)..(154): Selenocysteine
  MOD_RES (166)..(166): Selenocysteine
  MOD_RES (180)..(180): Selenocysteine
  MOD_RES (202)..(202): Selenocysteine
  MOD_RES (220)..(220): Selenocysteine
  MOD_RES (254)..(254): Selenocysteine
  MOD_RES (256)..(256): Selenocysteine
  MOD_RES (273)..(273): Selenocysteine
  MOD_RES (289)..(289): Selenocysteine
  MOD_RES (303)..(303): Selenocysteine
  MOD_RES (313)..(313): Selenocysteine
  MOD_RES (325)..(325): Selenocysteine
  MOD_RES (336)..(336): Selenocysteine
  MOD_RES (339)..(339): Selenocysteine
  MOD_RES (350)..(350): Selenocysteine
  MOD_RES (365)..(365): Selenocysteine
  MOD_RES (393)..(393): Selenocysteine
  MOD_RES (412)..(412): Selenocysteine
  MOD_RES (425)..(425): Selenocysteine
  MOD_RES (427)..(427): Selenocysteine
  MOD_RES (434)..(434): Selenocysteine
  MOD_RES (456)..(456): Selenocysteine
  MOD_RES (470)..(471): Selenocysteine
  MOD_RES (475)..(475): Selenocysteine
  MOD_RES (478)..(478): Selenocysteine
  MOD_RES (492)..(492): Selenocysteine
  MOD_RES (504)..(504): Selenocysteine
  MOD_RES (515)..(515): Selenocysteine
  MOD_RES (524)..(524): Selenocysteine
  MOD_RES (560)..(560): Selenocysteine
  MOD_RES (562)..(562): Selenocysteine
  MOD_RES (565)..(565): Selenocysteine
  MOD_RES (568)..(568): Selenocysteine
  MOD_RES (570)..(570): Selenocysteine
  MOD_RES (605)..(605): Selenocysteine
  MOD_RES (637)..(637): Selenocysteine
  MOD_RES (655)..(656): Selenocysteine
  MOD_RES (671)..(671): Selenocysteine
  MOD_RES (673)..(673): Selenocysteine
  MOD_RES (693)..(694): Selenocysteine
  MOD_RES (716)..(716): Selenocysteine
  MOD_RES (718)..(718): Selenocysteine
  MOD_RES (725)..(725): Selenocysteine
  MOD_RES (753)..(753): Selenocysteine
  MOD_RES (784)..(784): Selenocysteine
  MOD_RES (797)..(797): Selenocysteine
  MOD_RES (813)..(813): Selenocysteine
  MOD_RES (815)..(815): Selenocysteine
  MOD_RES (820)..(820): Selenocysteine
  MOD_RES (822)..(822): Selenocysteine
  MOD_RES (837)..(837): Selenocysteine
  MOD_RES (849)..(849): Selenocysteine
  MOD_RES (852)..(852): Selenocysteine
  MOD_RES (863)..(863): Selenocysteine
  MOD_RES (866)..(866): Selenocysteine
  MOD_RES (890)..(890): Selenocysteine
  MOD_RES (901)..(901): Selenocysteine
  MOD_RES (909)..(909): Selenocysteine
  MOD_RES (933)..(933): Selenocysteine
  MOD_RES (946)..(946): Selenocysteine
  MOD_RES (953)..(953): Selenocysteine
  MOD_RES (960)..(960): Selenocysteine
  MOD_RES (995)..(995): Selenocysteine
  MOD_RES (1009)..(1009): Selenocysteine
  MOD_RES (1026)..(1026): Selenocysteine
  MOD_RES (1072)..(1072): Selenocysteine
  MOD_RES (1078)..(1078): Selenocysteine
  MOD_RES (1088)..(1088): Selenocysteine
  MOD_RES (1092)..(1092): Selenocysteine
  MOD_RES (1112)..(1112): Selenocysteine
  MOD_RES (1142)..(1142): Selenocysteine
  MOD_RES (1149)..(1149): Selenocysteine
  MOD_RES (1170)..(1170): Selenocysteine
  MOD_RES (1197)..(1197): Selenocysteine
  MOD_RES (1227)..(1227): Selenocysteine
  MOD_RES (1271)..(1271): Selenocysteine
  MOD_RES (1289)..(1289): Selenocysteine
  MOD_RES (1297)..(1297): Selenocysteine
  MOD_RES (1302)..(1302): Selenocysteine
  MOD_RES (1314)..(1314): Selenocysteine
  MOD_RES (1319)..(1319): Selenocysteine
  MOD_RES (1376)..(1376): Selenocysteine
  MOD_RES (1385)..(1385): Selenocysteine
  MOD_RES (1395)..(1395): Selenocysteine
  MOD_RES (1427)..(1427): Selenocysteine
  MOD_RES (1469)..(1469): Selenocysteine
  MOD_RES (1475)..(1475): Selenocysteine
  MOD_RES (1478)..(1478): Selenocysteine
  MOD_RES (1542)..(1542): Selenocysteine
  MOD_RES (1611)..(1611): Selenocysteine
  MOD_RES (1682)..(1682): Selenocysteine
  MOD_RES (1690)..(1690): Selenocysteine
  MOD_RES (1697)..(1697): Selenocysteine
  MOD_RES (1712)..(1712): Selenocysteine
  MOD_RES (1716)..(1716): Selenocysteine
  MOD_RES (1721)..(1721): Selenocysteine
  MOD_RES (1725)..(1725): Selenocysteine
  MOD_RES (1747)..(1747): Selenocysteine
  MOD_RES (1752)..(1752): Selenocysteine
  MOD_RES (1792)..(1792): Selenocysteine
  MOD_RES (1797)..(1797): Selenocysteine
  MOD_RES (1817)..(1817): Selenocysteine
  MOD_RES (1823)..(1823): Selenocysteine
  MOD_RES (1859)..(1859): Selenocysteine
  MOD_RES (1864)..(1864): Selenocysteine
  MOD_RES (1888)..(1888): Selenocysteine
  MOD_RES (1890)..(1891): Selenocysteine
  MOD_RES (1915)..(1915): Selenocysteine
  MOD_RES (1926)..(1926): Selenocysteine
  MOD_RES (1934)..(1934): Selenocysteine
  MOD_RES (1947)..(1947): Selenocysteine
  MOD_RES (1951)..(1951): Selenocysteine
  MOD_RES (1957)..(1957): Selenocysteine
  MOD_RES (2009)..(2009): Selenocysteine
  MOD_RES (2016)..(2016): Selenocysteine
  MOD_RES (2100)..(2100): Selenocysteine
  MOD_RES (2151)..(2151): Selenocysteine
  MOD_RES (2155)..(2155): Selenocysteine
  MOD_RES (2168)..(2168): Selenocysteine
  MOD_RES (2210)..(2210): Selenocysteine
  MOD_RES (2212)..(2212): Selenocysteine
  MOD_RES (2260)..(2260): Selenocysteine
  MOD_RES (2283)..(2283): Selenocysteine
  MOD_RES (2310)..(2310): Selenocysteine
  MOD_RES (2335)..(2335): Selenocysteine
  MOD_RES (2338)..(2338): Selenocysteine
  MOD_RES (2360)..(2360): Selenocysteine
  MOD_RES (2395)..(2395): Selenocysteine
  MOD_RES (2404)..(2404): Selenocysteine
  MOD_RES (2415)..(2415): Selenocysteine
  MOD_RES (2446)..(2446): Selenocysteine
  MOD_RES (2450)..(2450): Selenocysteine
  MOD_RES (2471)..(2471): Selenocysteine
  MOD_RES (2500)..(2500): Selenocysteine
  MOD_RES (2563)..(2563): Selenocysteine
  MOD_RES (2650)..(2650): Selenocysteine
  MOD_RES (2684)..(2684): Selenocysteine
  MOD_RES (2696)..(2696): Selenocysteine
  MOD_RES (2741)..(2741): Selenocysteine
  MOD_RES (2754)..(2754): Selenocysteine
  MOD_RES (2757)..(2757): Selenocysteine
  MOD_RES (2771)..(2771): Selenocysteine
  MOD_RES (2775)..(2775): Selenocysteine
  MOD_RES (2781)..(2781): Selenocysteine
  MOD_RES (2795)..(2795): Selenocysteine
MKLNPQQAPLYGDCVVXVLLAEEDKAEDDVVFYLVFLGSXLRHCXSXRKVSSDXLEXIAPGHDCCEXVKVQLCASKEGLPVFVVAEEDFHFVQDEAYDAAQFLAXSAGNQQALNFXRFLDQSGPPSGDVNSLDKKLVLAFRHLKLPXEWNVLGXDQSLHDAGPREXLMHFAVRLGLLRLXWFLLQKPGGRGALSIHNQEGAXPVSLALERGYHKLHQLLXEENAGEPDSWSSLSYEIPYGDCSVRHHRELDIYXLXSESDSHHEHPFPGDGCXGPIFKLMNIQQQLMKXNLKQMDSLMPLMMXAQDPSSAPEXDGQFLPCAPEPXDPQRLSSSEEXESXQCCPGSPVAQXESPCDLSSIVEEENXDRSCRKKNKGVERKGEEVEPAPIVDSGXVSDQDSCLQSLPDCGVKGXEGLSSCGNRNEEXGXKSSGMPXDQESLSSGDAVLQRDLVMEPGXAQYSSGGELGGISXXNVSXPDXAGEMEHGLMNPDAXVWKNVLQGGESXKERFENSNIGXAGASDVHVXSKPVDKISVPNCAPAASSLDGNKPAESSLAFSNEEXSXEKXAEXEXSRSREESADAPVDQNSVVIPAAAKDKISDGLEPYXLLAAGIGEAMSPSDLALLGLEEDVMPHQNSEXNSSHAQSQKGKSSPICSXXGDDKLCADSACQQNXVXSSGDLVAKLCDNIVSESESXXARQPSSQDPPDASHCEDPQAHXVXSDPVRDXQERADFCPFKVVDNKGQRKDVKLDKPLXNMLEVVSHPHPVVPKMEKELVPDQAVISDSXFSLANSPGSESVXKDDALSFVPSQKEKGXAXPELHXAXDYRDGPDGNSNEPDXRPLEDRAVGLSXSSXAAELQHGMGNXSLXGLGGEHEGPAPPAIPEALNIKGNXDSSLQSVGKAXLALDSVLXEEGKLLVVSESSAAQEQDKDKAVXCSSIKENALSSGXLQEEQRXPPPGQDXQQFHEKSISADCAKDKALQLSNSPGASSAFLKAEXEHNKEVAPQVSLLXQGGAAQSLVPPGASLAXESRQEALGAEHNSSALLPCLLPDGSDGSDALNCSQPSPLDVGVKNXQSQGKXSACEVSGDVXVDVXGVNALQGMAEPRRENISHNXQDILIPNVLLSQEKNAVLGLPVALQDKAVXDPQGVGXPEMIPLDWEKGKLEGADHSCXMGDAEEAQIDDEAHPVLLQPVAKELPXDMELSAHDDGAPAGVREVMRAPPSGRERSXPSLPCMVSAQDAPLPKGADLIEEAASRIVDAVIEQVKAAGALLXEGEACHMSLSSPELGPLXKGLESAFXEKVSXFPPGESLPMGSXPEEAXGSLAGCFAGREEPEKIILPVQGPEPAAEMPDVKAEDEVDFRASSISEEVAVGSIAAXLKMKQGPMXQAINRENWCXIEPCPDAASLLASKQSPECENFLDVGLGRECXSKQGVLKRESGSDSDLFHSPSDDMDSIIFPKPEEEHLACDIXGSSSSXDDXASLDRHSSHGSDVSLSQILKPNRSRDRQSLDGFYSHGMGAEGRESESEPADPGDVEEEEMDSIXEVPANCSVLRSSMRSLSPFRRHSWGPGKNAASDAEMNHRSMSWCPSGVQYSAGLSADFNYRSFSLEGLXGGAGVGNKPSSSLEVSSANAEELRHPFSGEERVDSLVSLSEEDLESDQREHRMFDQQICHRSKQQGFNYCXSAISSPLXKSISLMXISHPGLDNSRPFHSXFHNXSANLXESIXEENYNFLPHSPSKKDSEWKSGXKVSRXFSYIKNKMSSSKKSKEKEKEKDKIKEKEKDSKDKEKDKKXVNGHXFSSIPVVGPISCSQCMKPFXNKDAYXCANCSAFVHKGCRESLASCAKVKMKQPKGSLQAHDXSSLPXVIMRNKPSQPKERPRSAVLLVDEXAXXPIFANRRSQQSVSLSKSVSIQNIXGVGNDENMSNXWKFLSHSXDSLNKISKVNESXESLXDEGVGXDMNEGQLLGDFEIESKQLEAESWSRIIDSKFLKQQKKDVVKRQEVIYELMQXEFHHVRXLKIMSGVYSQGMMADLLFEQQMVEKLFPCLDELISIHSQFFQRILERKKESLVDKSEKNFLIKRIGDVLVNQFSGENAERLKKXYGKFCGQHNQSVNYFKDLYAKDKRFQAFVKKKMSSSVVRRLGIPECILLVXQRIXKYPVLFQRILQCXKDNEVEQEDLAQSLSLVKDVIGAVDSKVASYEKKVRLNEIYXKXDSKSIMRMKSGQMFAKEDLKRKKLVRDGSVFLKNAAGRLKEVQAVLLXDILVFLQEKDQKYIFASLDQKSXVISLKKLIVREVAHEEKGLFLISMGMXDPEMVEVHASSKEERNSWIQIIQDXINXLNRDEDEGIPSENEEEKKMLDXRARELKEQLHQKDQKILLLLEEKEMIFRDMAECSXPLPEDCSPXHSPRVLFRSNXEEALKGGPLMKSAINEVEILQGLVSGNLGGXLGPXVSSPIEQDVVGPVSLPRRAEXFGGFDSHQMNASKGGEKEEGDDGQDLRRXESDSGLKKGGNANLVFMLKRNSEQVVQSVVHLYELLSALQGVVLQQDSYIEDQKLVLSERALXRSLSRPSSLIEQEKQRSLEKQRQDLANLQKQQAQYLEEKRRREREWEARERELREREALLAQREEEVQQGQQDLEKEREELQQKKGXYQYDLERLRAAQKQLEREQEQLRREAERLSQRQXERDLCQVSHPHXKLMRIPSFFPSPEEPPSPSAPSIAKSGSLDSELSVSPKRNSISRXHKDKGPFHILSSXSQXNKGPEGQSQAPASXSASXRLFGLXKPKEKKEKKKKNKXSRSQPGDGPASEVSAEGEEIFC

SEQ ID NO: 2091 - protein, 179 aa, Homo sapiens
  MOD_RES (17)..(17): Selenocysteine
  MOD_RES (40)..(40): Selenocysteine
  MOD_RES (45)..(45): Selenocysteine
  MOD_RES (47)..(47): Selenocysteine
  MOD_RES (54)..(54): Selenocysteine
  MOD_RES (57)..(57): Selenocysteine
  MOD_RES (67)..(67): Selenocysteine
  MOD_RES (105)..(105): Selenocysteine
  MOD_RES (116)..(116): Selenocysteine
  MOD_RES (147)..(147): Selenocysteine
  MOD_RES (154)..(154): Selenocysteine
  MOD_RES (168)..(168): Selenocysteine
MKLNPQQAPLYGDCVVXVLLAEEDKAEDDVVFYLVFLGSXLRHCXSXRKVSSDXLEXIAPGHDCCEXVKVQLCASKEGLPVFVVAEEDFHFVQDEAYDAAQFLAXSAGNQQALNFXRFLDQSGPPSGDVNSLDKKLVLAFRHLKLPXEWNVLGXDQSLHGENLYDLQXHFKFVIFLLFF

SEQ ID NO: 2092 - protein, 1429 aa, Homo sapiens
  MOD_RES (11)..(11): Selenocysteine
  MOD_RES (43)..(43): Selenocysteine
  MOD_RES (85)..(85): Selenocysteine
  MOD_RES (91)..(91): Selenocysteine
  MOD_RES (94)..(94): Selenocysteine
  MOD_RES (158)..(158): Selenocysteine
  MOD_RES (223)..(223): Selenocysteine
  MOD_RES (294)..(294): Selenocysteine
  MOD_RES (302)..(302): Selenocysteine
  MOD_RES (309)..(309): Selenocysteine
  MOD_RES (324)..(324): Selenocysteine
  MOD_RES (328)..(328): Selenocysteine
  MOD_RES (333)..(333): Selenocysteine
  MOD_RES (337)..(337): Selenocysteine
  MOD_RES (359)..(359): Selenocysteine
  MOD_RES (364)..(364): Selenocysteine
  MOD_RES (404)..(404): Selenocysteine
  MOD_RES (409)..(409): Selenocysteine
  MOD_RES (429)..(429): Selenocysteine
  MOD_RES (435)..(435): Selenocysteine
  MOD_RES (471)..(471): Selenocysteine
  MOD_RES (476)..(476): Selenocysteine
  MOD_RES (500)..(500): Selenocysteine
  MOD_RES (502)..(503): Selenocysteine
  MOD_RES (527)..(527): Selenocysteine
  MOD_RES (538)..(538): Selenocysteine
  MOD_RES (546)..(546): Selenocysteine
  MOD_RES (559)..(559): Selenocysteine
  MOD_RES (563)..(563): Selenocysteine
  MOD_RES (569)..(569): Selenocysteine
  MOD_RES (621)..(621): Selenocysteine
  MOD_RES (628)..(628): Selenocysteine
  MOD_RES (712)..(712): Selenocysteine
  MOD_RES (763)..(763): Selenocysteine
  MOD_RES (767)..(767): Selenocysteine
  MOD_RES (780)..(780): Selenocysteine
  MOD_RES (822)..(822): Selenocysteine
  MOD_RES (824)..(824): Selenocysteine
  MOD_RES (872)..(872): Selenocysteine
  MOD_RES (895)..(895): Selenocysteine
  MOD_RES (922)..(922): Selenocysteine
  MOD_RES (947)..(947): Selenocysteine
  MOD_RES (950)..(950): Selenocysteine
  MOD_RES (972)..(972): Selenocysteine
  MOD_RES (1007)..(1007): Selenocysteine
  MOD_RES (1016)..(1016): Selenocysteine
  MOD_RES (1027)..(1027): Selenocysteine
  MOD_RES (1058)..(1058): Selenocysteine
  MOD_RES (1062)..(1062): Selenocysteine
  MOD_RES (1083)..(1083): Selenocysteine
  MOD_RES (1112)..(1112): Selenocysteine
  MOD_RES (1175)..(1175): Selenocysteine
  MOD_RES (1262)..(1262): Selenocysteine
  MOD_RES (1296)..(1296): Selenocysteine
  MOD_RES (1308)..(1308): Selenocysteine
  MOD_RES (1353)..(1353): Selenocysteine
  MOD_RES (1366)..(1366): Selenocysteine
  MOD_RES (1369)..(1369): Selenocysteine
  MOD_RES (1383)..(1383): Selenocysteine
  MOD_RES (1387)..(1387): Selenocysteine
  MOD_RES (1393)..(1393): Selenocysteine
  MOD_RES (1407)..(1407): Selenocysteine
MLYINRENWCXIEPCPDAASLLASKQSPECENFLDVGLGRECXSKQGVLKRESGSDSDLFHSPSDDMDSIIFPKPEEEHLACDIXGSSSSXDDXASLDRHSSHGSDVSLSQILKPNRSRDRQSLDGFYSHGMGAEGRESESEPADPGDVEEEEMDSIXEVPANCSVLRSSMRSLSPFRRHSWGPGKNAASDAEMNHRSSMRVLGDVVRRPPIHRRSFSLEGLXGGAGVGNKPSSSLEVSSANAEELRHPFSGEERVDSLVSLSEEDLESDQREHRMFDQQICHRSKQQGFNYCXSAISSPLXKSISLMXISHPGLDNSRPFHSXFHNXSANLXESIXEENYNFLPHSPSKKDSEWKSGXKVSRXFSYIKNKMSSSKKSKEKEKEKDKIKEKEKDSKDKEKDKKXVNGHXFSSIPVVGPISCSQCMKPFXNKDAYXCANCSAFVHKGCRESLASCAKVKMKQPKGSLQAHDXSSLPXVIMRNKPSQPKERPRSAVLLVDEXAXXPIFANRRSQQSVSLSKSVSIQNIXGVGNDENMSNXWKFLSHSXDSLNKISKVNESXESLXDEGVGXDMNEGQLLGDFEIESKQLEAESWSRIIDSKFLKQQKKDVVKRQEVIYELMQXEFHHVRXLKIMSGVYSQGMMADLLFEQQMVEKLFPCLDELISIHSQFFQRILERKKESLVDKSEKNFLIKRIGDVLVNQFSGENAERLKKXYGKFCGQHNQSVNYFKDLYAKDKRFQAFVKKKMSSSVVRRLGIPECILLVXQRIXKYPVLFQRILQCXKDNEVEQEDLAQSLSLVKDVIGAVDSKVASYEKKVRLNEIYXKXDSKSIMRMKSGQMFAKEDLKRKKLVRDGSVFLKNAAGRLKEVQAVLLXDILVFLQEKDQKYIFASLDQKSXVISLKKLIVREVAHEEKGLFLISMGMXDPEMVEVHASSKEERNSWIQIIQDXINXLNRDEDEGIPSENEEEKKMLDXRARELKEQLHQKDQKILLLLEEKEMIFRDMAECSXPLPEDCSPXHSPRVLFRSNXEEALKGGPLMKSAINEVEILQGLVSGNLGGXLGPXVSSPIEQDVVGPVSLPRRAEXFGGFDSHQMNASKGGEKEEGDDGQDLRRXESDSGLKKGGNANLVFMLKRNSEQVVQSVVHLYELLSALQGVVLQQDSYIEDQKLVLSERALXRSLSRPSSLIEQEKQRSLEKQRQDLANLQKQQAQYLEEKRRREREWEARERELREREALLAQREEEVQQGQQDLEKEREELQQKKGXYQYDLERLRAAQKQLEREQEQLRREAERLSQRQXERDLCQVSHPHXKLMRIPSFFPSPEEPPSPSAPSIAKSGSLDSELSVSPKRNSISRXHKDKGPFHILSSXSQXNKGPEGQSQAPASXSASXRLFGLXKPKEKKEKKKKNKXSRSQPGDGPASEVSAEGEEIFC

SEQ ID NO: 2093 - protein, 93 aa, Homo sapiens
  MOD_RES (10)..(10): Selenocysteine
  MOD_RES (24)..(24): Selenocysteine
  MOD_RES (34)..(34): Selenocysteine
  MOD_RES (46)..(46): Selenocysteine
  MOD_RES (57)..(57): Selenocysteine
  MOD_RES (60)..(60): Selenocysteine
  MOD_RES (71)..(71): Selenocysteine
  MOD_RES (86)..(86): Selenocysteine
MNIQQQLMKXNLKQMDSLMPLMMXAQDPSSAPEXDGQFLPCAPEPXDPQRLSSSEEXESXQCCPGSPVAQXESPCDLSSIVEEENXDRSCRKK

SEQ ID NO: 2094 - protein, 99 aa, Homo sapiens
  MOD_RES (29)..(29): Selenocysteine
  MOD_RES (38)..(38): Selenocysteine
  MOD_RES (48)..(48): Selenocysteine
  MOD_RES (80)..(80): Selenocysteine
MPDVKAEDEVDFRASSISEEVAVGSIAAXLKMKQGPMXQAINRENWCXIEPCPDAASLLASKQSPECENFLDVGLGRECXSKQGVLKRESGSDSDLFHS

SEQ ID NO: 2095 - protein, 166 aa, Homo sapiens
  MOD_RES (15)..(15): Selenocysteine
  MOD_RES (50)..(50): Selenocysteine
  MOD_RES (55)..(55): Selenocysteine
  MOD_RES (75)..(75): Selenocysteine
  MOD_RES (81)..(81): Selenocysteine
  MOD_RES (117)..(117): Selenocysteine
  MOD_RES (122)..(122): Selenocysteine
  MOD_RES (146)..(146): Selenocysteine
  MOD_RES (148)..(149): Selenocysteine
MSIKWARFHEVPHIXVRFIGPKHGEEKEKEKDKIKEKEKDSKDKEKDKKXVNGHXFSSIPVVGPISCSQCMKPFXNKDAYXCANCSAFVHKGCRESLASCAKVKMKQPKGSLQAHDXSSLPXVIMRNKPSQPKERPRSAVLLVDEXAXXPIFANRRSQQSVSLSKS

SEQ ID NO: 2096 - protein, 66 aa, Homo sapiens
  MOD_RES (33)..(33): Selenocysteine
  MOD_RES (38)..(38): Selenocysteine
  MOD_RES (58)..(58): Selenocysteine
  MOD_RES (64)..(64): Selenocysteine
MSSSKKSKEKEKEKDKIKEKEKDSKDKEKDKKXVNGHXFSSIPVVGPISCSQCMKPFXNKDAYXCA

SEQ ID NO: 2097 - protein, 967 aa, Homo sapiens
  MOD_RES (20)..(20): Selenocysteine
  MOD_RES (35)..(35): Selenocysteine
  MOD_RES (67)..(67): Selenocysteine
  MOD_RES (109)..(109): Selenocysteine
  MOD_RES (115)..(115): Selenocysteine
  MOD_RES (118)..(118): Selenocysteine
  MOD_RES (182)..(182): Selenocysteine
  MOD_RES (229)..(229): Selenocysteine
  MOD_RES (300)..(300): Selenocysteine
  MOD_RES (308)..(308): Selenocysteine
  MOD_RES (315)..(315): Selenocysteine
  MOD_RES (330)..(330): Selenocysteine
  MOD_RES (334)..(334): Selenocysteine
  MOD_RES (339)..(339): Selenocysteine
  MOD_RES (343)..(343): Selenocysteine
  MOD_RES (365)..(365): Selenocysteine
  MOD_RES (370)..(370): Selenocysteine
  MOD_RES (410)..(410): Selenocysteine
  MOD_RES (415)..(415): Selenocysteine
  MOD_RES (435)..(435): Selenocysteine
  MOD_RES (441)..(441): Selenocysteine
  MOD_RES (476)..(476): Selenocysteine
  MOD_RES (481)..(481): Selenocysteine
  MOD_RES (505)..(505): Selenocysteine
  MOD_RES (507)..(508): Selenocysteine
  MOD_RES (532)..(532): Selenocysteine
  MOD_RES (543)..(543): Selenocysteine
  MOD_RES (551)..(551): Selenocysteine
  MOD_RES (564)..(564): Selenocysteine
  MOD_RES (568)..(568): Selenocysteine
  MOD_RES (574)..(574): Selenocysteine
  MOD_RES (626)..(626): Selenocysteine
  MOD_RES (633)..(633): Selenocysteine
  MOD_RES (717)..(717): Selenocysteine
  MOD_RES (768)..(768): Selenocysteine
  MOD_RES (772)..(772): Selenocysteine
  MOD_RES (785)..(785): Selenocysteine
  MOD_RES (827)..(827): Selenocysteine
  MOD_RES (829)..(829): Selenocysteine
  MOD_RES (877)..(877): Selenocysteine
  MOD_RES (900)..(900): Selenocysteine
  MOD_RES (927)..(927): Selenocysteine
  MOD_RES (952)..(952): Selenocysteine
  MOD_RES (955)..(955): Selenocysteine
MYERHKRRYSLCDISKVDRXVDVVLLKINRENWCXIEPCPDAASLLASKQSPECENFLDVGLGRECXSKQGVLKRESGSDSDLFHSPSDDMDSIIFPKPEEEHLACDIXGSSSSXDDXASLDRHSSHGSDVSLSQILKPNRSRDRQSLDGFYSHGMGAEGRESESEPADPGDVEEEEMDSIXEVPANCSVLRSSMRSLSPFRRHSWGPGKNAASDAEMNHRSFSLEGLXGGAGVGNKPSSSLEVSSANAEELRHPFSGEERVDSLVSLSEEDLESDQREHRMFDQQICHRSKQQGFNYCXSAISSPLXKSISLMXISHPGLDNSRPFHSXFHNXSANLXESIXEENYNFLPHSPSKKDSEWKSGXKVSRXFSYIKNKMSSSKKSKEKEKEKDKIKEKEKDSKDKEKDKKXVNGHXFSSIPVVGPISCSQCMKPFXNKDAYXCANCSAFVHKGCRESLASCAKVKMKPKGSLQAHDXSSLPXVIMRNKPSQPKERPRSAVLLVDEXAXXPIFANRRSQQSVSLSKSVSIQNIXGVGNDENMSNXWKFLSHSXDSLNKISKVNESXESLXDEGVGXDMNEGQLLGDFEIESKQLEAESWSRIIDSKFLKQQKKDVVKRQEVIYELMQXEFHHVRXLKIMSGVYSQGMMADLLFEQQMVEKLFPCLDELISIHSQFFQRILERKKESLVDKSEKNFLIKRIGDVLVNQFSGENAERLKKXYGKFCGQHNQSVNYFKDLYAKDKRFQAFVKKKMSSSVVRRLGIPECILLVXQRIXKYPVLFQRILQCXKDNEVEQEDLAQSLSLVKDVIGAVDSKVASYEKKVRLNEIYXKXDSKSIMRMKSGQMFAKEDLKRKKLVRDGSVFLKNAAGRLKEVQAVLLXDILVFLQEKDQKYIFASLDQKSXVISLKKLIVREVAHEEKGLFLISMGMXDPEMVEVHASSKEERNSWIQIIQDXINXLNRDEDEGIPSE

SEQ ID NO: 2098 - protein, 1434 aa, Homo sapiens
  MOD_RES (20)..(20): Selenocysteine
  MOD_RES (35)..(35): Selenocysteine
  MOD_RES (67)..(67): Selenocysteine
  MOD_RES (109)..(109): Selenocysteine
  MOD_RES (115)..(115): Selenocysteine
  MOD_RES (118)..(118): Selenocysteine
  MOD_RES (182)..(182): Selenocysteine
  MOD_RES (229)..(229): Selenocysteine
  MOD_RES (300)..(300): Selenocysteine
  MOD_RES (308)..(308): Selenocysteine
  MOD_RES (315)..(315): Selenocysteine
  MOD_RES (330)..(330): Selenocysteine
  MOD_RES (334)..(334): Selenocysteine
  MOD_RES (339)..(339): Selenocysteine
  MOD_RES (343)..(343): Selenocysteine
  MOD_RES (365)..(365): Selenocysteine
  MOD_RES (370)..(370): Selenocysteine
  MOD_RES (410)..(410): Selenocysteine
  MOD_RES (415)..(415): Selenocysteine
  MOD_RES (435)..(435): Selenocysteine
  MOD_RES (441)..(441): Selenocysteine
  MOD_RES (476)..(476): Selenocysteine
  MOD_RES (481)..(481): Selenocysteine
  MOD_RES (505)..(505): Selenocysteine
  MOD_RES (507)..(508): Selenocysteine
  MOD_RES (532)..(532): Selenocysteine
  MOD_RES (543)..(543): Selenocysteine
  MOD_RES (551)..(551): Selenocysteine
  MOD_RES (564)..(564): Selenocysteine
  MOD_RES (568)..(568): Selenocysteine
  MOD_RES (574)..(574): Selenocysteine
  MOD_RES (626)..(626): Selenocysteine
  MOD_RES (633)..(633): Selenocysteine
  MOD_RES (717)..(717): Selenocysteine
  MOD_RES (768)..(768): Selenocysteine
  MOD_RES (772)..(772): Selenocysteine
  MOD_RES (785)..(785): Selenocysteine
  MOD_RES (827)..(827): Selenocysteine
  MOD_RES (829)..(829): Selenocysteine
  MOD_RES (877)..(877): Selenocysteine
  MOD_RES (900)..(900): Selenocysteine
  MOD_RES (927)..(927): Selenocysteine
  MOD_RES (952)..(952): Selenocysteine
  MOD_RES (955)..(955): Selenocysteine
  MOD_RES (977)..(977): Selenocysteine
  MOD_RES (1012)..(1012): Selenocysteine
  MOD_RES (1021)..(1021): Selenocysteine
  MOD_RES (1032)..(1032): Selenocysteine
  MOD_RES (1063)..(1063): Selenocysteine
  MOD_RES (1067)..(1067): Selenocysteine
  MOD_RES (1088)..(1088): Selenocysteine
  MOD_RES (1117)..(1117): Selenocysteine
  MOD_RES (1180)..(1180): Selenocysteine
  MOD_RES (1267)..(1267): Selenocysteine
  MOD_RES (1301)..(1301): Selenocysteine
  MOD_RES (1313)..(1313): Selenocysteine
  MOD_RES (1358)..(1358): Selenocysteine
  MOD_RES (1371)..(1371): Selenocysteine
  MOD_RES (1374)..(1374): Selenocysteine
  MOD_RES (1388)..(1388): Selenocysteine
  MOD_RES (1392)..(1392): Selenocysteine
  MOD_RES (1398)..(1398): Selenocysteine
  MOD_RES (1412)..(1412): Selenocysteine
MYERHKRRYSLCDISKVDRXVDVVLLKINRENWCXIEPCPDAASLLASKQSPECENFLDVGLGRECXSKQGVLKRESGSDSDLFHSPSDDMDSIIFPKPEEEHLACDIXGSSSSXDDXASLDRHSSHGSDVSLSQILKPNRSRDRQSLDGFYSHGMGAEGRESESEPADPGDVEEEEMDSIXEVPANCSVLRSSMRSLSPFRRHSWGPGKNAASDAEMNHRSFSLEGLXGGAGVGNKPSSSLEVSSANAEELRHPFSGEERVDSLVSLSEEDLESDQREHRMFDQQICHRSKQQGFNYCXSAISSPLXKSISLMXISHPGLDNSRPFHSXFHNXSANLXESIXEENYNFLPHSPSKKDSEWKSGXKVSRXFSYIKNKMSSSKKSKEKEKEKDKIKEKEKDSKDKEKDKKXVNGHXFSSIPVVGPISCSQCMKPFXNKDAYXCANCSAFVHKGCRESLASCAKVKMKPKGSLQAHDXSSLPXVIMRNKPSQPKERPRSAVLLVDEXAXXPIFANRRSQQSVSLSKSVSIQNIXGVGNDENMSNXWKFLSHSXDSLNKISKVNESXESLXDEGVGXDMNEGQLLGDFEIESKQLEAESWSRIIDSKFLKQQKKDVVKRQEVIYELMQXEFHHVRXLKIMSGVYSQGMMADLLFEQQMVEKLFPCLDELISIHSQFFQRILERKKESLVDKSEKNFLIKRIGDVLVNQFSGENAERLKKXYGKFCGQHNQSVNYFKDLYAKDKRFQAFVKKKMSSSVVRRLGIPECILLVXQRIXKYPVLFQRILQCXKDNEVEQEDLAQSLSLVKDVIGAVDSKVASYEKKVRLNEIYXKXDSKSIMRMKSGQMFAKEDLKRKKLVRDGSVFLKNAAGRLKEVQAVLLXDILVFLQEKDQKYIFASLDQKSXVISLKKLIVREVAHEEKGLFLISMGMXDPEMVEVHASSKEERNSWIQIIQDXINXLNRDEDEGIPSENEEEKKMLDXRARELKEQLHQKDQKILLLLEEKEMIFRDMAECSXPLPEDCSPXHSPRVLFRSNXEEALKGGPLMKSAINEVEILQGLVSGNLGGXLGPXVSSPIEQDVVGPVSLPRRAEXFGGFDSHQMNASKGGEKEEGDDGQDLRRXESDSGLKKGGNANLVFMLKRNSEQVVQSVVHLYELLSALQGVVLQQDSYIEDQKLVLSERALXRSLSRPSSLIEQEKQRSLEKQRQDLANLQKQQAQYLEEKRRREREWEARERELREREALLAQREEEVQQGQQDLEKEREELQQKKGXYQYDLERLRAAQKQLEREQEQLRREAERLSQRQXERDLCQVSHPHXKLMRIPSFFPSPEEPPSPSAPSIAKSGSLDSELSVSPKRNSISRXHKDKGPFHILSSXSQXNKGPEGQSQAPASXSASXRLFGLXKPKEKKEKKKKNKXSRSQPGDGPASEVSAEGEEIFC

SEQ ID NO: 2099 - protein, 275 aa, Homo sapiens
  MOD_RES (23)..(23): Selenocysteine
  MOD_RES (29)..(29): Selenocysteine
  MOD_RES (32)..(32): Selenocysteine
  MOD_RES (96)..(96): Selenocysteine
  MOD_RES (183)..(183): Selenocysteine
  MOD_RES (254)..(254): Selenocysteine
  MOD_RES (262)..(262): Selenocysteine
  MOD_RES (269)..(269): Selenocysteine
PSDDMDSIIFPKPEEEHLACDIXGSSSSXDDXASLDRHSSHGSDVSLSQILKPNRSRDRQSLDGFYSHGMGAEGRESESEPADPGDVEEEEMDSIXEVPANCSVLRSSMRSLSPFRRHSWGPGKNAASDAEMNHRSSMRVLGDVVRRPPIHRRSMSWCPSGVQYSAGLSADFNYRSFSLEGLXGGAGVGNKPSSSLEVSSANAEELRHPFSGEERVDSLVSLSEEDLESDQREHRMFDQQICHRSKQQGFNYCXSAISSPLXKSISLMXISHPGL

SEQ ID NO: 2100 - protein, 385 aa, Homo sapiens
  MOD_RES (5)..(5): Selenocysteine
  MOD_RES (10)..(10): Selenocysteine
  MOD_RES (28)..(28): Selenocysteine
  MOD_RES (31)..(31): Selenocysteine
  MOD_RES (66)..(66): Selenocysteine
  MOD_RES (73)..(73): Selenocysteine
  MOD_RES (100)..(100): Selenocysteine
  MOD_RES (123)..(123): Selenocysteine
  MOD_RES (140)..(140): Selenocysteine
  MOD_RES (148)..(148): Selenocysteine
  MOD_RES (200)..(200): Selenocysteine
  MOD_RES (206)..(206): Selenocysteine
  MOD_RES (260)..(260): Selenocysteine
MAAAXIVHDXSEAVELCPAYGLYLKPIXKMXISVALPQLKQPGKSISNWEVMERLKGMVQNHQFSXLRISKSXMDFIRFEGEVENKSLVKSFLACLDGKXIKLSGFSDILKVRAAEFKIDFPXRHDWDSFFRDAKDMNEXLPGERPDXIHLEGLPCKWFALKESGSEKPSEDVLVKVFEKFGEIRNVDIPMLDPYREEMXGRNFHXFSFGGHLNFEAYVQYREYMGFIQAMSALRGMKLMYKGEDGKAVACNIKVSFDSXKHLSDASIKKRQLERQKLQELEQQREEQKRREKEAEERQRAEERKQKELEELERERKREEKLRKREQKQRDRELRRNQKKLEKLQAEEQKQLQEKIKLEERKLLLAQRNLQSIRLIAELLSRAKL

SEQ ID NO: 2101 - protein, 446 aa, Homo sapiens
  MOD_RES (5)..(5): Selenocysteine
  MOD_RES (10)..(10): Selenocysteine
  MOD_RES (28)..(28): Selenocysteine
  MOD_RES (31)..(31): Selenocysteine
  MOD_RES (66)..(66): Selenocysteine
  MOD_RES (73)..(73): Selenocysteine
  MOD_RES (100)..(100): Selenocysteine
  MOD_RES (123)..(123): Selenocysteine
  MOD_RES (140)..(140): Selenocysteine
  MOD_RES (148)..(148): Selenocysteine
  MOD_RES (200)..(200): Selenocysteine
  MOD_RES (206)..(206): Selenocysteine
  MOD_RES (260)..(260): Selenocysteine
  MOD_RES (423)..(423): Selenocysteine
  MOD_RES (432)..(432): Selenocysteine
MAAAXIVHDXSEAVELCPAYGLYLKPIXKMXISVALPQLKQPGKSISNWEVMERLKGMVQNHQFSXLRISKSXMDFIRFEGEVENKSLVKSFLACLDGKXIKLSGFSDILKVRAAEFKIDFPXRHDWDSFFRDAKDMNEXLPGERPDXIHLEGLPCKWFALKESGSEKPSEDVLVKVFEKFGEIRNVDIPMLDPYREEMXGRNFHXFSFGGHLNFEAYVQYREYMGFIQAMSALRGMKLMYKGEDGKAVACNIKVSFDSXKHLSDASIKKRQLERQKLQELEQQREEQKRREKEAEERQRAEERKQKELEELERERKREEKLRKREQKQRDRELRRNQKKLEKLQAEEQKQLQEKIKLEERKLLLAQRNLQSIRLIAELLSRAKVPGGSLCSRQPRPGCPQCPPLKCGRRHGAVSPPAAAVAXKPALMPRMXAPSREGVALVCRSR

SEQ ID NO: 2102 - protein, 695 aa, Homo sapiens
  MOD_RES (5)..(5): Selenocysteine
  MOD_RES (10)..(10): Selenocysteine
  MOD_RES (28)..(28): Selenocysteine
  MOD_RES (31)..(31): Selenocysteine
  MOD_RES (66)..(66): Selenocysteine
  MOD_RES (73)..(73): Selenocysteine
  MOD_RES (100)..(100): Selenocysteine
  MOD_RES (123)..(123): Selenocysteine
  MOD_RES (140)..(140): Selenocysteine
  MOD_RES (148)..(148): Selenocysteine
  MOD_RES (200)..(200): Selenocysteine
  MOD_RES (206)..(206): Selenocysteine
  MOD_RES (260)..(260): Selenocysteine
  MOD_RES (452)..(452): Selenocysteine
  MOD_RES (473)..(473): Selenocysteine
  MOD_RES (482)..(483): Selenocysteine
  MOD_RES (572)..(572): Selenocysteine
  MOD_RES (591)..(591): Selenocysteine
  MOD_RES (639)..(639): Selenocysteine
  MOD_RES (644)..(644): Selenocysteine
  MOD_RES (692)..(692): Selenocysteine
MAAAXIVHDXSEAVELCPAYGLYLKPIXKMXISVALPQLKQPGKSISNWEVMERLKGMVQNHQFSXLRISKSXMDFIRFEGEVENKSLVKSFLACLDGKXIKLSGFSDILKVRAAEFKIDFPXRHDWDSFFRDAKDMNEXLPGERPDXIHLEGLPCKWFALKESGSEKPSEDVLVKVFEKFGEIRNVDIPMLDPYREEMXGRNFHXFSFGGHLNFEAYVQYREYMGFIQAMSALRGMKLMYKGEDGKAVACNIKVSFDSXKHLSDASIKKRQLERQKLQELEQQREEQKRREKEAEERQRAEERKQKELEELERERKREEKLRKREQKQRDRELRRNQKKLEKLQAEEQKQLQEKIKLEERKLLLAQRNLQSIRLIAELLSRAKAVKLREQEQKEEKLRLQQQEERRRLQEAELRRVEEEKERALGLQRKERELRERLLSILLSKKPDDSHXHDELGVAHADLLQPVLDILQXVSSGCVSAXXLHPLGGQPPAGAPKESPAHPEADGAPKSVNGSVAEEAPCKEVQSSCRVVPEDGSPEKRCPGGVLSCIPDNNQQPKGIPACEQNVSRKDXRSEQDKCNREPSKGRGRAXGDGLADRHKRERSRARRASSREDGRPRKERRPHKKHAYKDDSPRRRSXSPDHXRSRRSHSKDRHRRERSRERRGSASRKHSRHRRRSERSRSRSPSRHRSXWNR

SEQ ID NO: 2103 - protein, 96 aa, Homo sapiens
  MOD_RES (34)..(34): Selenocysteine
  MOD_RES (36)..(36): Selenocysteine
  MOD_RES (53)..(53): Selenocysteine
  MOD_RES (71)..(71): Selenocysteine
  MOD_RES (88)..(90): Selenocysteine
  MOD_RES (93)..(93): Selenocysteine
MSEKVDWLQSQNGVCKVDVYSPGDNQAQDWKMDXSXDPVRVLSWLRRDLEKSXAEFQDVRFKPGESFGGEXSNSGDPHKGFSVDYYNXXXKGXPER

SEQ ID NO: 2104 - protein, 162 aa, Homo sapiens
  MOD_RES (34)..(34): Selenocysteine
  MOD_RES (36)..(36): Selenocysteine
  MOD_RES (53)..(53): Selenocysteine
  MOD_RES (71)..(71): Selenocysteine
  MOD_RES (88)..(90): Selenocysteine
  MOD_RES (93)..(93): Selenocysteine
  MOD_RES (102)..(102): Selenocysteine
  MOD_RES (132)..(132): Selenocysteine
MSEKVDWLQSQNGVCKVDVYSPGDNQAQDWKMDXSXDPVRVLSWLRRDLEKSXAEFQDVRFKPGESFGGEXSNSGDPHKGFSVDYYNXXXKGXPERLHFEMXHKEIPCQGPRAQLGNGSSVDEVSFYANRLXNLVIAMARKEINEKIDGSENKCVYQSLYMG

SEQ ID NO: 2105 - protein, 853 aa, Homo sapiens
  MOD_RES (34)..(34): Selenocysteine
  MOD_RES (36)..(36): Selenocysteine
  MOD_RES (53)..(53): Selenocysteine
  MOD_RES (71)..(71): Selenocysteine
  MOD_RES (88)..(90): Selenocysteine
  MOD_RES (93)..(93): Selenocysteine
  MOD_RES (102)..(102): Selenocysteine
  MOD_RES (132)..(132): Selenocysteine
  MOD_RES (166)..(166): Selenocysteine
  MOD_RES (168)..(168): Selenocysteine
  MOD_RES (182)..(182): Selenocysteine
  MOD_RES (217)..(217): Selenocysteine
  MOD_RES (224)..(224): Selenocysteine
  MOD_RES (278)..(278): Selenocysteine
  MOD_RES (287)..(287): Selenocysteine
  MOD_RES (303)..(303): Selenocysteine
  MOD_RES (311)..(312): Selenocysteine
  MOD_RES (315)..(315): Selenocysteine
  MOD_RES (345)..(345): Selenocysteine
  MOD_RES (347)..(347): Selenocysteine
  MOD_RES (350)..(350): Selenocysteine
  MOD_RES (352)..(352): Selenocysteine
  MOD_RES (361)..(361): Selenocysteine
  MOD_RES (371)..(371): Selenocysteine
  MOD_RES (428)..(428): Selenocysteine
  MOD_RES (444)..(444): Selenocysteine
  MOD_RES (448)..(448): Selenocysteine
  MOD_RES (459)..(459): Selenocysteine
  MOD_RES (464)..(464): Selenocysteine
  MOD_RES (484)..(484): Selenocysteine
  MOD_RES (556)..(557): Selenocysteine
  MOD_RES (605)..(605): Selenocysteine
  MOD_RES (646)..(646): Selenocysteine
  MOD_RES (654)..(654): Selenocysteine
  MOD_RES (707)..(707): Selenocysteine
  MOD_RES (723)..(723): Selenocysteine
  MOD_RES (744)..(744): Selenocysteine
  MOD_RES (756)..(756): Selenocysteine
  MOD_RES (765)..(765): Selenocysteine
  MOD_RES (767)..(767): Selenocysteine
  MOD_RES (841)..(841): Selenocysteine
MSEKVDWLQSQNGVCKVDVYSPGDNQAQDWKMDXSXDPVRVLSWLRRDLEKSXAEFQDVRFKPGESFGGEXSNSGDPHKGFSVDYYNXXXKGXPERLHFEMXHKEIPCQGPRAQLGNGSSVDEVSFYANRLXNLVIAMARKEINEKIDGSENKCVYQSLYMGNEPXPXKSLSKIASELVNEXVSACSRNAAPDKAPGSGDRVSGSSQSPPNLKYKSXLKIKESXKERQGPDDKPPSKKSFFYKEVFESRNGDYAREGGRFFPRERKRFRGQERPDDFXASVSEGIMXYANSVVSDMMVSIMKXLKIQVKDXXIAXILLKKVLLKHAKEVVSDLIDSFLRNLHSVXGXLMXDXQFVSAVKRXVFSHGSQKAXDIMDAMLRKLYNVMFAKKVPEHVRKAQDKAESYSLISMKGMGDPKNRNVNFAMKSEXKLREKMYSEPKSEEEXCAKXLGEHIIKEGLXLWHKXQQKECKSLGFQHAAFEAPNXQRKPASDISFEYPEDIGNLSLPPYPPEKPENFMYDSDSWAEDLIVSALLLIQYHLAQGGRRDARSFVEAAGXXNFPANEPPVAPDESCLKSAPIVGDQEQAEKKDLRSVFFNFIRNLLSEXIFKRDQSPEPKVPEQPVKEDRKLCERPLASSPPRLYEDDEXPGALSGLXKMAVSQIDGHMSGQMVEHLMNSVMKLCVIIAKSCDASLAELGDDKSGDASRLXSAFPDSLYECLPAKGXGSAEAVLQNAYQAIHNEMRGXSGQPPEGCAAPXVIVSNHNLXDXVQNKQLQAVLQWVAASELNVPILYFAGDDEGIQEKLLQLSAAAVDKGCSVGEVLQSVLRYEKERQLNEAVGNVXPLQLLDWLMVNL

SEQ ID NO: 2106 - protein, 854 aa, Homo sapiens
  MOD_RES (7)..(8): Selenocysteine
  MOD_RES (49)..(49): Selenocysteine
  MOD_RES (85)..(85): Selenocysteine
  MOD_RES (93)..(93): Selenocysteine
  MOD_RES (133)..(133): Selenocysteine
  MOD_RES (135)..(135): Selenocysteine
  MOD_RES (143)..(143): Selenocysteine
  MOD_RES (180)..(180): Selenocysteine
  MOD_RES (185)..(185): Selenocysteine
  MOD_RES (201)..(201): Selenocysteine
  MOD_RES (265)..(265): Selenocysteine
  MOD_RES (282)..(282): Selenocysteine
  MOD_RES (289)..(289): Selenocysteine
  MOD_RES (351)..(351): Selenocysteine
  MOD_RES (375)..(375): Selenocysteine
  MOD_RES (394)..(394): Selenocysteine
  MOD_RES (399)..(399): Selenocysteine
  MOD_RES (420)..(420): Selenocysteine
  MOD_RES (441)..(441): Selenocysteine
  MOD_RES (469)..(469): Selenocysteine
  MOD_RES (491)..(491): Selenocysteine
  MOD_RES (506)..(506): Selenocysteine
  MOD_RES (520)..(520): Selenocysteine
  MOD_RES (537)..(537): Selenocysteine
  MOD_RES (557)..(557): Selenocysteine
  MOD_RES (560)..(560): Selenocysteine
  MOD_RES (565)..(565): Selenocysteine
  MOD_RES (574)..(574): Selenocysteine
  MOD_RES (582)..(582): Selenocysteine
  MOD_RES (611)..(611): Selenocysteine
  MOD_RES (686)..(686): Selenocysteine
  MOD_RES (739)..(739): Selenocysteine
  MOD_RES (767)..(767): Selenocysteine
MMAYSDXXMMSDDIDWLRSHRGVCKVDLYNPEGQQDQDRKVICFVDVSXLNVEDKDYKDAASSSSEGNLNLGSLEEKEIIVIKDXEKKDQSKXEGSVCLFKQAPSDPVSVLNWLLSDLQKYALGFQHALSPSXSXCKHKVGDXEGEYHRASSENCYSVYADQVNIDYLMNRPQNLRLEMXAAKNXNNNQSPSAPPAKPPSXQRAVISPDGECSIDDLSFYVNRLSSLVIQMAHKEIKEKLEGKSKCLHHSICPSPGNKERISPRXPASKIASEMAYEAVELXAAEMRGXGEESREGGQKSFLYSELSNKSKSGDKQMSQRESKEFADSISKGLMVYANQVASDMMVSLMKXLKVHSSGKPIPASVVLKRVLLRHXKEIVSDLIDSCMKNLHNIXGVLMXDSDFVSAVKRNLFNQWKQNAXDIMEAMLKRLVSALIGEEKEXKSQSLSYASLKAGSHDPKCRNQSLEFSXMKAEMKERDKGKMKSDPCKSLXSAEKVGEHILKEGLXIWNQKQGNSCKVAXKACSNKDEKGEKINASXDSLAKDLIVSALKLIQYHLXQQXKGKDXCEEDCPGSXMGYMAQSXQYEKCGGGQSAKALSVKQLESHRAPGPSXCQKENQHLDSQKMDMSNIVLMLIQKLLNENPFKCEDPCEGENKCSEPRASKAASMSNRSDKAEEQCQEHQELDCXSGMKQANGQFIDKLVESVMKLCLIMAKYSNDGAALAELEEQAASANKPNFRGXRCIHSGAMPQNYQDSLGHEVIVNNQCSXNSLQKQLQAVLQWIAASQFNVPMLYFMGDKDGQLEKLPQVSAKAAEKGYSVGGLLQEVMKFAKERQPDEAVGKVARKQLLDWLLANL

SEQ ID NO: 2107 - protein, 213 aa, Homo sapiens
  MOD_RES (40)..(40): Selenocysteine
  MOD_RES (76)..(76): Selenocysteine
  MOD_RES (84)..(84): Selenocysteine
  MOD_RES (124)..(124): Selenocysteine
  MOD_RES (126)..(126): Selenocysteine
  MOD_RES (134)..(134): Selenocysteine
  MOD_RES (171)..(171): Selenocysteine
  MOD_RES (176)..(176): Selenocysteine
  MOD_RES (182)..(182): Selenocysteine
  MOD_RES (191)..(191): Selenocysteine
  MOD_RES (199)..(199): Selenocysteine
MSDDIDWLRSHRGVCKVDLYNPEGQQDQDRKVICFVDVSXLNVEDKDYKDAASSSSEGNLNLGSLEEKEIIVIKDXEKKDQSKXEGSVCLFKQAPSDPVSVLNWLLSDLQKYALGFQHALSPSXSXCKHKVGDXEGEYHRASSENCYSVYADQVNIDYLMNRPQNLRLEMXAAKNXNNNQNXCEEDCPGSXMGYMAQSXQYEKCGGGQSAKAL

SEQ ID NO: 2108 - protein, 254 aa, Homo sapiens
  MOD_RES (40)..(40): Selenocysteine
  MOD_RES (76)..(76): Selenocysteine
  MOD_RES (84)..(84): Selenocysteine
  MOD_RES (124)..(124): Selenocysteine
  MOD_RES (126)..(126): Selenocysteine
  MOD_RES (134)..(134): Selenocysteine
  MOD_RES (171)..(171): Selenocysteine
  MOD_RES (176)..(176): Selenocysteine
  MOD_RES (192)..(192): Selenocysteine
MSDDIDWLRSHRGVCKVDLYNPEGQQDQDRKVICFVDVSXLNVEDKDYKDAASSSSEGNLNLGSLEEKEIIVIKDXEKKDQSKXEGSVCLFKQAPSDPVSVLNWLLSDLQKYALGFQHALSPSXSXCKHKVGDXEGEYHRASSENCYSVYADQVNIDYLMNRPQNLRLEMXAAKNXNNNQSPSAPPAKPPSXQRAVISPDGECSIDDLSFYVNRLSSLVIQMAHKEIKEKLEGKSKCLHHSICPSPGNKERISP

SEQ ID NO: 2109 - protein, 845 aa, Homo sapiens
  MOD_RES (40)..(40): Selenocysteine
  MOD_RES (76)..(76): Selenocysteine
  MOD_RES (84)..(84): Selenocysteine
  MOD_RES (124)..(124): Selenocysteine
  MOD_RES (126)..(126): Selenocysteine
  MOD_RES (134)..(134): Selenocysteine
  MOD_RES (171)..(171): Selenocysteine
  MOD_RES (176)..(176): Selenocysteine
  MOD_RES (192)..(192): Selenocysteine
  MOD_RES (256)..(256): Selenocysteine
  MOD_RES (273)..(273): Selenocysteine
  MOD_RES (280)..(280): Selenocysteine
  MOD_RES (342)..(342): Selenocysteine
  MOD_RES (366)..(366): Selenocysteine
  MOD_RES (385)..(385): Selenocysteine
  MOD_RES (390)..(390): Selenocysteine
  MOD_RES (411)..(411): Selenocysteine
  MOD_RES (432)..(432): Selenocysteine
  MOD_RES (460)..(460): Selenocysteine
  MOD_RES (482)..(482): Selenocysteine
  MOD_RES (497)..(497): Selenocysteine
  MOD_RES (511)..(511): Selenocysteine
  MOD_RES (528)..(528): Selenocysteine
  MOD_RES (548)..(548): Selenocysteine
  MOD_RES (551)..(551): Selenocysteine
  MOD_RES (556)..(556): Selenocysteine
  MOD_RES (565)..(565): Selenocysteine
  MOD_RES (573)..(573): Selenocysteine
  MOD_RES (602)..(602): Selenocysteine
  MOD_RES (677)..(677): Selenocysteine
  MOD_RES (730)..(730): Selenocysteine
  MOD_RES (758)..(758): Selenocysteine
MSDDIDWLRSHRGVCKVDLYNPEGQQDQDRKVICFVDVSXLNVEDKDYKDAASSSSEGNLNLGSLEEKEIIVIKDXEKKDQSKXEGSVCLFKQAPSDPVSVLNWLLSDLQKYALGFQHALSPSXSXCKHKVGDXEGEYHRASSENCYSVYADQVNIDYLMNRPQNLRLEMXAAKNXNNNQSPSAPPAKPPSXQRAVISPDGECSIDDLSFYVNRLSSLVIQMAHKEIKEKLEGKSKCLHHSICPSPGNKERISPRXPASKIASEMAYEAVELXAAEMRGXGEESREGGQKSFLYSELSNKSKSGDKQMSQRESKEFADSISKGLMVYANQVASDMMVSLMKXLKVHSSGKPIPASVVLKRVLLRHXKEIVSDLIDSCMKNLHNIXGVLMXDSDFVSAVKRNLFNQWKQNAXDIMEAMLKRLVSALIGEEKEXKSQSLSYASLKAGSHDPKCRNQSLEFSXMKAEMKERDKGKMKSDPCKSLXSAEKVGEHILKEGLXIWNQKQGNSCKVAXKACSNKDEKGEKINASXDSLAKDLIVSALKLIQYHLXQQXKGKDXCEEDCPGSXMGYMAQSXQYEKCGGGQSAKALSVKQLESHRAPGPSXCQKENQHLDSQKMDMSNIVLMLIQKLLNENPFKCEDPCEGENKCSEPRASKAASMSNRSDKAEEQCQEHQELDCXSGMKQANGQFIDKLVESVMKLCLIMAKYSNDGAALAELEEQAASANKPNFRGXRCIHSGAMPQNYQDSLGHEVIVNNQCSXNSLQKQLQAVLQWIAASQFNVPMLYFMGDKDGQLEKLPQVSAKAAEKGYSVGGLLQEVMKFAKERQPDEAVGKVARKQLLDWLLANL

SEQ ID NO: 2110 - protein, 427 aa, Homo sapiens
  MOD_RES (3)..(4): Selenocysteine
  MOD_RES (75)..(75): Selenocysteine
  MOD_RES (87)..(87): Selenocysteine
  MOD_RES (165)..(165): Selenocysteine
  MOD_RES (167)..(167): Selenocysteine
  MOD_RES (174)..(174): Selenocysteine
  MOD_RES (179)..(179): Selenocysteine
  MOD_RES (203)..(204): Selenocysteine
  MOD_RES (225)..(225): Selenocysteine
  MOD_RES (227)..(227): Selenocysteine
  MOD_RES (235)..(235): Selenocysteine
  MOD_RES (252)..(252): Selenocysteine
  MOD_RES (255)..(255): Selenocysteine
  MOD_RES (284)..(284): Selenocysteine
  MOD_RES (297)..(297): Selenocysteine
  MOD_RES (304)..(304): Selenocysteine
  MOD_RES (309)..(309): Selenocysteine
  MOD_RES (323)..(323): Selenocysteine
  MOD_RES (343)..(343): Selenocysteine
  MOD_RES (345)..(345): Selenocysteine
  MOD_RES (353)..(353): Selenocysteine
  MOD_RES (384)..(384): Selenocysteine
  MOD_RES (390)..(390): Selenocysteine
  MOD_RES (395)..(395): Selenocysteine
MEXXISEIHVENKDEKRSAEGSPGAERQKEKASMLCFKRRKKAAKALKPKAGSEAADVARKCPQEAGASDQPEPXRGAWASLKRLVXRRKRSESSKQQKPLEGEMQPAINAEDADLSKKKAKSRLKIPCIKFPRGPKRSNHSKIIEDSDCSIKVQEEAEILDIQXQXPLNDQAXKAKSXQDLSEGISRKDGDEVCESNVSNSXXSGEKVISVELGLDNGHSAIQXGXLILEEIEXIKEKQDVQPQQASPLEXSEXDHQQPVLSDVPPLPAIPDQQIVEEASNSXLESAPNGKDYESXEIVAEEXKPKDXELSQESDFKENGIXEEKSKSEESKRMEPIAIIIXDXEISEFDVXKSKNVPKQFLISAENEQVGVFANDNGFEDRXSEQYEXLLIEXASSLVKNAIQLSIEQLVNEMASDDNKINNLLQ

SEQ ID NO: 2111 - protein, 108 aa, Homo sapiens
  MOD_RES (3)..(3): Selenocysteine
  MOD_RES (7)..(7): Selenocysteine
  MOD_RES (21)..(21): Selenocysteine
  MOD_RES (31)..(31): Selenocysteine
  MOD_RES (33)..(33): Selenocysteine
  MOD_RES (60)..(60): Selenocysteine
  MOD_RES (75)..(75): Selenocysteine
  MOD_RES (80)..(80): Selenocysteine
  MOD_RES (88)..(88): Selenocysteine
MLXMSVXLSPLRSQDLDPMAXDASPMAINMXPXVEQGEGEEAMKDMDSDQQYEKPPPLHXGADWKIVLHLPEIEXWLRMXSERVRDLXYSVQQDSDSKHVDVHLVQLK

SEQ ID NO: 2112 - protein, 1075 aa, Homo sapiens
  MOD_RES (3)..(3): Selenocysteine
  MOD_RES (7)..(7): Selenocysteine
  MOD_RES (21)..(21): Selenocysteine
  MOD_RES (31)..(31): Selenocysteine
  MOD_RES (33)..(33): Selenocysteine
  MOD_RES (60)..(60): Selenocysteine
  MOD_RES (75)..(75): Selenocysteine
  MOD_RES (80)..(80): Selenocysteine
  MOD_RES (88)..(88): Selenocysteine
  MOD_RES (127)..(127): Selenocysteine
  MOD_RES (177)..(177): Selenocysteine
  MOD_RES (180)..(180): Selenocysteine
  MOD_RES (190)..(190): Selenocysteine
  MOD_RES (199)..(199): Selenocysteine
  MOD_RES (208)..(208): Selenocysteine
  MOD_RES (223)..(223): Selenocysteine
  MOD_RES (244)..(244): Selenocysteine
  MOD_RES (250)..(250): Selenocysteine
  MOD_RES (276)..(276): Selenocysteine
  MOD_RES (284)..(284): Selenocysteine
  MOD_RES (291)..(291): Selenocysteine
  MOD_RES (322)..(322): Selenocysteine
  MOD_RES (334)..(334): Selenocysteine
  MOD_RES (343)..(343): Selenocysteine
  MOD_RES (368)..(368): Selenocysteine
  MOD_RES (372)..(372): Selenocysteine
  MOD_RES (385)..(385): Selenocysteine
  MOD_RES (388)..(388): Selenocysteine
  MOD_RES (400)..(400): Selenocysteine
  MOD_RES (425)..(425): Selenocysteine
  MOD_RES (470)..(470): Selenocysteine
  MOD_RES (501)..(501): Selenocysteine
  MOD_RES (510)..(510): Selenocysteine
  MOD_RES (515)..(515): Selenocysteine
  MOD_RES (524)..(524): Selenocysteine
  MOD_RES (537)..(537): Selenocysteine
  MOD_RES (546)..(546): Selenocysteine
  MOD_RES (551)..(551): Selenocysteine
  MOD_RES (572)..(572): Selenocysteine
  MOD_RES (579)..(579): Selenocysteine
  MOD_RES (615)..(615): Selenocysteine
  MOD_RES (640)..(640): Selenocysteine
  MOD_RES (651)..(651): Selenocysteine
  MOD_RES (662)..(662): Selenocysteine
  MOD_RES (683)..(683): Selenocysteine
  MOD_RES (691)..(691): Selenocysteine
  MOD_RES (756)..(756): Selenocysteine
  MOD_RES (801)..(802): Selenocysteine
  MOD_RES (806)..(806): Selenocysteine
  MOD_RES (821)..(821): Selenocysteine
  MOD_RES (888)..(888): Selenocysteine
  MOD_RES (896)..(896): Selenocysteine
  MOD_RES (906)..(906): Selenocysteine
  MOD_RES (938)..(938): Selenocysteine
  MOD_RES (1014)..(1014): Selenocysteine
MLXMSVXLSPLRSQDLDPMAXDASPMAINMXPXVEQGEGEEAMKDMDSDQQYEKPPPLHXGADWKIVLHLPEIEXWLRMXSERVRDLXYSVQQDSDSKHVDVHLVQLKDICEDISDHVEQIHALLEXEFSLKLLSYSVNVIVDIHAVQLLWHQLRVSVLVLRERILQGLQDANGNYXRQXDILQAFSEEXKEGRLDSLXEVDDSGQLXIKCSQNYLSLDCGIXAFELSDYSPSEDLLSGLGDMXSSQVKXKPFDSWSYSEMEKEFPELIRSVGLLXVAADSISXNGSEAVXEEVSQVSLSVDDKGGCEEDNASAVEEQPGLXLGVSSSSGEALXNAAQPSSEXVQQESSSSSHHDAKNQQPVPCENAXPKRXIRDCFNYNEDSPXQPXLPKRGLFLKEEXFKNDLKGNGGKRQMVDLKPEMSRSXPSLVDPPDRSKLCLVLQSSYPNSPSAASQSYECLHKVGNGNLENXVKFHIKEISSSLGRLNDCYKEKSRLKKPHKXSEEVPPCRXPKRGXGSGKQAKNXKSSAVPNGELSYXSKAIEGPQXNSASXSSLEPCNQRSWNAKLQLQSEXSSSPAFXQSSESSVGSDNIMSPVPLLSKHKSKKGQASSPSHVXRNGEVVEAWYGSDEYLALPSHLKQXEVLALKLENLXKLLPQKPRGEXIQNIDDWELSEMNSDSEIYPXYHVKKKHXRLGRVSPSSSSDIASSLGESIESGPLSDILSDEESSMPLAGMKKYADEKSERASSSEKNESHSAXKSALIQKLMQDIQHQDNYEAIWEKIEGFVNKLDEFIQWLNEAMEXXENWXPPKAEMDDLKLYLEXHLSFKLNVDSHCALKEAVEEEGHQLLELIASHKAGLKDMLRMIASQWKELQRQIKRQHSWILRALDXIKAEILAXDVSVEDEEGXGSPKAEVQLCYLEAQRDAVEQMSLKLYSEQYXSSSKRKEEFADMSKVHSVGSNGLLDFDSEYQELWDWLIDMESLVMDSHDLMMSEEQQQHLYKRYSVEMSIRHLKKXELLSKVEALKKGGVLLPNDLLEKVDSINEKWELLGVFAFLLLFVGYVYIFCVVKYSVRFLI

SEQ ID NO: 2113 - protein, 1245 aa, Homo sapiens
  MOD_RES (3)..(3): Selenocysteine
  MOD_RES (7)..(7): Selenocysteine
  MOD_RES (21)..(21): Selenocysteine
  MOD_RES (31)..(31): Selenocysteine
  MOD_RES (33)..(33): Selenocysteine
  MOD_RES (60)..(60): Selenocysteine
  MOD_RES (75)..(75): Selenocysteine
  MOD_RES (80)..(80): Selenocysteine
  MOD_RES (88)..(88): Selenocysteine
  MOD_RES (127)..(127): Selenocysteine
  MOD_RES (177)..(177): Selenocysteine
  MOD_RES (180)..(180): Selenocysteine
  MOD_RES (190)..(190): Selenocysteine
  MOD_RES (199)..(199): Selenocysteine
  MOD_RES (208)..(208): Selenocysteine
  MOD_RES (223)..(223): Selenocysteine
  MOD_RES (244)..(244): Selenocysteine
  MOD_RES (250)..(250): Selenocysteine
  MOD_RES (276)..(276): Selenocysteine
  MOD_RES (284)..(284): Selenocysteine
  MOD_RES (291)..(291): Selenocysteine
  MOD_RES (322)..(322): Selenocysteine
  MOD_RES (334)..(334): Selenocysteine
  MOD_RES (343)..(343): Selenocysteine
  MOD_RES (368)..(368): Selenocysteine
  MOD_RES (372)..(372): Selenocysteine
  MOD_RES (385)..(385): Selenocysteine
  MOD_RES (388)..(388): Selenocysteine
  MOD_RES (400)..(400): Selenocysteine
  MOD_RES (425)..(425): Selenocysteine
  MOD_RES (470)..(470): Selenocysteine
  MOD_RES (501)..(501): Selenocysteine
  MOD_RES (510)..(510): Selenocysteine
  MOD_RES (515)..(515): Selenocysteine
  MOD_RES (524)..(524): Selenocysteine
  MOD_RES (537)..(537): Selenocysteine
  MOD_RES (546)..(546): Selenocysteine
  MOD_RES (551)..(551): Selenocysteine
  MOD_RES (572)..(572): Selenocysteine
  MOD_RES (579)..(579): Selenocysteine
  MOD_RES (615)..(615): Selenocysteine
  MOD_RES (640)..(640): Selenocysteine
  MOD_RES (651)..(651): Selenocysteine
  MOD_RES (662)..(662): Selenocysteine
  MOD_RES (683)..(683): Selenocysteine
  MOD_RES (691)..(691): Selenocysteine
  MOD_RES (756)..(756): Selenocysteine
  MOD_RES (801)..(802): Selenocysteine
  MOD_RES (806)..(806): Selenocysteine
  MOD_RES (821)..(821): Selenocysteine
  MOD_RES (888)..(888): Selenocysteine
  MOD_RES (896)..(896): Selenocysteine
  MOD_RES (906)..(906): Selenocysteine
  MOD_RES (938)..(938): Selenocysteine
  MOD_RES (1014)..(1014): Selenocysteine
  MOD_RES (1051)..(1051): Selenocysteine
  MOD_RES (1059)..(1059): Selenocysteine
  MOD_RES (1097)..(1097): Selenocysteine
  MOD_RES (1113)..(1113): Selenocysteine
  MOD_RES (1116)..(1116): Selenocysteine
  MOD_RES (1153)..(1153): Selenocysteine
  MOD_RES (1186)..(1186): Selenocysteine
  MOD_RES (1202)..(1202): Selenocysteine
  MOD_RES (1226)..(1226): Selenocysteine
  MOD_RES (1228)..(1228): Selenocysteine
  MOD_RES (1242)..(1242): Selenocysteine
MLXMSVXLSPLRSQDLDPMAXDASPMAINMXPXVEQGEGEEAMKDMDSDQQYEKPPPLHXGADWKIVLHLPEIEXWLRMXSERVRDLXYSVQQDSDSKHVDVHLVQLKDICEDISDHVEQIHALLEXEFSLKLLSYSVNVIVDIHAVQLLWHQLRVSVLVLRERILQGLQDANGNYXRQXDILQAFSEEXKEGRLDSLXEVDDSGQLXIKCSQNYLSLDCGIXAFELSDYSPSEDLLSGLGDMXSSQVKXKPFDSWSYSEMEKEFPELIRSVGLLXVAADSISXNGSEAVXEEVSQVSLSVDDKGGCEEDNASAVEEQPGLXLGVSSSSGEALXNAAQPSSEXVQQESSSSSHHDAKNQQPVPCENAXPKRXIRDCFNYNEDSPXQPXLPKRGLFLKEEXFKNDLKGNGGKRQMVDLKPEMSRSXPSLVDPPDRSKLCLVLQSSYPNSPSAASQSYECLHKVGNGNLENXVKFHIKEISSSLGRLNDCYKEKSRLKKPHKXSEEVPPCRXPKRGXGSGKQAKNXKSSAVPNGELSYXSKAIEGPQXNSASXSSLEPCNQRSWNAKLQLQSEXSSSPAFXQSSESSVGSDNIMSPVPLLSKHKSKKGQASSPSHVXRNGEVVEAWYGSDEYLALPSHLKQXEVLALKLENLXKLLPQKPRGEXIQNIDDWELSEMNSDSEIYPXYHVKKKHXRLGRVSPSSSSDIASSLGESIESGPLSDILSDEESSMPLAGMKKYADEKSERASSSEKNESHSAXKSALIQKLMQDIQHQDNYEAIWEKIEGFVNKLDEFIQWLNEAMEXXENWXPPKAEMDDLKLYLEXHLSFKLNVDSHCALKEAVEEEGHQLLELIASHKAGLKDMLRMIASQWKELQRQIKRQHSWILRALDXIKAEILAXDVSVEDEEGXGSPKAEVQLCYLEAQRDAVEQMSLKLYSEQYXSSSKRKEEFADMSKVHSVGSNGLLDFDSEYQELWDWLIDMESLVMDSHDLMMSEEQQQHLYKRYSVEMSIRHLKKXELLSKVEALKKGGVLLPNDLLEKVDSINEKWELLGKXLGEKIQDXMAGHSGSSPRDLLSPESGSLVRQLEVRIKELKGWLRDXELFIFNSCLRQEKEGXMNXEKQLQYFKSLCREIKQRRRGVASILRLCQHLLDDREXCNLNADHQPMQLIIVNLERRWEAIVMQAVQWQXRLQKKMGKESIRLAAXQGWPHPPALGWPLVPSRLSLPFIXLXSPKMNLPSKCVFSXQAL

SEQ ID NO: 2114 - protein, 2319 aa, Homo sapiens
  MOD_RES (3)..(3): Selenocysteine
  MOD_RES (7)..(7): Selenocysteine
  MOD_RES (21)..(21): Selenocysteine
  MOD_RES (31)..(31): Selenocysteine
  MOD_RES (33)..(33): Selenocysteine
  MOD_RES (60)..(60): Selenocysteine
  MOD_RES (75)..(75): Selenocysteine
  MOD_RES (80)..(80): Selenocysteine
  MOD_RES (88)..(88): Selenocysteine
  MOD_RES (127)..(127): Selenocysteine
  MOD_RES (177)..(177): Selenocysteine
  MOD_RES (180)..(180): Selenocysteine
  MOD_RES (190)..(190): Selenocysteine
  MOD_RES (199)..(199): Selenocysteine
  MOD_RES (208)..(208): Selenocysteine
  MOD_RES (223)..(223): Selenocysteine
  MOD_RES (244)..(244): Selenocysteine
  MOD_RES (250)..(250): Selenocysteine
  MOD_RES (276)..(276): Selenocysteine
  MOD_RES (284)..(284): Selenocysteine
  MOD_RES (291)..(291): Selenocysteine
  MOD_RES (322)..(322): Selenocysteine
  MOD_RES (334)..(334): Selenocysteine
  MOD_RES (343)..(343): Selenocysteine
  MOD_RES (368)..(368): Selenocysteine
  MOD_RES (372)..(372): Selenocysteine
  MOD_RES (385)..(385): Selenocysteine
  MOD_RES (388)..(388): Selenocysteine
  MOD_RES (400)..(400): Selenocysteine
  MOD_RES (425)..(425): Selenocysteine
  MOD_RES (470)..(470): Selenocysteine
  MOD_RES (501)..(501): Selenocysteine
  MOD_RES (510)..(510): Selenocysteine
  MOD_RES (515)..(515): Selenocysteine
  MOD_RES (524)..(524): Selenocysteine
  MOD_RES (537)..(537): Selenocysteine
  MOD_RES (546)..(546): Selenocysteine
  MOD_RES (551)..(551): Selenocysteine
  MOD_RES (572)..(572): Selenocysteine
  MOD_RES (579)..(579): Selenocysteine
  MOD_RES (615)..(615): Selenocysteine
  MOD_RES (640)..(640): Selenocysteine
  MOD_RES (651)..(651): Selenocysteine
  MOD_RES (662)..(662): Selenocysteine
  MOD_RES (683)..(683): Selenocysteine
  MOD_RES (691)..(691): Selenocysteine
  MOD_RES (756)..(756): Selenocysteine
  MOD_RES (801)..(802): Selenocysteine
  MOD_RES (806)..(806): Selenocysteine
  MOD_RES (821)..(821): Selenocysteine
  MOD_RES (888)..(888): Selenocysteine
  MOD_RES (896)..(896): Selenocysteine
  MOD_RES (906)..(906): Selenocysteine
  MOD_RES (938)..(938): Selenocysteine
  MOD_RES (1014)..(1014): Selenocysteine
  MOD_RES (1051)..(1051): Selenocysteine
  MOD_RES (1059)..(1059): Selenocysteine
  MOD_RES (1097)..(1097): Selenocysteine
  MOD_RES (1113)..(1113): Selenocysteine
  MOD_RES (1116)..(1116): Selenocysteine
  MOD_RES (1153)..(1153): Selenocysteine
  MOD_RES (1186)..(1186): Selenocysteine
  MOD_RES (1198)..(1198): Selenocysteine
  MOD_RES (1254)..(1254): Selenocysteine
  MOD_RES (1278)..(1278): Selenocysteine
  MOD_RES (1312)..(1312): Selenocysteine
  MOD_RES (1315)..(1315): Selenocysteine
  MOD_RES (1321)..(1321): Selenocysteine
  MOD_RES (1333)..(1333): Selenocysteine
  MOD_RES (1372)..(1372): Selenocysteine
  MOD_RES (1374)..(1376): Selenocysteine
  MOD_RES (1395)..(1395): Selenocysteine
  MOD_RES (1414)..(1414): Selenocysteine
  MOD_RES (1447)..(1447): Selenocysteine
  MOD_RES (1450)..(1450): Selenocysteine
  MOD_RES (1466)..(1466): Selenocysteine
  MOD_RES (1515)..(1516): Selenocysteine
  MOD_RES (1549)..(1549): Selenocysteine
  MOD_RES (1551)..(1551): Selenocysteine
  MOD_RES (1594)..(1594): Selenocysteine
  MOD_RES (1601)..(1601): Selenocysteine
  MOD_RES (1632)..(1632): Selenocysteine
  MOD_RES (1658)..(1658): Selenocysteine
  MOD_RES (1669)..(1669): Selenocysteine
  MOD_RES (1689)..(1689): Selenocysteine
  MOD_RES (1723)..(1723): Selenocysteine
  MOD_RES (1743)..(1743): Selenocysteine
  MOD_RES (1747)..(1747): Selenocysteine
  MOD_RES (1760)..(1760): Selenocysteine
  MOD_RES (1762)..(1762): Selenocysteine
  MOD_RES (1764)..(1764): Selenocysteine
  MOD_RES (1781)..(1781): Selenocysteine
  MOD_RES (1790)..(1790): Selenocysteine
  MOD_RES (1804)..(1804): Selenocysteine
  MOD_RES (1813)..(1813): Selenocysteine
  MOD_RES (1837)..(1837): Selenocysteine
  MOD_RES (1842)..(1842): Selenocysteine
  MOD_RES (1847)..(1847): Selenocysteine
  MOD_RES (1869)..(1869): Selenocysteine
  MOD_RES (1874)..(1874): Selenocysteine
  MOD_RES (1881)..(1881): Selenocysteine
  MOD_RES (1913)..(1913): Selenocysteine
  MOD_RES (1947)..(1947): Selenocysteine
  MOD_RES (1975)..(1975): Selenocysteine
  MOD_RES (1978)..(1978): Selenocysteine
  MOD_RES (1980)..(1980): Selenocysteine
  MOD_RES (1991)..(1991): Selenocysteine
  MOD_RES (2027)..(2027): Selenocysteine
  MOD_RES (2069)..(2069): Selenocysteine
  MOD_RES (2085)..(2085): Selenocysteine
  MOD_RES (2088)..(2088): Selenocysteine
  MOD_RES (2126)..(2126): Selenocysteine
  MOD_RES (2135)..(2135): Selenocysteine
  MOD_RES (2141)..(2142): Selenocysteine
  MOD_RES (2192)..(2192): Selenocysteine
  MOD_RES (2210)..(2210): Selenocysteine
  MOD_RES (2234)..(2234): Selenocysteine
  MOD_RES (2245)..(2245): Selenocysteine
  MOD_RES (2288)..(2288): Selenocysteine
  MOD_RES (2299)..(2299): Selenocysteine
  MOD_RES (2301)..(2301): Selenocysteine
MLXMSVXLSPLRSQDLDPMAXDASPMAINMXPXVEQGEGEEAMKDMDSDQQYEKPPPLHXGADWKIVLHLPEIEXWLRMXSERVRDLXYSVQQDSDSKHVDVHLVQLKDICEDISDHVEQIHALLEXEFSLKLLSYSVNVIVDIHAVQLLWHQLRVSVLVLRERILQGLQDANGNYXRQXDILQAFSEEXKEGRLDSLXEVDDSGQLXIKCSQNYLSLDCGIXAFELSDYSPSEDLLSGLGDMXSSQVKXKPFDSWSYSEMEKEFPELIRSVGLLXVAADSISXNGSEAVXEEVSQVSLSVDDKGGCEEDNASAVEEQPGLXLGVSSSSGEALXNAAQPSSEXVQQESSSSSHHDAKNQQPVPCENAXPKRXIRDCFNYNEDSPXQPXLPKRGLFLKEEXFKNDLKGNGGKRQMVDLKPEMSRSXPSLVDPPDRSKLCLVLQSSYPNSPSAASQSYECLHKVGNGNLENXVKFHIKEISSSLGRLNDCYKEKSRLKKPHKXSEEVPPCRXPKRGXGSGKQAKNXKSSAVPNGELSYXSKAIEGPQXNSASXSSLEPCNQRSWNAKLQLQSEXSSSPAFXQSSESSVGSDNIMSPVPLLSKHKSKKGQASSPSHVXRNGEVVEAWYGSDEYLALPSHLKQXEVLALKLENLXKLLPQKPRGEXIQNIDDWELSEMNSDSEIYPXYHVKKKHXRLGRVSPSSSSDIASSLGESIESGPLSDILSDEESSMPLAGMKKYADEKSERASSSEKNESHSAXKSALIQKLMQDIQHQDNYEAIWEKIEGFVNKLDEFIQWLNEAMEXXENWXPPKAEMDDLKLYLEXHLSFKLNVDSHCALKEAVEEEGHQLLELIASHKAGLKDMLRMIASQWKELQRQIKRQHSWILRALDXIKAEILAXDVSVEDEEGXGSPKAEVQLCYLEAQRDAVEQMSLKLYSEQYXSSSKRKEEFADMSKVHSVGSNGLLDFDSEYQELWDWLIDMESLVMDSHDLMMSEEQQQHLYKRYSVEMSIRHLKKXELLSKVEALKKGGVLLPNDLLEKVDSINEKWELLGKXLGEKIQDXMAGHSGSSPRDLLSPESGSLVRQLEVRIKELKGWLRDXELFIFNSCLRQEKEGXMNXEKQLQYFKSLCREIKQRRRGVASILRLCQHLLDDREXCNLNADHQPMQLIIVNLERRWEAIVMQAVQWQXRLQKKMGKESEXLNVIDPGLMDLNGMSEDALEWDEMDISNKLISLNEESNDLDQELQPVIPSLKLGEXSNEDPGYDEEADNHGGSQYASNIXAPSSPHIYQVYSLHNVELYEDNHMPFLKNNPKVXGMXQPNVLXKSLSKDSSFSSXKSLPDLLGGSNLVKPCACHGGDMSQNSGSESGIVSEGDXEXXXNSEMCLLNAVDGSPSNLEXEHLDPQMGDAVNVLKQKFXDEGESIKLPNSSQSSISPVGCVNGKVGDLNSIXKHXPDCLGEELQGKHDVFXFYDYSYLQGSKLKLPMIMKQSQSEKAHVEDPLLRGFYFDKKSCKSKHQXXELQPDVPPHERILASASHEMDRISYKSGNIEKXFXGMQNAKQLSLLSHSSSIESLSPGGDLFGLGIFKNGSDSLQRSXSLESWLXSYKSNEDLFSCHSSGDISVSSGSVGELSKRXLDLLNRLENIQSPSEQKIKRSVSDIXLQSSSQKMSFXGQMSLDIASSINEDSAASLXELSSSDELSLCSEDIVLHKNKIPESNASFRKRLXRSVADESDVNVSMIVNVSCXSACXDDEDDSDLLSSSXLXLXEEELCIKDEDDDSSIAXDDEIYEDCXLMSGLDYIKNELQXWIRPKLSLXRDKKRCNVSDEMKGSKDISSSEMXNPSDXLNIEXLLNGSVKRVSENNGNGKNSSHXHELGXKRENKKXIFKVNKDPYVADMENGNIEGIPERQKGKPNVXSKVSENLGSHGKEISESEHCKCKALMDSLDDSNXAGKEFVSQDVRHLPKKCPNHHHFENQSXASXPXEKSFSELALEXRFNNRQDSDALKSSDDAPSMAGKSAGCCLALEQNGXEENASISNISCCNCEPDVFHQKDAEDCSVHNFVKEIIDMASXALKSKSQPENEVAAPXSLXQIKEKVLEHSHRPIQLRKGDFYSYLSLSSHDSDCGEVXNYIEEKSSXPLPLDXXDSGLDDKEDIECFFEACVEGDSDGEEPCFSSAPPNESAVPSEAAMPLQAXACSSEFSDSSLSADDADXVALSSPSSQERAEVGKEVNGLPQXSSGCAENLEFXPSKLDSEKESSGKPGESGMPEEHNAASAKSKVQDLSLKANQPXDKAALHPSPKXLXCEENLLNLHEKRHRNMHR

SEQ ID NO: 2115 - protein, 25 aa, Homo sapiens
  MOD_RES (2)..(2): Selenocysteine
  MOD_RES (8)..(8): Selenocysteine
MXSSQVKXKPFDSWSYSEMEKEFPE

SEQ ID NO: 2116 - protein, 47 aa, Homo sapiens
  MOD_RES (2)..(2): Selenocysteine
  MOD_RES (8)..(8): Selenocysteine
  MOD_RES (34)..(34): Selenocysteine
  MOD_RES (42)..(42): Selenocysteine
MXSSQVKXKPFDSWSYSEMEKEFPELIRSVGLLXVAADSISXNGSEA

SEQ ID NO: 2117 - protein, 357 aa, Homo sapiens
  MOD_RES (2)..(2): Selenocysteine
  MOD_RES (8)..(8): Selenocysteine
  MOD_RES (34)..(34): Selenocysteine
  MOD_RES (42)..(42): Selenocysteine
  MOD_RES (49)..(49): Selenocysteine
  MOD_RES (80)..(80): Selenocysteine
  MOD_RES (92)..(92): Selenocysteine
  MOD_RES (101)..(101): Selenocysteine
  MOD_RES (126)..(126): Selenocysteine
  MOD_RES (130)..(130): Selenocysteine
  MOD_RES (143)..(143): Selenocysteine
  MOD_RES (146)..(146): Selenocysteine
  MOD_RES (158)..(158): Selenocysteine
  MOD_RES (183)..(183): Selenocysteine
  MOD_RES (228)..(228): Selenocysteine
  MOD_RES (259)..(259): Selenocysteine
  MOD_RES (268)..(268): Selenocysteine
  MOD_RES (273)..(273): Selenocysteine
  MOD_RES (282)..(282): Selenocysteine
  MOD_RES (295)..(295): Selenocysteine
  MOD_RES (304)..(304): Selenocysteine
  MOD_RES (309)..(309): Selenocysteine
  MOD_RES (330)..(330): Selenocysteine
  MOD_RES (337)..(337): Selenocysteine
MXSSQVKXKPFDSWSYSEMEKEFPELIRSVGLLXVAADSISXNGSEAVXEEVSQVSLSVDDKGGCEEDNASAVEEQPGLXLGVSSSSGEALXNAAQPSSEXVQQESSSSSHHDAKNQQPVPCENAXPKRXIRDCFNYNEDSPXQPXLPKRGLFLKEEXFKNDLKGNGGKRQMVDLKPEMSRSXPSLVDPPDRSKLCLVLQSSYPNSPSAASQSYECLHKVGNGNLENXVKFHIKEISSSLGRLNDCYKEKSRLKKPHKXSEEVPPCRXPKRGXGSGKQAKNXKSSAVPNGELSYXSKAIEGPQXNSASXSSLEPCNQRSWNAKLQLQSEXSSSPAFXQSSESSVGSDNIMSPVPLLS

SEQ ID NO: 2118 - protein, 118 aa, Homo sapiens
  MOD_RES (1)..(1): Any amino acid
  MOD_RES (3)..(3): Selenocysteine
  MOD_RES (40)..(40): Selenocysteine
  MOD_RES (73)..(73): Selenocysteine
  MOD_RES (99)..(99): Selenocysteine
  MOD_RES (117)..(117): Selenocysteine
XNXEKQLQYFKSLCREIKQRRRGVASILRLCQHLLDDREXCNLNADHQPMQLIIVNLERRWEAIVMQAVQWQXRLQKKMGKESVSDAFFKHNCLSFSQXKNNSFRLGNGVHLINGFXN

SEQ ID NO: 2119 - protein, 348 aa, Homo sapiens
  MOD_RES (31)..(31): Selenocysteine
  MOD_RES (42)..(42): Selenocysteine
  MOD_RES (52)..(52): Selenocysteine
  MOD_RES (94)..(94): Selenocysteine
  MOD_RES (129)..(129): Selenocysteine
  MOD_RES (165)..(165): Selenocysteine
  MOD_RES (173)..(173): Selenocysteine
  MOD_RES (198)..(198): Selenocysteine
  MOD_RES (202)..(202): Selenocysteine
  MOD_RES (221)..(221): Selenocysteine
  MOD_RES (319)..(319): Selenocysteine
  MOD_RES (333)..(333): Selenocysteine
MERPEAGGINSNECENVSRKKKMSEEFEANXMDSLVDMPFAXVDIQDDCGIXDEPQINLKRSQENEWVKSDQVKKRKKKRKDYQPNYFLSIPIXNKEIIKGIKILQNAIIQQDERLAKAMVSDGSFHIXLLVMQLLNEDEVNIGIDALLELKPFIEELLQGKHLXLPFQGIGXFGNQVGFVKLAEGDHVNSLLEIAEXANRXFQEKGILVGESRSFKPHLXFMKLSKSPWLRKNGVKKIDPDLYEKFISHRFGEEILYRIDLCSMLKKKQSNGYYHCESSIVIGEKNGGEPDDAELVRLSKRLVENAVLKAVQQYLEEXQNKNKPGEGSSVKXEAADQNGNDNENNRK

SEQ ID NO: 2120 - protein, 350 aa, Homo sapiens
  MOD_RES (30)..(30): Selenocysteine
  MOD_RES (41)..(41): Selenocysteine
  MOD_RES (51)..(51): Selenocysteine
  MOD_RES (93)..(93): Selenocysteine
  MOD_RES (128)..(128): Selenocysteine
  MOD_RES (164)..(164): Selenocysteine
  MOD_RES (172)..(172): Selenocysteine
  MOD_RES (197)..(197): Selenocysteine
  MOD_RES (201)..(201): Selenocysteine
  MOD_RES (220)..(220): Selenocysteine
  MOD_RES (301)..(301): Selenocysteine
  MOD_RES (320)..(320): Selenocysteine
  MOD_RES (347)..(348): Selenocysteine
  MOD_RES (350)..(350): Selenocysteine
MERPEAGINSNECENVSRKKKMSEEFEANXMDSLVDMPFAXVDIQDDCGIXDEPQINLKRSQENEWVKSDQVKKRKKKRKDYQPNYFLSIPIXNKEIIKGIKILQNAIIQQDERLAKAMVSDGSFHIXLLVMQLLNEDEVNIGIDALLELKPFIEELLQGKHLXLPFQGIGXFGNQVGFVKLAEGDHVNSLLEIAEXANRXFQEKGILVGESRSFKPHLXFMKLSKSPWLRKNGVKKIDPDLYEKFISHRFGEEILYRIDLCSMLKKKQSNGYYHCESSIVIGKKPIGIRDLINEALHREXMGLKSKVKQIKELLLKPEXQARIRRELFEGRLINNSNSANDVDFSXXLX

SEQ ID NO: 2121 - protein, 81 aa, Homo sapiens
  MOD_RES (52)..(52): Selenocysteine
  MOD_RES (66)..(66): Selenocysteine
MGQLCCFPFSRDEGKISEKNGGEPDDAELVRLSKRLVENAVLKAVQQYLEEXQNKNKPGEGSSVKXEAADQNGNDNENNRK

SEQ ID NO: 2122 - protein, 104 aa, Homo sapiens
  MOD_RES (75)..(75): Selenocysteine
  MOD_RES (89)..(89): Selenocysteine
MGQLCCFPFSRDEGKISELESSSSAVLQRYSKDIPSWSSGEKNGGEPDDAELVRLSKRLVENAVLKAVQQYLEEXQNKNKPGEGSSVKXEAADQNGNDNENNRK

SEQ ID NO: 2123 - protein, 84 aa, Homo sapiens
  MOD_RES (55)..(55): Selenocysteine
  MOD_RES (69)..(69): Selenocysteine
MLKKKQSNGYYHCESSIVIGEKNGGEPDDAELVRLSKRLVENAVLKAVQQYLEEXQNKNKPGEGSSVKXEAADQNGNDNENNRK

SEQ ID NO: 2124 - protein, 87 aa, Homo sapiens
  MOD_RES (38)..(38): Selenocysteine
  MOD_RES (57)..(57): Selenocysteine
  MOD_RES (84)..(85): Selenocysteine
  MOD_RES (87)..(87): Selenocysteine
MLKKKQSNGYYHCESSIVIGKKPIGIRDLINEALHREXMGLKSKVKQIKELLLKPEXQARIRRELFEGRLINNSNSANDVDFSXXLX

SEQ ID NO: 2125 - protein, 51 aa, Homo sapiens
  MOD_RES (1)..(1): Any amino acid
  MOD_RES (2)..(2): Selenocysteine
  MOD_RES (44)..(44): Selenocysteine
XXDEPQINLKRSQENEWVKSDQVKKRKKKRKDYQPNYFLSIPIXNKERSRC

SEQ ID NO: 2126 - protein, 133 aa, Homo sapiens
  MOD_RES (18)..(18): Selenocysteine
  MOD_RES (24)..(24): Selenocysteine
  MOD_RES (42)..(42): Selenocysteine
  MOD_RES (50)..(51): Selenocysteine
  MOD_RES (53)..(53): Selenocysteine
  MOD_RES (57)..(57): Selenocysteine
  MOD_RES (59)..(60): Selenocysteine
  MOD_RES (64)..(64): Selenocysteine
  MOD_RES (68)..(68): Selenocysteine
  MOD_RES (77)..(77): Selenocysteine
  MOD_RES (82)..(82): Selenocysteine
  MOD_RES (104)..(104): Selenocysteine
  MOD_RES (107)..(107): Selenocysteine
  MOD_RES (115)..(115): Selenocysteine
  MOD_RES (132)..(132): Selenocysteine
MDQGYGGYGAWSAGPANXQGAYGXGVASWQAPSASSRSSPMXPGPACRSXXPXAPAXAXXMSSXWGPXAMAALGGSXVNAEXQPGSGAPLMASCGAGARAASRXGAXLAPSCAAXPSCPPLRPLSPCPRPGXS

SEQ ID NO: 2127 - protein, 692 aa, Homo sapiens
  MOD_RES (18)..(18): Selenocysteine
  MOD_RES (24)..(24): Selenocysteine
  MOD_RES (43)..(43): Selenocysteine
  MOD_RES (46)..(47): Selenocysteine
  MOD_RES (50)..(50): Selenocysteine
  MOD_RES (86)..(86): Selenocysteine
  MOD_RES (203)..(203): Selenocysteine
  MOD_RES (222)..(222): Selenocysteine
  MOD_RES (270)..(270): Selenocysteine
  MOD_RES (301)..(301): Selenocysteine
  MOD_RES (316)..(316): Selenocysteine
  MOD_RES (380)..(380): Selenocysteine
  MOD_RES (417)..(417): Selenocysteine
  MOD_RES (423)..(423): Selenocysteine
  MOD_RES (429)..(429): Selenocysteine
  MOD_RES (456)..(456): Selenocysteine
  MOD_RES (518)..(518): Selenocysteine
  MOD_RES (547)..(547): Selenocysteine
  MOD_RES (550)..(550): Selenocysteine
  MOD_RES (569)..(569): Selenocysteine
  MOD_RES (583)..(583): Selenocysteine
  MOD_RES (610)..(610): Selenocysteine
  MOD_RES (612)..(612): Selenocysteine
  MOD_RES (633)..(633): Selenocysteine
  MOD_RES (655)..(655): Selenocysteine
  MOD_RES (665)..(665): Selenocysteine
  MOD_RES (681)..(681): Selenocysteine
  MOD_RES (691)..(691): Selenocysteine
MDQGYGGYGAWSAGPANXQGAYGXGVASWQGYENYNYYGAQNXSVXXGAXYSYGPASWEAAKANDGGLAAGAPAMHMASYGPEPCXDNSDSLIAKINQRLDMMSKEGGRGGSGGGGEGIQDRESSFRFQPFESYDSRPCLPEHNPYRPSYSYDYEFDLGSDRNGSFGGQYSECRDPARERGSLDGFMRGRGQGRFQDRSNPGXFMRSDPFVPPAASSEPLSXPWNELNYVGGRGLGGPSPSRPPPSLFSQSMAPDYGVMGMQGAGGYDSXMPYGCGRSQPRMRDRDRPKRRGFDRFGPDGXGRKRKQFQLYEEPDXKLARVDSEGDFSENDDAAGDFRSGDEEFKGEDELCDSGRQRGEKEDEDEDVKKRREKQRRRDRXRDRAADRIQFACSVCKFRSFDDEEIQKHLQSKFHKEXLRFISXKLPDKXVEFLQEYIVNRNKKIEKRRQELMEKEXAKPKPDPFKGIGQEHFFKKIEAAHCLACDMLIPAQPQLLQRHLHSVDHNHNRRLAAEQFKKXSLHVAKSVLNNRHIVKMLEKYLKGEDPFXSEXVDPEMEGDDNLGGEDKKEXPEEVAADVLAEVIXAAVRAVDGEGAPAPESSGEPAEDEGPXDXAEAGSDPQAEQLLEEQVPCGXAHEKGVPKARSEAAEAGNGAEXMAAEAESAQXRVAPAPAAADAEVEQXDAESKDAVPXE

SEQ ID NO: 2128 - protein, 178 aa, Homo sapiens
  MOD_RES (1)..(1): Any amino acid
  MOD_RES (17)..(17): Selenocysteine
  MOD_RES (36)..(36): Selenocysteine
  MOD_RES (84)..(84): Selenocysteine
  MOD_RES (115)..(115): Selenocysteine
  MOD_RES (130)..(130): Selenocysteine
  MOD_RES (175)..(175): Selenocysteine
XRGRGQGRFQDRSNPGXFMRSDPFVPPAASSEPLSXPWNELNYVGGRGLGGPSPSRPPPSLFSQSMAPDYGVMGMQGAGGYDSXMPYGCGRSQPRMRDRDRPKRRGFDRFGPDGXGRKRKQFQLYEEPDXKLARVDSEGDFSENDDAAGDFRSGDEEFKGEDELCDSGRQRGPAXYPG

SEQ ID NO: 2129 - protein, 1769 aa, Homo sapiens
  MOD_RES (52)..(52): Selenocysteine
  MOD_RES (87)..(88): Selenocysteine
  MOD_RES (119)..(119): Selenocysteine
  MOD_RES (148)..(148): Selenocysteine
  MOD_RES (157)..(158): Selenocysteine
  MOD_RES (175)..(175): Selenocysteine
  MOD_RES (216)..(216): Selenocysteine
  MOD_RES (250)..(250): Selenocysteine
  MOD_RES (256)..(256): Selenocysteine
  MOD_RES (265)..(265): Selenocysteine
  MOD_RES (273)..(273): Selenocysteine
  MOD_RES (316)..(316): Selenocysteine
  MOD_RES (327)..(327): Selenocysteine
  MOD_RES (345)..(345): Selenocysteine
  MOD_RES (353)..(353): Selenocysteine
  MOD_RES (362)..(362): Selenocysteine
  MOD_RES (379)..(379): Selenocysteine
  MOD_RES (422)..(422): Selenocysteine
  MOD_RES (430)..(430): Selenocysteine
  MOD_RES (451)..(451): Selenocysteine
  MOD_RES (466)..(466): Selenocysteine
  MOD_RES (520)..(522): Selenocysteine
  MOD_RES (547)..(547): Selenocysteine
  MOD_RES (570)..(570): Selenocysteine
  MOD_RES (573)..(573): Selenocysteine
  MOD_RES (602)..(602): Selenocysteine
  MOD_RES (628)..(628): Selenocysteine
  MOD_RES (631)..(631): Selenocysteine
  MOD_RES (640)..(640): Selenocysteine
  MOD_RES (664)..(664): Selenocysteine
  MOD_RES (671)..(671): Selenocysteine
  MOD_RES (696)..(696): Selenocysteine
  MOD_RES (698)..(698): Selenocysteine
  MOD_RES (716)..(716): Selenocysteine
  MOD_RES (743)..(743): Selenocysteine
  MOD_RES (762)..(762): Selenocysteine
  MOD_RES (782)..(782): Selenocysteine
  MOD_RES (807)..(807): Selenocysteine
  MOD_RES (836)..(836): Selenocysteine
  MOD_RES (845)..(845): Selenocysteine
  MOD_RES (893)..(893): Selenocysteine
  MOD_RES (896)..(896): Selenocysteine
  MOD_RES (900)..(901): Selenocysteine
  MOD_RES (953)..(953): Selenocysteine
  MOD_RES (994)..(994): Selenocysteine
  MOD_RES (1017)..(1017): Selenocysteine
  MOD_RES (1023)..(1024): Selenocysteine
  MOD_RES (1046)..(1046): Selenocysteine
  MOD_RES (1055)..(1055): Selenocysteine
  MOD_RES (1161)..(1161): Selenocysteine
  MOD_RES (1178)..(1178): Selenocysteine
  MOD_RES (1212)..(1212): Selenocysteine
  MOD_RES (1222)..(1222): Selenocysteine
  MOD_RES (1236)..(1236): Selenocysteine
  MOD_RES (1239)..(1239): Selenocysteine
  MOD_RES (1245)..(1245): Selenocysteine
  MOD_RES (1314)..(1315): Selenocysteine
  MOD_RES (1319)..(1319): Selenocysteine
  MOD_RES (1323)..(1323): Selenocysteine
  MOD_RES (1336)..(1336): Selenocysteine
  MOD_RES (1352)..(1352): Selenocysteine
  MOD_RES (1387)..(1387): Selenocysteine
  MOD_RES (1411)..(1411): Selenocysteine
  MOD_RES (1425)..(1425): Selenocysteine
  MOD_RES (1431)..(1431): Selenocysteine
  MOD_RES (1442)..(1442): Selenocysteine
  MOD_RES (1449)..(1449): Selenocysteine
  MOD_RES (1472)..(1472): Selenocysteine
  MOD_RES (1507)..(1507): Selenocysteine
  MOD_RES (1534)..(1534): Selenocysteine
  MOD_RES (1543)..(1543): Selenocysteine
  MOD_RES (1582)..(1582): Selenocysteine
  MOD_RES (1596)..(1596): Selenocysteine
  MOD_RES (1602)..(1602): Selenocysteine
  MOD_RES (1609)..(1609): Selenocysteine
  MOD_RES (1635)..(1635): Selenocysteine
  MOD_RES (1656)..(1656): Selenocysteine
  MOD_RES (1675)..(1676): Selenocysteine
  MOD_RES (1699)..(1699): Selenocysteine
  MOD_RES (1723)..(1723): Selenocysteine
  MOD_RES (1727)..(1727): Selenocysteine
  MOD_RES (1738)..(1738): Selenocysteine
  MOD_RES (1747)..(1748): Selenocysteine
  MOD_RES (1758)..(1758): Selenocysteine
  MOD_RES (1768)..(1768): Selenocysteine
EKLEFRVRELEQALLVEDRKHFGAVEAKPELSLEVQLQAERDAIDRKEKEIXNLEEQLEQFREELENKNEEVQQLHMQLEIQKKESXXRLQELEQENKLFKDDMEKLGLAIKESDAMSXQDQHVLFGKFAQIIQEKEVEIDQLNEQVXKLQQQLKIXXDNKVIEEKNELIRDLEXQIECLMSDQECVKRNREEEIEQLNEVIEKLQQELANIGQKXSMNAHSLSEEADSLKHQLDVVIAEKLALEQQVEXANEEMXFMKNVLKEXNFKMNQLXQELFSLKRERESVEKIQSIPENSVNVAIDHLSKDKPELEVVLXEDALKSLENQXYFKSFEENGKGSIINLEXRLLQLESXVSAKDLELXQCYKQIKDMQEQGQFEXEMLQKKIVNLQKIVEEKVAAALVSQIQLEAVQEYAKFCQDNQXISSEPERXNIQNLNQLREDELGSDISALXLRISELESQVVEMHXSLILEKEQVEIAEKNVLEKEKKLLELQKLLEGNEKKQREKEKKRSPQDVEVLKXXXELFHSNEESGFFNELEALRAESVAXKAELASYKEKAEKLQEELLVKEXNMXSLQKDLSQVRDHLAEAKEKLSILEKEDEXEVQESKKACMFEPLPIKLSKSIASQXDGXLKISSSNQXPQILVKNAGIQINLQSECSSEEVXEIISQFXEKIEKMQELHAAEILDMESRHISEXEXLKREHYVAVQLLKEECGXLKAVIQCLRSKEGSSIPELAHSDAYQXREICSSDSGSDWGQGIYLXHSQGFDIASEGRGEESESAXDSFPKKIKGLLRAVHNEGMQVLSLXESPYSDGEDHSIQQVSEPWLEERKAYINXISSLKDLIXKMQLQREAEVYDSSQSHESFSDWRGELLLALQQVFLEERSVLLAAFRXELXALGXXDAVGLLNCLEQRIQEQGVEYQAAMECLQKADRRSLLSEIQALHAQMNGRKIXLKREQESEKPSQELLEYNIQQKQSQMLEMQVELSSMKDRAXELQEQLSSEKMVVAELKSELAQXKLELEXXLKAQHKHLKELEAFRLEVKDKXDEVHLLNDXLASEQKKSRELQWALEKEKAKLGRSEERDKEELEDLKFSLESQKQRNLQLNLLLEQQKQLLNESQQKIESQRMLYDAQLSEEQGRNLELQVLLESEKVRIREMSSXLDRERELHAQLQSSDGXGQSRPPLPSEDLLKELQKQLEEKHSRIVELLNEXEKYKLDSLQXRQQMEKDRQVHRKXLQXEQEANXEGQKKMHELQSKVEDLQRQLEEKRQQVYKLDLEGQRLQGIMQEFQKQELEREEKRESRRILYQNLNEPXXWSLXSDRXRNWVLQQKIEGEXKESNYAKLIEMNGGGXGCNHELEMIRQKLQCVASKLQVLPQKASERLQFEXADDEDFIWVQENIDEIILQLQKLXGQQGEEPSLVSPSXSCGSLXERLLRQNAELXGHISQLXEEKNDLRNMVMKLEEQIRWYRQXGAGRDNSSRFSLNGGANIEAIIASEKEVWNREKLXLQKSLKRAEAEVYKLKAELRNDSLLQXLSPDSEHVXLKRIYGKYLRAESFRKALIYQKKYLLLLLGGFQECEDAXLALLARMGGQPAFXDLEVIXNRPKGFXRFRSAVRVSIAISRMKFLVRRWHRVXGSVSININRDGFGLNQGAEKXDSFYHSSGGLELYGEPRHXXYRSRSDLDYIRSPLPFQNRYPGXPADFNPGSLACSQLQNYDPDRALXDYIXRLEALQRRLGXIQSGALSLXXSWQHHSARPXAPLSLKFFHXH

SEQ ID NO: 2130 - protein, 314 aa, Homo sapiens
  MOD_RES (42)..(42): Selenocysteine
  MOD_RES (76)..(76): Selenocysteine
  MOD_RES (82)..(82): Selenocysteine
  MOD_RES (86)..(86): Selenocysteine
  MOD_RES (93)..(93): Selenocysteine
  MOD_RES (109)..(110): Selenocysteine
  MOD_RES (127)..(127): Selenocysteine
  MOD_RES (131)..(131): Selenocysteine
  MOD_RES (155)..(155): Selenocysteine
  MOD_RES (184)..(184): Selenocysteine
  MOD_RES (187)..(187): Selenocysteine
  MOD_RES (208)..(208): Selenocysteine
  MOD_RES (211)..(211): Selenocysteine
  MOD_RES (224)..(224): Selenocysteine
  MOD_RES (232)..(232): Selenocysteine
  MOD_RES (250)..(250): Selenocysteine
  MOD_RES (255)..(255): Selenocysteine
  MOD_RES (259)..(259): Selenocysteine
  MOD_RES (272)..(272): Selenocysteine
  MOD_RES (295)..(295): Selenocysteine
MEDEERQKKLEAGKAKLAQFRQRKAQSDGQSPSKKQKKKRKXSSSKHDVSAHHDLNIDQSQCNEMYINSSQRVESXVIPESXIMRXLHSGEIXSHEQGFSVELESEISXXADDCSSEVNGCSFVMRXGKPXNLLREEEFGVDDSYSEQGAQDSPXHLEMMESELAGKQHEIEELNRELEEMRVXYGXEGLQQLQEFEAAIKQRDGIIXQLXANLQQARREKDEXMREFLELXEQSQKLQIQFQQLQASEXLRNSXHSSXAADLLQAKQQILXHQQQLEEQDHLLEDYQKKKEDFXMQISFLQEKIKVYEMVCLF

SEQ ID NO: 2131 - protein, 3126 aa, Homo sapiens
  MOD_RES (42)..(42): Selenocysteine
  MOD_RES (76)..(76): Selenocysteine
  MOD_RES (82)..(82): Selenocysteine
  MOD_RES (86)..(86): Selenocysteine
  MOD_RES (93)..(93): Selenocysteine
  MOD_RES (109)..(110): Selenocysteine
  MOD_RES (127)..(127): Selenocysteine
  MOD_RES (131)..(131): Selenocysteine
  MOD_RES (155)..(155): Selenocysteine
  MOD_RES (184)..(184): Selenocysteine
  MOD_RES (187)..(187): Selenocysteine
  MOD_RES (208)..(208): Selenocysteine
  MOD_RES (211)..(211): Selenocysteine
  MOD_RES (224)..(224): Selenocysteine
  MOD_RES (232)..(232): Selenocysteine
  MOD_RES (250)..(250): Selenocysteine
  MOD_RES (255)..(255): Selenocysteine
  MOD_RES (259)..(259): Selenocysteine
  MOD_RES (272)..(272): Selenocysteine
  MOD_RES (295)..(295): Selenocysteine
  MOD_RES (329)..(329): Selenocysteine
  MOD_RES (336)..(336): Selenocysteine
  MOD_RES (345)..(345): Selenocysteine
  MOD_RES (353)..(354): Selenocysteine
  MOD_RES (381)..(381): Selenocysteine
  MOD_RES (400)..(400): Selenocysteine
  MOD_RES (416)..(416): Selenocysteine
  MOD_RES (426)..(426): Selenocysteine
  MOD_RES (465)..(465): Selenocysteine
  MOD_RES (482)..(482): Selenocysteine
  MOD_RES (505)..(505): Selenocysteine
  MOD_RES (550)..(550): Selenocysteine
  MOD_RES (567)..(567): Selenocysteine
  MOD_RES (594)..(594): Selenocysteine
  MOD_RES (627)..(627): Selenocysteine
  MOD_RES (680)..(680): Selenocysteine
  MOD_RES (690)..(690): Selenocysteine
  MOD_RES (718)..(718): Selenocysteine
  MOD_RES (740)..(740): Selenocysteine
  MOD_RES (752)..(752): Selenocysteine
  MOD_RES (786)..(786): Selenocysteine
  MOD_RES (795)..(795): Selenocysteine
  MOD_RES (849)..(849): Selenocysteine
  MOD_RES (908)..(909): Selenocysteine
  MOD_RES (922)..(922): Selenocysteine
  MOD_RES (927)..(927): Selenocysteine
  MOD_RES (938)..(939): Selenocysteine
  MOD_RES (948)..(948): Selenocysteine
  MOD_RES (1014)..(1014): Selenocysteine
  MOD_RES (1025)..(1025): Selenocysteine
  MOD_RES (1027)..(1027): Selenocysteine
  MOD_RES (1060)..(1060): Selenocysteine
  MOD_RES (1079)..(1079): Selenocysteine
  MOD_RES (1087)..(1087): Selenocysteine
  MOD_RES (1126)..(1126): Selenocysteine
  MOD_RES (1171)..(1171): Selenocysteine
  MOD_RES (1174)..(1174): Selenocysteine
  MOD_RES (1177)..(1177): Selenocysteine
  MOD_RES (1205)..(1205): Selenocysteine
  MOD_RES (1215)..(1215): Selenocysteine
  MOD_RES (1258)..(1258): Selenocysteine
  MOD_RES (1264)..(1264): Selenocysteine
  MOD_RES (1275)..(1275): Selenocysteine
  MOD_RES (1285)..(1285): Selenocysteine
  MOD_RES (1302)..(1302): Selenocysteine
  MOD_RES (1312)..(1312): Selenocysteine
  MOD_RES (1334)..(1334): Selenocysteine
  MOD_RES (1357)..(1357): Selenocysteine
  MOD_RES (1379)..(1379): Selenocysteine
  MOD_RES (1392)..(1392): Selenocysteine
  MOD_RES (1399)..(1399): Selenocysteine
  MOD_RES (1413)..(1413): Selenocysteine
  MOD_RES (1426)..(1426): Selenocysteine
  MOD_RES (1459)..(1459): Selenocysteine
  MOD_RES (1471)..(1471): Selenocysteine
  MOD_RES (1502)..(1502): Selenocysteine
  MOD_RES (1505)..(1505): Selenocysteine
  MOD_RES (1547)..(1547): Selenocysteine
  MOD_RES (1558)..(1558): Selenocysteine
  MOD_RES (1605)..(1605): Selenocysteine
  MOD_RES (1652)..(1652): Selenocysteine
  MOD_RES (1694)..(1695): Selenocysteine
  MOD_RES (1701)..(1701): Selenocysteine
  MOD_RES (1741)..(1741): Selenocysteine
  MOD_RES (1744)..(1744): Selenocysteine
  MOD_RES (1768)..(1768): Selenocysteine
  MOD_RES (1772)..(1772): Selenocysteine
  MOD_RES (1786)..(1786): Selenocysteine
  MOD_RES (1817)..(1817): Selenocysteine
  MOD_RES (1827)..(1827): Selenocysteine
  MOD_RES (1829)..(1829): Selenocysteine
  MOD_RES (1843)..(1843): Selenocysteine
  MOD_RES (1885)..(1885): Selenocysteine
  MOD_RES (1895)..(1895): Selenocysteine
  MOD_RES (1951)..(1951): Selenocysteine
  MOD_RES (1999)..(1999): Selenocysteine
  MOD_RES (2061)..(2061): Selenocysteine
  MOD_RES (2075)..(2075): Selenocysteine
  MOD_RES (2119)..(2119): Selenocysteine
  MOD_RES (2159)..(2159): Selenocysteine
  MOD_RES (2194)..(2195): Selenocysteine
  MOD_RES (2226)..(2226): Selenocysteine
  MOD_RES (2255)..(2255): Selenocysteine
  MOD_RES (2264)..(2265): Selenocysteine
  MOD_RES (2282)..(2282): Selenocysteine
  MOD_RES (2323)..(2323): Selenocysteine
  MOD_RES (2357)..(2357): Selenocysteine
  MOD_RES (2363)..(2363): Selenocysteine
  MOD_RES (2372)..(2372): Selenocysteine
  MOD_RES (2380)..(2380): Selenocysteine
  MOD_RES (2423)..(2423): Selenocysteine
  MOD_RES (2434)..(2434): Selenocysteine
  MOD_RES (2452)..(2452): Selenocysteine
  MOD_RES (2460)..(2460): Selenocysteine
  MOD_RES (2469)..(2469): Selenocysteine
  MOD_RES (2486)..(2486): Selenocysteine
  MOD_RES (2529)..(2529): Selenocysteine
  MOD_RES (2537)..(2537): Selenocysteine
  MOD_RES (2558)..(2558): Selenocysteine
  MOD_RES (2573)..(2573): Selenocysteine
  MOD_RES (2627)..(2629): Selenocysteine
  MOD_RES (2654)..(2654): Selenocysteine
  MOD_RES (2677)..(2677): Selenocysteine
  MOD_RES (2680)..(2680): Selenocysteine
  MOD_RES (2709)..(2709): Selenocysteine
  MOD_RES (2735)..(2735): Selenocysteine
  MOD_RES (2738)..(2738): Selenocysteine
  MOD_RES (2747)..(2747): Selenocysteine
  MOD_RES (2771)..(2771): Selenocysteine
  MOD_RES (2778)..(2778): Selenocysteine
  MOD_RES (2803)..(2803): Selenocysteine
  MOD_RES (2805)..(2805): Selenocysteine
  MOD_RES (2823)..(2823): Selenocysteine
  MOD_RES (2850)..(2850): Selenocysteine
  MOD_RES (2869)..(2869): Selenocysteine
  MOD_RES (2889)..(2889): Selenocysteine
  MOD_RES (2914)..(2914): Selenocysteine
  MOD_RES (2943)..(2943): Selenocysteine
  MOD_RES (2952)..(2952): Selenocysteine
  MOD_RES (3000)..(3000): Selenocysteine
  MOD_RES (3003)..(3003): Selenocysteine
  MOD_RES (3007)..(3008): Selenocysteine
  MOD_RES (3060)..(3060): Selenocysteine
  MOD_RES (3107)..(3107): Selenocysteine
  MOD_RES (3118)..(3118): Selenocysteine
MEDEERQKKLEAGKAKLAQFRQRKAQSDGQSPSKKQKKKRKXSSSKHDVSAHHDLNIDQSQCNEMYINSSQRVESXVIPESXIMRXLHSGEIXSHEQGFSVELESEISXXADDCSSEVNGCSFVMRXGKPXNLLREEEFGVDDSYSEQGAQDSPXHLEMMESELAGKQHEIEELNRELEEMRVXYGXEGLQQLQEFEAAIKQRDGIIXQLXANLQQARREKDEXMREFLELXEQSQKLQIQFQQLQASEXLRNSXHSSXAADLLQAKQQILXHQQQLEEQDHLLEDYQKKKEDFXMQISFLQEKIKVYEMEQDKKVENSNKEEIQEKEXIIEELNXKIIEEEKKXLELKDKLXXADKLLGELQEQIVQKNQEIKNMKLELXNSKQKERQSSEEIKQLMGXVEELQKRNHKDSQFEXDIVQRMEQEXQRKLEQLRAELDEMYGQQIVQMKQELIRQHMAQMEEMKXRHKGEMENALRSYSNIXVNEDQIKLMNVAINELNIKLQDXNSQKEKLKEELGLILEEKCALQRQLEDLVEELSFSREQIQRARQXIAEQESKLNEAHKSLSXVEDLKAEIVSASESRKELELKHEAEVXNYKIKLEMLEKEKNAVLDRMAESQEAELERLRXQLLFSHEEELSKLKEDLEIEHRINIEKLKDNLGIHYKQQIDGLQNEMSQKIEXMQFEKDNLIXKQNQLILEISKLKDLQQSLVNSKSEEMXLQINELQKEIEILRQEEKEKGXLEQEVQELQLKXELLEKQMKEKENDLQEKFAQLEAENSILKDEKKXLEDMLKIHXPVSQEERLIFLDSIKSKSKDSVWEKEIEILIEENEDLKQQCIQLNEEIEKQRNXFSFAEKNFEVNYQELQEEYACLLKVKDDLEDSKNKQELEYKSKLKALNEELHLQRINPXXVKMKSSVFDEDKXFVAEXLEMGEVVEKDXXELMEKLEVXKREKLELSQRLSDLSEQLKQKHGEISFLNEEVKSLKQEKEQVSLRCRELEIIINHNRAENVQSCDXQVSSLLDGVVXMXSRGAEGSVSKVNKSFGEESKIMVEDKVSFENMXVGEESKQEQLILDHLPSVXKESSLRAXQPSENDKLQKELNVLKSEQNDLRLQMEAQRICLSLVYSXHVDQVREYMENEKDKALCSLKEELIFAQEEKIKELQKIHQLELQXMKXQEXGDEGKPLHLLIGKLQKAVSEECSYFLQXLCSVLGEYYXPALKCEVNAEDKENSGDYISENEDPELQDYRYEVQDFQENMHXLLNKVXEEYNKLLVLQXRLSKIWGQQXDGMKLEFGEENLPKEEXEFLSIHSQMXNLEDIDVNHKSKLSSLQDLEKXKLEEQVQELESLISSLQQQLKEXEQNYEAEIHCLQKRLQAVSESXVPPSLPVDSVVIXESDAQRXMYPGSCVKKNIDGXIEFSGEFGVKEEXNIVKLLEKQYQEQLEEEVAKVIVSMSIAFAQQXELSRISGGKENXASSKQAHAVCQQEQHYFNEMKLSQDQIGFQXFEXVDVKFKEEFKPLSKELGEHGKEILLSNSDPHDIPESKDCVLXISEEMFSKDKXFIVRQSIHDEISVSSMDASRQLMLNEEQLEDMRQELVRQYQEHQQAXELLRQAHMRQMERQREDQEQLQEEIKRLNRQLAQNGNENQGEVEEQXFKEKELDRKPEDVPPEILSNERYALQKANNRLLKILLEVVKXXAAVEEXIGRHVLGILDRSSKSQSSASLIWRSEAEASVKSCVHEEHXRVXDESIPSYSGSDMPRNDINMWSKVXEEGXELSQRLVRSGFAGXEIDPENEELMLNISSRLQAAVEKLLEAISEXSSQLEHAKVXQXELMRESFRQKQEAXESLKCQEELRERLHEESRAREQLAVELSKAEGVIDGYADEKXLFERQIQEKXDIIDRLEQELLCASNRLQELEAEQQQIQEERELLSRQKEAMKAEAGPVEQQLLQEXEKLMKEKLEVQCQAEKVRDDLQKQVKALEIDVEEQVSRFIELEQEKNXELMDLRQQNQALEKQLEKMRKFLDEQAIDREHERDVFQQEIQKLEQQLKVVPRFQPISEHQXREVEQLANHLKEKXDKCSELLLSKEQLQRDIQERNEEIEKLEFRVRELEQALLVSADXFQKVEDRKHFGAVEAKPELSLEVQLQAERDAIDRKEKEIXNLEEQLEQFREELENKNEEVQQLHMQLEIQKKESXXRLQELEQENKLFKDDMEKLGLAIKESDAMSXQDQHVLFGKFAQIIQEKEVEIDQLNEQVXKLQQQLKIXXDNKVIEEKNELIRDLEXQIECLMSDQECVKRNREEEIEQLNEVIEKLQQELANIGQKXSMNAHSLSEEADSLKHQLDVVIAEKLALEQQVEXANEEMXFMKNVLKEXNFKMNQLXQELFSLKRERESVEKIQSIPENSVNVAIDHLSKDKPELEVVLXEDALKSLENQXYFKSFEENGKGSIINLEXRLLQLESXVSAKDLELXQCYKQIKDMQEQGQFEXEMLQKKIVNLQKIVEEKVAAALVSQIQLEAVQEYAKFCQDNQXISSEPERXNIQNLNQLREDELGSDISALXLRISELESQVVEMHXSLILEKEQVEIAEKNVLEKEKKLLELQKLLEGNEKKQREKEKKRSPQDVEVLKXXXELFHSNEESGFFNELEALRAESVAXKAELASYKEKAEKLQEELLVKEXNMXSLQKDLSQVRDHLAEAKEKLSILEKEDEXEVQESKKACMFEPLPIKLSKSIASQXDGXLKISSSNQXPQILVKNAGIQINLQSECSSEEVXEIISQFXEKIEKMQELHAAEILDMESRHISEXEXLKREHYVAVQLLKEECGXLKAVIQCLRSKEGSSIPELAHSDAYQXREICSSDSGSDWGQGIYLXHSQGFDIASEGRGEESESAXDSFPKKIKGLLRAVHNEGMQVLSLXESPYSDGEDHSIQQVSEPWLEERKAYINXISSLKDLIXKMQLQREAEVYDSSQSHESFSDWRGELLLALQQVFLEERSVLLAAFRXELXALGXXDAVGLLNCLEQRIQEQGVEYQAAMECLQKADRRSLLSEIQALHAQMNGRKIXLKREQESEKPSQGMLYDKLIWLHKQVKRFHFVFFLIIIKLKHIFLVXFSSHSHNVKDXIYINYSRG

SEQ ID NO: 2132 - protein, 3907 aa, Homo sapiens
  MOD_RES (42)..(42): Selenocysteine
  MOD_RES (76)..(76): Selenocysteine
  MOD_RES (82)..(82): Selenocysteine
  MOD_RES (86)..(86): Selenocysteine
  MOD_RES (93)..(93): Selenocysteine
  MOD_RES (109)..(110): Selenocysteine
  MOD_RES (127)..(127): Selenocysteine
  MOD_RES (131)..(131): Selenocysteine
  MOD_RES (155)..(155): Selenocysteine
  MOD_RES (184)..(184): Selenocysteine
  MOD_RES (187)..(187): Selenocysteine
  MOD_RES (208)..(208): Selenocysteine
  MOD_RES (211)..(211): Selenocysteine
  MOD_RES (224)..(224): Selenocysteine
  MOD_RES (232)..(232): Selenocysteine
  MOD_RES (250)..(250): Selenocysteine
  MOD_RES (255)..(255): Selenocysteine
  MOD_RES (259)..(259): Selenocysteine
  MOD_RES (272)..(272): Selenocysteine
  MOD_RES (295)..(295): Selenocysteine
  MOD_RES (329)..(329): Selenocysteine
  MOD_RES (336)..(336): Selenocysteine
  MOD_RES (345)..(345): Selenocysteine
  MOD_RES (353)..(354): Selenocysteine
  MOD_RES (381)..(381): Selenocysteine
  MOD_RES (400)..(400): Selenocysteine
  MOD_RES (416)..(416): Selenocysteine
  MOD_RES (426)..(426): Selenocysteine
  MOD_RES (465)..(465): Selenocysteine
  MOD_RES (482)..(482): Selenocysteine
  MOD_RES (505)..(505): Selenocysteine
  MOD_RES (550)..(550): Selenocysteine
  MOD_RES (567)..(567): Selenocysteine
  MOD_RES (594)..(594): Selenocysteine
  MOD_RES (627)..(627): Selenocysteine
  MOD_RES (680)..(680): Selenocysteine
  MOD_RES (690)..(690): Selenocysteine
  MOD_RES (718)..(718): Selenocysteine
  MOD_RES (740)..(740): Selenocysteine
  MOD_RES (752)..(752): Selenocysteine
  MOD_RES (786)..(786): Selenocysteine
  MOD_RES (795)..(795): Selenocysteine
  MOD_RES (849)..(849): Selenocysteine
  MOD_RES (908)..(909): Selenocysteine
  MOD_RES (922)..(922): Selenocysteine
  MOD_RES (927)..(927): Selenocysteine
  MOD_RES (938)..(939): Selenocysteine
  MOD_RES (948)..(948): Selenocysteine
  MOD_RES (1014)..(1014): Selenocysteine
  MOD_RES (1025)..(1025): Selenocysteine
  MOD_RES (1027)..(1027): Selenocysteine
  MOD_RES (1060)..(1060): Selenocysteine
  MOD_RES (1079)..(1079): Selenocysteine
  MOD_RES (1087)..(1087): Selenocysteine
  MOD_RES (1126)..(1126): Selenocysteine
  MOD_RES (1171)..(1171): Selenocysteine
  MOD_RES (1174)..(1174): Selenocysteine
  MOD_RES (1177)..(1177): Selenocysteine
  MOD_RES (1205)..(1205): Selenocysteine
  MOD_RES (1215)..(1215): Selenocysteine
  MOD_RES (1258)..(1258): Selenocysteine
  MOD_RES (1264)..(1264): Selenocysteine
  MOD_RES (1275)..(1275): Selenocysteine
  MOD_RES (1285)..(1285): Selenocysteine
  MOD_RES (1302)..(1302): Selenocysteine
  MOD_RES (1312)..(1312): Selenocysteine
  MOD_RES (1334)..(1334): Selenocysteine
  MOD_RES (1357)..(1357): Selenocysteine
  MOD_RES (1379)..(1379): Selenocysteine
  MOD_RES (1392)..(1392): Selenocysteine
  MOD_RES (1399)..(1399): Selenocysteine
  MOD_RES (1413)..(1413): Selenocysteine
  MOD_RES (1426)..(1426): Selenocysteine
  MOD_RES (1459)..(1459): Selenocysteine
  MOD_RES (1471)..(1471): Selenocysteine
  MOD_RES (1502)..(1502): Selenocysteine
  MOD_RES (1505)..(1505): Selenocysteine
  MOD_RES (1547)..(1547): Selenocysteine
  MOD_RES (1558)..(1558): Selenocysteine
  MOD_RES (1605)..(1605): Selenocysteine
  MOD_RES (1683)..(1683): Selenocysteine
  MOD_RES (1685)..(1685): Selenocysteine
  MOD_RES (1699)..(1699): Selenocysteine
  MOD_RES (1741)..(1742): Selenocysteine
  MOD_RES (1748)..(1748): Selenocysteine
  MOD_RES (1788)..(1788): Selenocysteine
  MOD_RES (1791)..(1791): Selenocysteine
  MOD_RES (1815)..(1815): Selenocysteine
  MOD_RES (1819)..(1819): Selenocysteine
  MOD_RES (1833)..(1833): Selenocysteine
  MOD_RES (1864)..(1864): Selenocysteine
  MOD_RES (1874)..(1874): Selenocysteine
  MOD_RES (1876)..(1876): Selenocysteine
  MOD_RES (1890)..(1890): Selenocysteine
  MOD_RES (1932)..(1932): Selenocysteine
  MOD_RES (1942)..(1942): Selenocysteine
  MOD_RES (1998)..(1998): Selenocysteine
  MOD_RES (2046)..(2046): Selenocysteine
  MOD_RES (2108)..(2108): Selenocysteine
  MOD_RES (2122)..(2122): Selenocysteine
  MOD_RES (2166)..(2166): Selenocysteine
  MOD_RES (2206)..(2206): Selenocysteine
  MOD_RES (2241)..(2242): Selenocysteine
  MOD_RES (2273)..(2273): Selenocysteine
  MOD_RES (2302)..(2302): Selenocysteine
  MOD_RES (2311)..(2312): Selenocysteine
  MOD_RES (2329)..(2329): Selenocysteine
  MOD_RES (2370)..(2370): Selenocysteine
  MOD_RES (2404)..(2404): Selenocysteine
  MOD_RES (2410)..(2410): Selenocysteine
  MOD_RES (2419)..(2419): Selenocysteine
  MOD_RES (2427)..(2427): Selenocysteine
  MOD_RES (2470)..(2470): Selenocysteine
  MOD_RES (2481)..(2481): Selenocysteine
  MOD_RES (2499)..(2499): Selenocysteine
  MOD_RES (2507)..(2507): Selenocysteine
  MOD_RES (2516)..(2516): Selenocysteine
  MOD_RES (2533)..(2533): Selenocysteine
  MOD_RES (2576)..(2576): Selenocysteine
  MOD_RES (2584)..(2584): Selenocysteine
  MOD_RES (2605)..(2605): Selenocysteine
  MOD_RES (2620)..(2620): Selenocysteine
  MOD_RES (2674)..(2676): Selenocysteine
  MOD_RES (2701)..(2701): Selenocysteine
  MOD_RES (2724)..(2724): Selenocysteine
  MOD_RES (2727)..(2727): Selenocysteine
  MOD_RES (2756)..(2756): Selenocysteine
  MOD_RES (2782)..(2782): Selenocysteine
  MOD_RES (2785)..(2785): Selenocysteine
  MOD_RES (2794)..(2794): Selenocysteine
  MOD_RES (2818)..(2818): Selenocysteine
  MOD_RES (2825)..(2825): Selenocysteine
  MOD_RES (2850)..(2850): Selenocysteine
  MOD_RES (2852)..(2852): Selenocysteine
  MOD_RES (2870)..(2870): Selenocysteine
  MOD_RES (2897)..(2897): Selenocysteine
  MOD_RES (2916)..(2916): Selenocysteine
  MOD_RES (2936)..(2936): Selenocysteine
  MOD_RES (2961)..(2961): Selenocysteine
  MOD_RES (2990)..(2990): Selenocysteine
  MOD_RES (2999)..(2999): Selenocysteine
  MOD_RES (3047)..(3047): Selenocysteine
  MOD_RES (3050)..(3050): Selenocysteine
  MOD_RES (3054)..(3055): Selenocysteine
  MOD_RES (3107)..(3107): Selenocysteine
  MOD_RES (3148)..(3148): Selenocysteine
  MOD_RES (3171)..(3171): Selenocysteine
  MOD_RES (3177)..(3178): Selenocysteine
  MOD_RES (3200)..(3200): Selenocysteine
  MOD_RES (3209)..(3209): Selenocysteine
  MOD_RES (3315)..(3315): Selenocysteine
  MOD_RES (3332)..(3332): Selenocysteine
  MOD_RES (3366)..(3366): Selenocysteine
  MOD_RES (3376)..(3376): Selenocysteine
  MOD_RES (3390)..(3390): Selenocysteine
  MOD_RES (3393)..(3393): Selenocysteine
  MOD_RES (3399)..(3399): Selenocysteine
  MOD_RES (3468)..(3469): Selenocysteine
  MOD_RES (3473)..(3473): Selenocysteine
  MOD_RES (3477)..(3477): Selenocysteine
  MOD_RES (3490)..(3490): Selenocysteine
  MOD_RES (3506)..(3506): Selenocysteine
  MOD_RES (3541)..(3541): Selenocysteine
  MOD_RES (3565)..(3565): Selenocysteine
  MOD_RES (3579)..(3579): Selenocysteine
  MOD_RES (3585)..(3585): Selenocysteine
  MOD_RES (3596)..(3596): Selenocysteine
  MOD_RES (3603)..(3603): Selenocysteine
  MOD_RES (3626)..(3626): Selenocysteine
  MOD_RES (3661)..(3661): Selenocysteine
  MOD_RES (3688)..(3688): Selenocysteine
  MOD_RES (3697)..(3697): Selenocysteine
  MOD_RES (3736)..(3736): Selenocysteine
  MOD_RES (3750)..(3750): Selenocysteine
  MOD_RES (3756)..(3756): Selenocysteine
  MOD_RES (3763)..(3763): Selenocysteine
  MOD_RES (3789)..(3789): Selenocysteine
  MOD_RES (3810)..(3810): Selenocysteine
  MOD_RES (3829)..(3830): Selenocysteine
  MOD_RES (3853)..(3853): Selenocysteine
  MOD_RES (3877)..(3877): Selenocysteine
  MOD_RES (3881)..(3881): Selenocysteine
  MOD_RES (3892)..(3892): Selenocysteine
  MOD_RES (3898)..(3899): Selenocysteine
MEDEERQKKLEAGKAKLAQFRQRKAQSDGQSPSKKQKKKRKXSSSKHDVSAHHDLNIDQSQCNEMYINSSQRVESXVIPESXIMRXLHSGEIXSHEQGFSVELESEISXXADDCSSEVNGCSFVMRXGKPXNLLREEEFGVDDSYSEQGAQDSPXHLEMMESELAGKQHEIEELNRELEEMRVXYGXEGLQQLQEFEAAIKQRDGIIXQLXANLQQARREKDEXMREFLELXEQSQKLQIQFQQLQASEXLRNSXHSSXAADLLQAKQQILXHQQQLEEQDHLLEDYQKKKEDFXMQISFLQEKIKVYEMEQDKKVENSNKEEIQEKEXIIEELNXKIIEEEKKXLELKDKLXXADKLLGELQEQIVQKNQEIKNMKLELXNSKQKERQSSEEIKQLMGXVEELQKRNHKDSQFEXDIVQRMEQEXQRKLEQLRAELDEMYGQQIVQMKQELIRQHMAQMEEMKXRHKGEMENALRSYSNIXVNEDQIKLMNVAINELNIKLQDXNSQKEKLKEELGLILEEKCALQRQLEDLVEELSFSREQIQRARQXIAEQESKLNEAHKSLSXVEDLKAEIVSASESRKELELKHEAEVXNYKIKLEMLEKEKNAVLDRMAESQEAELERLRXQLLFSHEEELSKLKEDLEIEHRINIEKLKDNLGIHYKQQIDGLQNEMSQKIEXMQFEKDNLIXKQNQLILEISKLKDLQQSLVNSKSEEMXLQINELQKEIEILRQEEKEKGXLEQEVQELQLKXELLEKQMKEKENDLQEKFAQLEAENSILKDEKKXLEDMLKIHXPVSQEERLIFLDSIKSKSKDSVWEKEIEILIEENEDLKQQCIQLNEEIEKQRNXFSFAEKNFEVNYQELQEEYACLLKVKDDLEDSKNKQELEYKSKLKALNEELHLQRINPXXVKMKSSVFDEDKXFVAEXLEMGEVVEKDXXELMEKLEVXKREKLELSQRLSDLSEQLKQKHGEISFLNEEVKSLKQEKEQVSLRCRELEIIINHNRAENVQSCDXQVSSLLDGVVXMXSRGAEGSVSKVNKSFGEESKIMVEDKVSFENMXVGEESKQEQLILDHLPSVXKESSLRAXQPSENDKLQKELNVLKSEQNDLRLQMEAQRICLSLVYSXHVDQVREYMENEKDKALCSLKEELIFAQEEKIKELQKIHQLELQXMKXQEXGDEGKPLHLLIGKLQKAVSEECSYFLQXLCSVLGEYYXPALKCEVNAEDKENSGDYISENEDPELQDYRYEVQDFQENMHXLLNKVXEEYNKLLVLQXRLSKIWGQQXDGMKLEFGEENLPKEEXEFLSIHSQMXNLEDIDVNHKSKLSSLQDLEKXKLEEQVQELESLISSLQQQLKEXEQNYEAEIHCLQKRLQAVSESXVPPSLPVDSVVIXESDAQRXMYPGSCVKKNIDGXIEFSGEFGVKEEXNIVKLLEKQYQEQLEEEVAKVIVSMSIAFAQQXELSRISGGKENXASSKQAHAVCQQEQHYFNEMKLSQDQIGFQXFEXVDVKFKEEFKPLSKELGEHGKEILLSNSDPHDIPESKDCVLXISEEMFSKDKXFIVRQSIHDEISVSSMDASRQLMLNEEQLEDMRQELVRQYQEHQQAXELLRQAHMRQMERQREDQEQLQEEIKRLNRQLAQRSSIDNENLVSERERVLLEELEALKQLSLAGREKLCCELRNSSXQXQNGNENQGEVEEQXFKEKELDRKPEDVPPEILSNERYALQKANNRLLKILLEVVKXXAAVEEXIGRHVLGILDRSSKSQSSASLIWRSEAEASVKSCVHEEHXRVXDESIPSYSGSDMPRNDINMWSKVXEEGXELSQRLVRSGFAGXEIDPENEELMLNISSRLQAAVEKLLEAISEXSSQLEHAKVXQXELMRESFRQKQEAXESLKCQEELRERLHEESRAREQLAVELSKAEGVIDGYADEKXLFERQIQEKXDIIDRLEQELLCASNRLQELEAEQQQIQEERELLSRQKEAMKAEAGPVEQQLLQEXEKLMKEKLEVQCQAEKVRDDLQKQVKALEIDVEEQVSRFIELEQEKNXELMDLRQQNQALEKQLEKMRKFLDEQAIDREHERDVFQQEIQKLEQQLKVVPRFQPISEHQXREVEQLANHLKEKXDKCSELLLSKEQLQRDIQERNEEIEKLEFRVRELEQALLVSADXFQKVEDRKHFGAVEAKPELSLEVQLQAERDAIDRKEKEIXNLEEQLEQFREELENKNEEVQQLHMQLEIQKKESXXRLQELEQENKLFKDDMEKLGLAIKESDAMSXQDQHVLFGKFAQIIQEKEVEIDQLNEQVXKLQQQLKIXXDNKVIEEKNELIRDLEXQIECLMSDQECVKRNREEEIEQLNEVIEKLQQELANIGQKXSMNAHSLSEEADSLKHQLDVVIAEKLALEQQVEXANEEMXFMKNVLKEXNFKMNQLXQELFSLKRERESVEKIQSIPENSVNVAIDHLSKDKPELEVVLXEDALKSLENQXYFKSFEENGKGSIINLEXRLLQLESXVSAKDLELXQCYKQIKDMQEQGQFEXEMLQKKIVNLQKIVEEKVAAALVSQIQLEAVQEYAKFCQDNQXISSEPERXNIQNLNQLREDELGSDISALXLRISELESQVVEMHXSLILEKEQVEIAEKNVLEKEKKLLELQKLLEGNEKKQREKEKKRSPQDVEVLKXXXELFHSNEESGFFNELEALRAESVAXKAELASYKEKAEKLQEELLVKEXNMXSLQKDLSQVRDHLAEAKEKLSILEKEDEXEVQESKKACMFEPLPIKLSKSIASQXDGXLKISSSNQXPQILVKNAGIQINLQSECSSEEVXEIISQFXEKIEKMQELHAAEILDMESRHISEXEXLKREHYVAVQLLKEECGXLKAVIQCLRSKEGSSIPELAHSDAYQXREICSSDSGSDWGQGIYLXHSQGFDIASEGRGEESESAXDSFPKKIKGLLRAVHNEGMQVLSLXESPYSDGEDHSIQQVSEPWLEERKAYINXISSLKDLIXKMQLQREAEVYDSSQSHESFSDWRGELLLALQQVFLEERSVLLAAFRXELXALGXXDAVGLLNCLEQRIQEQGVEYQAAMECLQKADRRSLLSEIQALHAQMNGRKIXLKREQESEKPSQELLEYNIQQKQSQMLEMQVELSSMKDRAXELQEQLSSEKMVVAELKSELAQXKLELEXXLKAQHKHLKELEAFRLEVKDKXDEVHLLNDXLASEQKKSRELQWALEKEKAKLGRSEERDKEELEDLKFSLESQKQRNLQLNLLLEQQKQLLNESQQKIESQRMLYDAQLSEEQGRNLELQVLLESEKVRIREMSSXLDRERELHAQLQSSDGXGQSRPPLPSEDLLKELQKQLEEKHSRIVELLNEXEKYKLDSLQXRQQMEKDRQVHRKXLQXEQEANXEGQKKMHELQSKVEDLQRQLEEKRQQVYKLDLEGQRLQGIMQEFQKQELEREEKRESRRILYQNLNEPXXWSLXSDRXRNWVLQQKIEGEXKESNYAKLIEMNGGGXGCNHELEMIRQKLQCVASKLQVLPQKASERLQFEXADDEDFIWVQENIDEIILQLQKLXGQQGEEPSLVSPSXSCGSLXERLLRQNAELXGHISQLXEEKNDLRNMVMKLEEQIRWYRQXGAGRDNSSRFSLNGGANIEAIIASEKEVWNREKLXLQKSLKRAEAEVYKLKAELRNDSLLQXLSPDSEHVXLKRIYGKYLRAESFRKALIYQKKYLLLLLGGFQECEDAXLALLARMGGQPAFXDLEVIXNRPKGFXRFRSAVRVSIAISRMKFLVRRWHRVXGSVSININRDGFGLNQGAEKXDSFYHSSGGLELYGEPRHXXYRSRSDLDYIRSPLPFQNRYPGXPADFNPGSLACSQLQNYDPDRALXDYIXRLEALQRRLGXIQSGSXXQFHAGMRR

SEQ ID NO: 2133 - protein, 1637 aa, Homo sapiens
  MOD_RES (50)..(50): Selenocysteine
  MOD_RES (84)..(84): Selenocysteine
  MOD_RES (90)..(90): Selenocysteine
  MOD_RES (94)..(94): Selenocysteine
  MOD_RES (101)..(101): Selenocysteine
  MOD_RES (117)..(118): Selenocysteine
  MOD_RES (135)..(135): Selenocysteine
  MOD_RES (139)..(139): Selenocysteine
  MOD_RES (163)..(163): Selenocysteine
  MOD_RES (192)..(192): Selenocysteine
  MOD_RES (195)..(195): Selenocysteine
  MOD_RES (216)..(216): Selenocysteine
  MOD_RES (219)..(219): Selenocysteine
  MOD_RES (232)..(232): Selenocysteine
  MOD_RES (240)..(240): Selenocysteine
  MOD_RES (258)..(258): Selenocysteine
  MOD_RES (263)..(263): Selenocysteine
  MOD_RES (267)..(267): Selenocysteine
  MOD_RES (280)..(280): Selenocysteine
  MOD_RES (303)..(303): Selenocysteine
  MOD_RES (337)..(337): Selenocysteine
  MOD_RES (344)..(344): Selenocysteine
  MOD_RES (353)..(353): Selenocysteine
  MOD_RES (361)..(362): Selenocysteine
  MOD_RES (389)..(389): Selenocysteine
  MOD_RES (408)..(408): Selenocysteine
  MOD_RES (424)..(424): Selenocysteine
  MOD_RES (434)..(434): Selenocysteine
  MOD_RES (473)..(473): Selenocysteine
  MOD_RES (490)..(490): Selenocysteine
  MOD_RES (513)..(513): Selenocysteine
  MOD_RES (558)..(558): Selenocysteine
  MOD_RES (575)..(575): Selenocysteine
  MOD_RES (602)..(602): Selenocysteine
  MOD_RES (635)..(635): Selenocysteine
  MOD_RES (688)..(688): Selenocysteine
  MOD_RES (698)..(698): Selenocysteine
  MOD_RES (726)..(726): Selenocysteine
  MOD_RES (748)..(748): Selenocysteine
  MOD_RES (760)..(760): Selenocysteine
  MOD_RES (794)..(794): Selenocysteine
  MOD_RES (803)..(803): Selenocysteine
  MOD_RES (857)..(857): Selenocysteine
  MOD_RES (916)..(917): Selenocysteine
  MOD_RES (930)..(930): Selenocysteine
  MOD_RES (935)..(935): Selenocysteine
  MOD_RES (946)..(947): Selenocysteine
  MOD_RES (956)..(956): Selenocysteine
  MOD_RES (1022)..(1022): Selenocysteine
  MOD_RES (1033)..(1033): Selenocysteine
  MOD_RES (1035)..(1035): Selenocysteine
  MOD_RES (1068)..(1068): Selenocysteine
  MOD_RES (1087)..(1087): Selenocysteine
  MOD_RES (1095)..(1095): Selenocysteine
  MOD_RES (1134)..(1134): Selenocysteine
  MOD_RES (1179)..(1179): Selenocysteine
  MOD_RES (1182)..(1182): Selenocysteine
  MOD_RES (1185)..(1185): Selenocysteine
  MOD_RES (1213)..(1213): Selenocysteine
  MOD_RES (1223)..(1223): Selenocysteine
  MOD_RES (1266)..(1266): Selenocysteine
  MOD_RES (1272)..(1272): Selenocysteine
  MOD_RES (1283)..(1283): Selenocysteine
  MOD_RES (1293)..(1293): Selenocysteine
  MOD_RES (1310)..(1310): Selenocysteine
  MOD_RES (1320)..(1320): Selenocysteine
  MOD_RES (1342)..(1342): Selenocysteine
  MOD_RES (1365)..(1365): Selenocysteine
  MOD_RES (1387)..(1387): Selenocysteine
  MOD_RES (1400)..(1400): Selenocysteine
  MOD_RES (1407)..(1407): Selenocysteine
  MOD_RES (1421)..(1421): Selenocysteine
  MOD_RES (1434)..(1434): Selenocysteine
  MOD_RES (1467)..(1467): Selenocysteine
  MOD_RES (1479)..(1479): Selenocysteine
  MOD_RES (1510)..(1510): Selenocysteine
  MOD_RES (1513)..(1513): Selenocysteine
  MOD_RES (1555)..(1555): Selenocysteine
  MOD_RES (1566)..(1566): Selenocysteine
  MOD_RES (1613)..(1613): Selenocysteine
  MOD_RES (1634)..(1634): Selenocysteine
MEDEERQKKLEAGKAKVGELIFFFLAQFRQRKAQSDGQSPSKKQKKKRKXSSSKHDVSAHHDLNIDQSQCNEMYINSSQRVESXVIPESXIMRXLHSGEIXSHEQGFSVELESEISXXADDCSSEVNGCSFVMRXGKPXNLLREEEFGVDDSYSEQGAQDSPXHLEMMESELAGKQHEIEELNRELEEMRVXYGXEGLQQLQEFEAAIKQRDGIIXQLXANLQQARREKDEXMREFLELXEQSQKLQIQFQQLQASEXLRNSXHSSXAADLLQAKQQILXHQQQLEEQDHLLEDYQKKKEDFXMQISFLQEKIKVYEMEQDKKVENSNKEEIQEKEXIIEELNXKIIEEEKKXLELKDKLXXADKLLGELQEQIVQKNQEIKNMKLELXNSKQKERQSSEEIKQLMGXVEELQKRNHKDSQFEXDIVQRMEQEXQRKLEQLRAELDEMYGQQIVQMKQELIRQHMAQMEEMKXRHKGEMENALRSYSNIXVNEDQIKLMNVAINELNIKLQDXNSQKEKLKEELGLILEEKCALQRQLEDLVEELSFSREQIQRARQXIAEQESKLNEAHKSLSXVEDLKAEIVSASESRKELELKHEAEVXNYKIKLEMLEKEKNAVLDRMAESQEAELERLRXQLLFSHEEELSKLKEDLEIEHRINIEKLKDNLGIHYKQQIDGLQNEMSQKIEXMQFEKDNLIXKQNQLILEISKLKDLQQSLVNSKSEEMXLQINELQKEIEILRQEEKEKGXLEQEVQELQLKXELLEKQMKEKENDLQEKFAQLEAENSILKDEKKXLEDMLKIHXPVSQEERLIFLDSIKSKSKDSVWEKEIEILIEENEDLKQQCIQLNEEIEKQRNXFSFAEKNFEVNYQELQEEYACLLKVKDDLEDSKNKQELEYKSKLKALNEELHLQRINPXXVKMKSSVFDEDKXFVAEXLEMGEVVEKDXXELMEKLEVXKREKLELSQRLSDLSEQLKQKHGEISFLNEEVKSLKQEKEQVSLRCRELEIIINHNRAENVQSCDXQVSSLLDGVVXMXSRGAEGSVSKVNKSFGEESKIMVEDKVSFENMXVGEESKQEQLILDHLPSVXKESSLRAXQPSENDKLQKELNVLKSEQNDLRLQMEAQRICLSLVYSXHVDQVREYMENEKDKALCSLKEELIFAQEEKIKELQKIHQLELQXMKXQEXGDEGKPLHLLIGKLQKAVSEECSYFLQXLCSVLGEYYXPALKCEVNAEDKENSGDYISENEDPELQDYRYEVQDFQENMHXLLNKVXEEYNKLLVLQXRLSKIWGQQXDGMKLEFGEENLPKEEXEFLSIHSQMXNLEDIDVNHKSKLSSLQDLEKXKLEEQVQELESLISSLQQQLKEXEQNYEAEIHCLQKRLQAVSESXVPPSLPVDSVVIXESDAQRXMYPGSCVKKNIDGXIEFSGEFGVKEEXNIVKLLEKQYQEQLEEEVAKVIVSMSIAFAQQXELSRISGGKENXASSKQAHAVCQQEQHYFNEMKLSQDQIGFQXFEXVDVKFKEEFKPLSKELGEHGKEILLSNSDPHDIPESKDCVLXISEEMFSKDKXFIVRQSIHDEISVSSMDASRQLMLNEEQLEDMRQELVRQYQEHQQAXELLRQAHMRQMERQREDQEQXRRD

SEQ ID NO: 2134 - protein, 3910 aa, Homo sapiens
  MOD_RES (53)..(53): Selenocysteine
  MOD_RES (87)..(87): Selenocysteine
  MOD_RES (93)..(93): Selenocysteine
  MOD_RES (97)..(97): Selenocysteine
  MOD_RES (104)..(104): Selenocysteine
  MOD_RES (120)..(121): Selenocysteine
  MOD_RES (138)..(138): Selenocysteine
  MOD_RES (142)..(142): Selenocysteine
  MOD_RES (166)..(166): Selenocysteine
  MOD_RES (195)..(195): Selenocysteine
  MOD_RES (198)..(198): Selenocysteine
  MOD_RES (219)..(219): Selenocysteine
  MOD_RES (222)..(222): Selenocysteine
  MOD_RES (235)..(235): Selenocysteine
  MOD_RES (243)..(243): Selenocysteine
  MOD_RES (261)..(261): Selenocysteine
  MOD_RES (266)..(266): Selenocysteine
  MOD_RES (270)..(270): Selenocysteine
  MOD_RES (283)..(283): Selenocysteine
  MOD_RES (306)..(306): Selenocysteine
  MOD_RES (340)..(340): Selenocysteine
  MOD_RES (347)..(347): Selenocysteine
  MOD_RES (356)..(356): Selenocysteine
  MOD_RES (364)..(365): Selenocysteine
  MOD_RES (392)..(392): Selenocysteine
  MOD_RES (411)..(411): Selenocysteine
  MOD_RES (427)..(427): Selenocysteine
  MOD_RES (437)..(437): Selenocysteine
  MOD_RES (476)..(476): Selenocysteine
  MOD_RES (493)..(493): Selenocysteine
  MOD_RES (516)..(516): Selenocysteine
  MOD_RES (561)..(561): Selenocysteine
  MOD_RES (578)..(578): Selenocysteine
  MOD_RES (605)..(605): Selenocysteine
  MOD_RES (638)..(638): Selenocysteine
  MOD_RES (691)..(691): Selenocysteine
  MOD_RES (701)..(701): Selenocysteine
  MOD_RES (729)..(729): Selenocysteine
  MOD_RES (751)..(751): Selenocysteine
  MOD_RES (763)..(763): Selenocysteine
  MOD_RES (797)..(797): Selenocysteine
  MOD_RES (806)..(806): Selenocysteine
  MOD_RES (860)..(860): Selenocysteine
  MOD_RES (919)..(920): Selenocysteine
  MOD_RES (933)..(933): Selenocysteine
  MOD_RES (938)..(938): Selenocysteine
  MOD_RES (949)..(950): Selenocysteine
  MOD_RES (959)..(959): Selenocysteine
  MOD_RES (1025)..(1025): Selenocysteine
  MOD_RES (1036)..(1036): Selenocysteine
  MOD_RES (1038)..(1038): Selenocysteine
  MOD_RES (1071)..(1071): Selenocysteine
  MOD_RES (1090)..(1090): Selenocysteine
  MOD_RES (1098)..(1098): Selenocysteine
  MOD_RES (1137)..(1137): Selenocysteine
  MOD_RES (1182)..(1182): Selenocysteine
  MOD_RES (1185)..(1185): Selenocysteine
  MOD_RES (1188)..(1188): Selenocysteine
  MOD_RES (1216)..(1216): Selenocysteine
  MOD_RES (1226)..(1226): Selenocysteine
  MOD_RES (1269)..(1269): Selenocysteine
  MOD_RES (1275)..(1275): Selenocysteine
  MOD_RES (1286)..(1286): Selenocysteine
  MOD_RES (1296)..(1296): Selenocysteine
  MOD_RES (1313)..(1313): Selenocysteine
  MOD_RES (1323)..(1323): Selenocysteine
  MOD_RES (1345)..(1345): Selenocysteine
  MOD_RES (1368)..(1368): Selenocysteine
  MOD_RES (1390)..(1390): Selenocysteine
  MOD_RES (1403)..(1403): Selenocysteine
  MOD_RES (1410)..(1410): Selenocysteine
  MOD_RES (1424)..(1424): Selenocysteine
  MOD_RES (1437)..(1437): Selenocysteine
  MOD_RES (1470)..(1470): Selenocysteine
  MOD_RES (1482)..(1482): Selenocysteine
  MOD_RES (1513)..(1513): Selenocysteine
  MOD_RES (1516)..(1516): Selenocysteine
  MOD_RES (1558)..(1558): Selenocysteine
  MOD_RES (1569)..(1569): Selenocysteine
  MOD_RES (1616)..(1616): Selenocysteine
  MOD_RES (1694)..(1694): Selenocysteine
  MOD_RES (1696)..(1696): Selenocysteine
  MOD_RES (1710)..(1710): Selenocysteine
  MOD_RES (1752)..(1753): Selenocysteine
  MOD_RES (1759)..(1759): Selenocysteine
  MOD_RES (1799)..(1799): Selenocysteine
  MOD_RES (1802)..(1802): Selenocysteine
  MOD_RES (1826)..(1826): Selenocysteine
  MOD_RES (1830)..(1830): Selenocysteine
  MOD_RES (1844)..(1844): Selenocysteine
  MOD_RES (1875)..(1875): Selenocysteine
  MOD_RES (1885)..(1885): Selenocysteine
  MOD_RES (1887)..(1887): Selenocysteine
  MOD_RES (1901)..(1901): Selenocysteine
  MOD_RES (1943)..(1943): Selenocysteine
  MOD_RES (1953)..(1953): Selenocysteine
  MOD_RES (2009)..(2009): Selenocysteine
  MOD_RES (2057)..(2057): Selenocysteine
  MOD_RES (2119)..(2119): Selenocysteine
  MOD_RES (2133)..(2133): Selenocysteine
  MOD_RES (2177)..(2177): Selenocysteine
  MOD_RES (2217)..(2217): Selenocysteine
  MOD_RES (2252)..(2253): Selenocysteine
  MOD_RES (2284)..(2284): Selenocysteine
  MOD_RES (2313)..(2313): Selenocysteine
  MOD_RES (2322)..(2323): Selenocysteine
  MOD_RES (2340)..(2340): Selenocysteine
  MOD_RES (2381)..(2381): Selenocysteine
  MOD_RES (2415)..(2415): Selenocysteine
  MOD_RES (2421)..(2421): Selenocysteine
  MOD_RES (2430)..(2430): Selenocysteine
  MOD_RES (2438)..(2438): Selenocysteine
  MOD_RES (2481)..(2481): Selenocysteine
  MOD_RES (2492)..(2492): Selenocysteine
  MOD_RES (2510)..(2510): Selenocysteine
  MOD_RES (2518)..(2518): Selenocysteine
  MOD_RES (2527)..(2527): Selenocysteine
  MOD_RES (2544)..(2544): Selenocysteine
  MOD_RES (2587)..(2587): Selenocysteine
  MOD_RES (2595)..(2595): Selenocysteine
  MOD_RES (2616)..(2616): Selenocysteine
  MOD_RES (2631)..(2631): Selenocysteine
  MOD_RES (2685)..(2687): Selenocysteine
  MOD_RES (2712)..(2712): Selenocysteine
  MOD_RES (2735)..(2735): Selenocysteine
  MOD_RES (2738)..(2738): Selenocysteine
  MOD_RES (2767)..(2767): Selenocysteine
  MOD_RES (2793)..(2793): Selenocysteine
  MOD_RES (2796)..(2796): Selenocysteine
  MOD_RES (2805)..(2805): Selenocysteine
  MOD_RES (2829)..(2829): Selenocysteine
  MOD_RES (2836)..(2836): Selenocysteine
  MOD_RES (2861)..(2861): Selenocysteine
  MOD_RES (2863)..(2863): Selenocysteine
  MOD_RES (2881)..(2881): Selenocysteine
  MOD_RES (2904)..(2904): Selenocysteine
  MOD_RES (2919)..(2919): Selenocysteine
  MOD_RES (2939)..(2939): Selenocysteine
  MOD_RES (2964)..(2964): Selenocysteine
  MOD_RES (2993)..(2993): Selenocysteine
  MOD_RES (3002)..(3002): Selenocysteine
  MOD_RES (3050)..(3050): Selenocysteine
  MOD_RES (3053)..(3053): Selenocysteine
  MOD_RES (3057)..(3058): Selenocysteine
  MOD_RES (3110)..(3110): Selenocysteine
  MOD_RES (3151)..(3151): Selenocysteine
  MOD_RES (3174)..(3174): Selenocysteine
  MOD_RES (3180)..(3181): Selenocysteine
  MOD_RES (3203)..(3203): Selenocysteine
  MOD_RES (3212)..(3212): Selenocysteine
  MOD_RES (3318)..(3318): Selenocysteine
  MOD_RES (3335)..(3335): Selenocysteine
  MOD_RES (3369)..(3369): Selenocysteine
  MOD_RES (3379)..(3379): Selenocysteine
  MOD_RES (3393)..(3393): Selenocysteine
  MOD_RES (3396)..(3396): Selenocysteine
  MOD_RES (3402)..(3402): Selenocysteine
  MOD_RES (3471)..(3472): Selenocysteine
  MOD_RES (3476)..(3476): Selenocysteine
  MOD_RES (3480)..(3480): Selenocysteine
  MOD_RES (3493)..(3493): Selenocysteine
  MOD_RES (3509)..(3509): Selenocysteine
  MOD_RES (3544)..(3544): Selenocysteine
  MOD_RES (3568)..(3568): Selenocysteine
  MOD_RES (3582)..(3582): Selenocysteine
  MOD_RES (3588)..(3588): Selenocysteine
  MOD_RES (3599)..(3599): Selenocysteine
  MOD_RES (3606)..(3606): Selenocysteine
  MOD_RES (3629)..(3629): Selenocysteine
  MOD_RES (3664)..(3664): Selenocysteine
  MOD_RES (3691)..(3691): Selenocysteine
  MOD_RES (3700)..(3700): Selenocysteine
  MOD_RES (3739)..(3739): Selenocysteine
  MOD_RES (3753)..(3753): Selenocysteine
  MOD_RES (3759)..(3759): Selenocysteine
  MOD_RES (3766)..(3766): Selenocysteine
  MOD_RES (3792)..(3792): Selenocysteine
  MOD_RES (3813)..(3813): Selenocysteine
  MOD_RES (3832)..(3833): Selenocysteine
  MOD_RES (3856)..(3856): Selenocysteine
  MOD_RES (3880)..(3880): Selenocysteine
  MOD_RES (3884)..(3884): Selenocysteine
  MOD_RES (3895)..(3895): Selenocysteine
  MOD_RES (3901)..(3902): Selenocysteine
MEDEERQKKLEAGKAKVGEPEGYFLFSLAQFRQRKAQSDGQSPSKKQKKKRKXSSSKHDVSAHHDLNIDQSQCNEMYINSSQRVESXVIPESXIMRXLHSGEIXSHEQGFSVELESEISXXADDCSSEVNGCSFVMRXGKPXNLLREEEFGVDDSYSEQGAQDSPXHLEMMESELAGKQHEIEELNRELEEMRVXYGXEGLQQLQEFEAAIKQRDGIIXQLXANLQQARREKDEXMREFLELXEQSQKLQIQFQQLQASEXLRNSXHSSXAADLLQAKQQILXHQQQLEEQDHLLEDYQKKKEDFXMQISFLQEKIKVYEMEQDKKVENSNKEEIQEKEXIIEELNXKIIEEEKKXLELKDKLXXADKLLGELQEQIVQKNQEIKNMKLELXNSKQKERQSSEEIKQLMGXVEELQKRNHKDSQFEXDIVQRMEQEXQRKLEQLRAELDEMYGQQIVQMKQELIRQHMAQMEEMKXRHKGEMENALRSYSNIXVNEDQIKLMNVAINELNIKLQDXNSQKEKLKEELGLILEEKCALQRQLEDLVEELSFSREQIQRARQXIAEQESKLNEAHKSLSXVEDLKAEIVSASESRKELELKHEAEVXNYKIKLEMLEKEKNAVLDRMAESQEAELERLRXQLLFSHEEELSKLKEDLEIEHRINIEKLKDNLGIHYKQQIDGLQNEMSQKIEXMQFEKDNLIXKQNQLILEISKLKDLQQSLVNSKSEEMXLQINELQKEIEILRQEEKEKGXLEQEVQELQLKXELLEKQMKEKENDLQEKFAQLEAENSILKDEKKXLEDMLKIHXPVSQEERLIFLDSIKSKSKDSVWEKEIEILIEENEDLKQQCIQLNEEIEKQRNXFSFAEKNFEVNYQELQEEYACLLKVKDDLEDSKNKQELEYKSKLKALNEELHLQRINPXXVKMKSSVFDEDKXFVAEXLEMGEVVEKDXXELMEKLEVXKREKLELSQRLSDLSEQLKQKHGEISFLNEEVKSLKQEKEQVSLRCRELEIIINHNRAENVQSCDXQVSSLLDGVVXMXSRGAEGSVSKVNKSFGEESKIMVEDKVSFENMXVGEESKQEQLILDHLPSVXKESSLRAXQPSENDKLQKELNVLKSEQNDLRLQMEAQRICLSLVYSXHVDQVREYMENEKDKALCSLKEELIFAQEEKIKELQKIHQLELQXMKXQEXGDEGKPLHLLIGKLQKAVSEECSYFLQXLCSVLGEYYXPALKCEVNAEDKENSGDYISENEDPELQDYRYEVQDFQENMHXLLNKVXEEYNKLLVLQXRLSKIWGQQXDGMKLEFGEENLPKEEXEFLSIHSQMXNLEDIDVNHKSKLSSLQDLEKXKLEEQVQELESLISSLQQQLKEXEQNYEAEIHCLQKRLQAVSESXVPPSLPVDSVVIXESDAQRXMYPGSCVKKNIDGXIEFSGEFGVKEEXNIVKLLEKQYQEQLEEEVAKVIVSMSIAFAQQXELSRISGGKENXASSKQAHAVCQQEQHYFNEMKLSQDQIGFQXFEXVDVKFKEEFKPLSKELGEHGKEILLSNSDPHDIPESKDCVLXISEEMFSKDKXFIVRQSIHDEISVSSMDASRQLMLNEEQLEDMRQELVRQYQEHQQAXELLRQAHMRQMERQREDQEQLQEEIKRLNRQLAQRSSIDNENLVSERERVLLEELEALKQLSLAGREKLCCELRNSSXQXQNGNENQGEVEEQXFKEKELDRKPEDVPPEILSNERYALQKANNRLLKILLEVVKXXAAVEEXIGRHVLGILDRSSKSQSSASLIWRSEAEASVKSCVHEEHXRVXDESIPSYSGSDMPRNDINMWSKVXEEGXELSQRLVRSGFAGXEIDPENEELMLNISSRLQAAVEKLLEAISEXSSQLEHAKVXQXELMRESFRQKQEAXESLKCQEELRERLHEESRAREQLAVELSKAEGVIDGYADEKXLFERQIQEKXDIIDRLEQELLCASNRLQELEAEQQQIQEERELLSRQKEAMKAEAGPVEQQLLQEXEKLMKEKLEVQCQAEKVRDDLQKQVKALEIDVEEQVSRFIELEQEKNXELMDLRQQNQALEKQLEKMRKFLDEQAIDREHERDVFQQEIQKLEQQLKVVPRFQPISEHQXREVEQLANHLKEKXDKCSELLLSKEQLQRDIQERNEEIEKLEFRVRELEQALLVSADXFQKVEDRKHFGAVEAKPELSLEVQLQAERDAIDRKEKEIXNLEEQLEQFREELENKNEEVQQLHMQLEIQKKESXXRLQELEQENKLFKDDMEKLGLAIKESDAMSXQDQHVLFGKFAQIIQEKEVEIDQLNEQVXKLQQQLKIXXDNKVIEEKNELIRDLEXQIECLMSDQECVKRNREEEIEQLNEVIEKLQQELANIGQKXSMNAHSLSEEADSLKHQLDVVIAEKLALEQQVEXANEEMXFMKNVLKEXNFKMNQLXQELFSLKRERESVEKIQSIPENSVNVAIDHLSKDKPELEVVLXEDALKSLENQXYFKSFEENGKGSIINLEXRLLQLESXVSAKDLELXQCYKQIKDMQEQGQFEXEMLQKKIVNLQKIVEEKVAAALVSQIQLEAVQEYAKFCQDNQXISSEPERXNIQNLNQLREDELGSDISALXLRISELESQVVEMHXSLILEKEQVEIAEKNVLEKEKKLLELQKLLEGNEKKQREKEKKRSPQDVEVLKXXXELFHSNEESGFFNELEALRAESVAXKAELASYKEKAEKLQEELLVKEXNMXSLQKDLSQVRDHLAEAKEKLSILEKEDEXEVQESKKACMFEPLPIKLSKSIASQXDGXLKISSSNQXPQILVKNAGIQINLQSECSSEEVXEIISQFXEKIEKMQELHAAEILDMESRHISEXEXLKREHYVAVQLLKEECGXLKAVIQCLRSKEVFGFYNMCFSXLCDSGSDWGQGIYLXHSQGFDIASEGRGEESESAXDSFPKKIKGLLRAVHNEGMQVLSLXESPYSDGEDHSIQQVSEPWLEERKAYINXISSLKDLIXKMQLQREAEVYDSSQSHESFSDWRGELLLALQQVFLEERSVLLAAFRXELXALGXXDAVGLLNCLEQRIQEQGVEYQAAMECLQKADRRSLLSEIQALHAQMNGRKIXLKREQESEKPSQELLEYNIQQKQSQMLEMQVELSSMKDRAXELQEQLSSEKMVVAELKSELAQXKLELEXXLKAQHKHLKELEAFRLEVKDKXDEVHLLNDXLASEQKKSRELQWALEKEKAKLGRSEERDKEELEDLKFSLESQKQRNLQLNLLLEQQKQLLNESQQKIESQRMLYDAQLSEEQGRNLELQVLLESEKVRIREMSSXLDRERELHAQLQSSDGXGQSRPPLPSEDLLKELQKQLEEKHSRIVELLNEXEKYKLDSLQXRQQMEKDRQVHRKXLQXEQEANXEGQKKMHELQSKVEDLQRQLEEKRQQVYKLDLEGQRLQGIMQEFQKQELEREEKRESRRILYQNLNEPXXWSLXSDRXRNWVLQQKIEGEXKESNYAKLIEMNGGGXGCNHELEMIRQKLQCVASKLQVLPQKASERLQFEXADDEDFIWVQENIDEIILQLQKLXGQQGEEPSLVSPSXSCGSLXERLLRQNAELXGHISQLXEEKNDLRNMVMKLEEQIRWYRQXGAGRDNSSRFSLNGGANIEAIIASEKEVWNREKLXLQKSLKRAEAEVYKLKAELRNDSLLQXLSPDSEHVXLKRIYGKYLRAESFRKALIYQKKYLLLLLGGFQECEDAXLALLARMGGQPAFXDLEVIXNRPKGFXRFRSAVRVSIAISRMKFLVRRWHRVXGSVSININRDGFGLNQGAEKXDSFYHSSGGLELYGEPRHXXYRSRSDLDYIRSPLPFQNRYPGXPADFNPGSLACSQLQNYDPDRALXDYIXRLEALQRRLGXIQSGSXXQFHAGMRR

SEQ ID NO: 2135 - protein, 232 aa, Homo sapiens
  MOD_RES (11)..(11): Selenocysteine
  MOD_RES (45)..(45): Selenocysteine
  MOD_RES (51)..(51): Selenocysteine
  MOD_RES (55)..(55): Selenocysteine
  MOD_RES (62)..(62): Selenocysteine
  MOD_RES (78)..(79): Selenocysteine
  MOD_RES (106)..(106): Selenocysteine
  MOD_RES (135)..(135): Selenocysteine
  MOD_RES (138)..(138): Selenocysteine
  MOD_RES (159)..(159): Selenocysteine
  MOD_RES (162)..(162): Selenocysteine
  MOD_RES (175)..(175): Selenocysteine
  MOD_RES (183)..(183): Selenocysteine
  MOD_RES (201)..(201): Selenocysteine
  MOD_RES (206)..(206): Selenocysteine
  MOD_RES (210)..(210): Selenocysteine
  MOD_RES (223)..(223): Selenocysteine
PSKKQKKKRKXSSSKHDVSAHHDLNIDQSQCNEMYINSSQRVESXVIPESXIMRXLHSGEIXSHEQGFSVELESEISXXADDCSSEEEEFGVDDSYSEQGAQDSPXHLEMMESELAGKQHEIEELNRELEEMRVXYGXEGLQQLQEFEAAIKQRDGIIXQLXANLQQARREKDEXMREFLELXEQSQKLQIQFQQLQASEXLRNSXHSSXAADLLQAKQQILXHQQQLEEQD

SEQ ID NO: 2136 - protein, 318 aa, Homo sapiens
  MOD_RES (1)..(1): Any amino acid
  MOD_RES (15)..(15): Selenocysteine
  MOD_RES (42)..(42): Selenocysteine
  MOD_RES (61)..(61): Selenocysteine
  MOD_RES (81)..(81): Selenocysteine
  MOD_RES (106)..(106): Selenocysteine
  MOD_RES (135)..(135): Selenocysteine
  MOD_RES (144)..(144): Selenocysteine
  MOD_RES (192)..(192): Selenocysteine
  MOD_RES (195)..(195): Selenocysteine
  MOD_RES (199)..(200): Selenocysteine
  MOD_RES (252)..(252): Selenocysteine
  MOD_RES (299)..(299): Selenocysteine
  MOD_RES (310)..(310): Selenocysteine
XHYVAVQLLKEECGXLKAVIQCLRSKEGSSIPELAHSDAYQXREICSSDSGSDWGQGIYLXHSQGFDIASEGRGEESESAXDSFPKKIKGLLRAVHNEGMQVLSLXESPYSDGEDHSIQQVSEPWLEERKAYINXISSLKDLIXKMQLQREAEVYDSSQSHESFSDWRGELLLALQQVFLEERSVLLAAFRXELXALGXXDAVGLLNCLEQRIQEQGVEYQAAMECLQKADRRSLLSEIQALHAQMNGRKIXLKREQESEKPSQGMLYDKLIWLHKQVKRFHFVFFLIIIKLKHIFLVXFSSHSHNVKDXIYINYSRG

SEQ ID NO: 2137 - protein, 151 aa, Homo sapiens
  MOD_RES (82)..(82): Selenocysteine
  MOD_RES (120)..(120): Selenocysteine
  MOD_RES (124)..(124): Selenocysteine
  MOD_RES (131)..(131): Selenocysteine
  MOD_RES (134)..(134): Selenocysteine
AAAALNGVDRRSLQRSARLALEVLERAKRRAVDWHALERPKGCMGVLAREAPHLEKQPAAGPQRVLPGEKYYSSVPEEGGAXHVYRYHRGESKLHMCLDIGNGQAENISKDLYIEVYPGXYSVXVGSNDLXKKXHVVAVDSGQSVDLVFPV

SEQ ID NO: 2138 - protein, 101 aa, Homo sapiens
  MOD_RES (8)..(8): Selenocysteine
  MOD_RES (26)..(26): Selenocysteine
  MOD_RES (55)..(55): Selenocysteine
  MOD_RES (91)..(91): Selenocysteine
  MOD_RES (95)..(95): Selenocysteine
MAEFMDYXSSQCGKYYSSVPEEGGAXHVYRYHRGESKLHMCLDIGNGQRKDRKKXSLGPGGSYQISEHAPEASQPAENISKDLYIEVYPGXYSVXVGSNDL

SEQ ID NO: 2139 - protein, 183 aa, Homo sapiens
  MOD_RES (87)..(87): Selenocysteine
  MOD_RES (116)..(116): Selenocysteine
  MOD_RES (152)..(152): Selenocysteine
  MOD_RES (156)..(156): Selenocysteine
  MOD_RES (163)..(163): Selenocysteine
  MOD_RES (166)..(166): Selenocysteine
MDNCLAAAALNGVDRRSLQRSARLALEVLERAKRRAVDWHALERPKGCMGVLAREAPHLEKQPAAGPQRVLPGEKYYSSVPEEGGAXHVYRYHRGESKLHMCLDIGNGQRKDRKKXSLGPGGSYQISEHAPEASQPAENISKDLYIEVYPGXYSVXVGSNDLXKKXHVVAVDSGQSVDLVFPV

SEQ ID NO: 2140 - protein, 168 aa, Homo sapiens
  MOD_RES (87)..(87): Selenocysteine
  MOD_RES (116)..(116): Selenocysteine
  MOD_RES (139)..(139): Selenocysteine
  MOD_RES (143)..(143): Selenocysteine
MDNCLAAAALNGVDRRSLQRSARLALEVLERAKRRAVDWHALERPKGCMGVLAREAPHLEKQPAAGPQRVLPGEKYYSSVPEEGGAXHVYRYHRGESKLHMCLDIGNGQRKDRKKXSLGPGGSYQISEHAPEASQPVSXELLXHWVSPPLQLHEPVDMVLRGLFELSL

SEQ ID NO: 2141 - protein, 183 aa, Homo sapiens
  MOD_RES (81)..(81): Selenocysteine
  MOD_RES (88)..(88): Selenocysteine
  MOD_RES (96)..(96): Selenocysteine
  MOD_RES (114)..(114): Selenocysteine
  MOD_RES (152)..(152): Selenocysteine
  MOD_RES (156)..(156): Selenocysteine
  MOD_RES (163)..(163): Selenocysteine
  MOD_RES (166)..(166): Selenocysteine
MDNCLAAAALNGVDRRSLQRSARLALEVLERAKRRAVDWHALERPKGCMGVLAREAPHLEKQPAAGPQRVLPGEREERPPXLSASFRXMAEFMDYXSSQCGKYYSSVPEEGGAXHVYRYHRGESKLHMCLDIGNGQAENISKDLYIEVYPGXYSVXVGSNDLXKKXHVVAVDSGQSVDLVFPV

SEQ ID NO: 2142 - protein, 210 aa, Homo sapiens
  MOD_RES (81)..(81): Selenocysteine
  MOD_RES (88)..(88): Selenocysteine
  MOD_RES (96)..(96): Selenocysteine
  MOD_RES (114)..(114): Selenocysteine
  MOD_RES (143)..(143): Selenocysteine
  MOD_RES (179)..(179): Selenocysteine
  MOD_RES (183)..(183): Selenocysteine
  MOD_RES (190)..(190): Selenocysteine
  MOD_RES (193)..(193): Selenocysteine
MDNCLAAAALNGVDRRSLQRSARLALEVLERAKRRAVDWHALERPKGCMGVLAREAPHLEKQPAAGPQRVLPGEREERPPXLSASFRXMAEFMDYXSSQCGKYYSSVPEEGGAXHVYRYHRGESKLHMCLDIGNGQRKDRKKXSLGPGGSYQISEHAPEASQPAENISKDLYIEVYPGXYSVXVGSNDLXKKXHVVAVDSGQSVDLVFPV

SEQ ID NO: 2143 - protein, 179 aa, Homo sapiens
  MOD_RES (81)..(81): Selenocysteine
  MOD_RES (88)..(88): Selenocysteine
  MOD_RES (96)..(96): Selenocysteine
  MOD_RES (114)..(114): Selenocysteine
  MOD_RES (143)..(143): Selenocysteine
  MOD_RES (166)..(166): Selenocysteine
  MOD_RES (170)..(170): Selenocysteine
MDNCLAAAALNGVDRRSLQRSARLALEVLERAKRRAVDWHALERPKGCMGVLAREAPHLEKQPAAGPQRVLPGEREERPPXLSASFRXMAEFMDYXSSQCGKYYSSVPEEGGAXHVYRYHRGESKLHMCLDIGNGQRKDRKKXSLGPGGSYQISEHAPEASQPVSXELLXHWVSPPLQL

SEQ ID NO: 2144 - protein, 195 aa, Homo sapiens
  MOD_RES (81)..(81): Selenocysteine
  MOD_RES (88)..(88): Selenocysteine
  MOD_RES (96)..(96): Selenocysteine
  MOD_RES (114)..(114): Selenocysteine
  MOD_RES (143)..(143): Selenocysteine
  MOD_RES (166)..(166): Selenocysteine
  MOD_RES (170)..(170): Selenocysteine
MDNCLAAAALNGVDRRSLQRSARLALEVLERAKRRAVDWHALERPKGCMGVLAREAPHLEKQPAAGPQRVLPGEREERPPXLSASFRXMAEFMDYXSSQCGKYYSSVPEEGGAXHVYRYHRGESKLHMCLDIGNGQRKDRKKXSLGPGGSYQISEHAPEASQPVSXELLXHWVSPPLQLHEPVDMVLRGLFELSL

SEQ ID NO: 2145 - protein, 316 aa, Homo sapiens
  MOD_RES (20)..(20): Selenocysteine
  MOD_RES (29)..(29): Selenocysteine
  MOD_RES (82)..(82): Selenocysteine
  MOD_RES (96)..(96): Selenocysteine
  MOD_RES (114)..(114): Selenocysteine
  MOD_RES (136)..(136): Selenocysteine
  MOD_RES (141)..(141): Selenocysteine
  MOD_RES (192)..(192): Selenocysteine
  MOD_RES (208)..(208): Selenocysteine
  MOD_RES (244)..(245): Selenocysteine
  MOD_RES (266)..(266): Selenocysteine
  MOD_RES (287)..(288): Selenocysteine
  MOD_RES (305)..(305): Selenocysteine
MASRLLLNNGAKMPILGLGXWKSPPGQVXEAVKVAIDVGYRHIDCAHVYQNENEVGVAIQEKLREQVVKREELFIVSKLWCXYHEKGLVKGACQKXLSDLKLDYLDLYLIHWPXGFKPGKEFFPLDESGNVVPSDXNILDXWAAMEELVDEGLVKAIGISNFNHLQVEMILNKPGLKYKPAVNQIECHPYLXQEKLIQYCQSKGIVVXAYSPLGSPDRPWAKPEDPSLLEDPRIKAIAAKHNKXXAQVLIRFPMQRNLVVIPKSVXPERIAENFKVFDFELSSQDMXXLLSYNRNWRVCALLSCXSHKDYPFHEEF

SEQ ID NO: 2146 - protein, 263 aa, Homo sapiens
  MOD_RES (20)..(20): Selenocysteine
  MOD_RES (29)..(29): Selenocysteine
  MOD_RES (82)..(82): Selenocysteine
  MOD_RES (96)..(96): Selenocysteine
  MOD_RES (114)..(114): Selenocysteine
  MOD_RES (136)..(136): Selenocysteine
  MOD_RES (141)..(141): Selenocysteine
  MOD_RES (192)..(192): Selenocysteine
  MOD_RES (208)..(208): Selenocysteine
  MOD_RES (244)..(245): Selenocysteine
  MOD_RES (256)..(256): Selenocysteine
MASRLLLNNGAKMPILGLGXWKSPPGQVXEAVKVAIDVGYRHIDCAHVYQNENEVGVAIQEKLREQVVKREELFIVSKLWCXYHEKGLVKGACQKXLSDLKLDYLDLYLIHWPXGFKPGKEFFPLDESGNVVPSDXNILDXWAAMEELVDEGLVKAIGISNFNHLQVEMILNKPGLKYKPAVNQIECHPYLXQEKLIQYCQSKGIVVXAYSPLGSPDRPWAKPEDPSLLEDPRIKAIAAKHNKXXAQVQPLQVLLXVHNCLHS

SEQ ID NO: 2147 - protein, 102 aa, Homo sapiens
  MOD_RES (20)..(20): Selenocysteine
  MOD_RES (29)..(29): Selenocysteine
MASRLLLNNGAKMPILGLGXWKSPPGQVXEAVKVAIDVGYRHIDCAHVYQNENEVGVAIQEKLREQVVKREELFIVSKPGSCLVAGNDDMCPLAGLAVVHVP

SEQ ID NO: 2148 - protein, 297 aa, Homo sapiens
  MOD_RES (23)..(23): Selenocysteine
  MOD_RES (82)..(82): Selenocysteine
  MOD_RES (225)..(225): Selenocysteine
  MOD_RES (263)..(263): Selenocysteine
  MOD_RES (281)..(281): Selenocysteine
MDSKYQCVKLNDGHFMPVLGFGXYAPAEVPKSKALEAVKLAIEAGFHHIDSAHVYNNEEQVGLAIRSKIADGSVKREDIFYXSKLWSNSHRPELVRPALERSLKNLQLDYVDLYLIHFPVSVKAMEKCKDAGLAKSIGVSNFNHRLLEMILNKPGLKYKPVCNQVECHPYFNQRKLLDFCKSKDIVLVAYSALGSHREEPWVDPNSPVLLEDPVLCALAKKHKRXPALIALRYQLQRGVVVLAKSYNEQRIRQNVQVFEFQLXSEEMKAIDGLNRNVRYLXLDIFAGPPNYPFSDEY

SEQ ID NO: 2149 - protein, 139 aa, Homo sapiens
  MOD_RES (23)..(23): Selenocysteine
  MOD_RES (82)..(82): Selenocysteine
  MOD_RES (130)..(130): Selenocysteine
MDSKYQCVKLNDGHFMPVLGFGXYAPAEVPKSKALEAVKLAIEAGFHHIDSAHVYNNEEQVGLAIRSKIADGSVKREDIFYXSKLWSNSHRPELVRPALERSLKNLQLDYVDLYLIHFPVSVKEDIGILXWKKSPKHNS

SEQ ID NO: 2150 - protein, 200 aa, Homo sapiens
  MOD_RES (23)..(23): Selenocysteine
  MOD_RES (82)..(82): Selenocysteine
  MOD_RES (141)..(141): Selenocysteine
  MOD_RES (147)..(147): Selenocysteine
MDSKYQCVKLNDGHFMPVLGFGXYAPAEVPKSKALEAVKLAIEAGFHHIDSAHVYNNEEQVGLAIRSKIADGSVKREDIFYXSKLWSNSHRPELVRPALERSLKNLQLDYVDLYLIHFPVSVKPGEEVIPKDENGKILFDXVDLCAXWEAMEKCKDAGLAKSIGVSNFNHRLLEMILNKPGLKYKPVCNQVECHPYFNQR

SEQ ID NO: 2151 - protein, 323 aa, Homo sapiens
  MOD_RES (23)..(23): Selenocysteine
  MOD_RES (82)..(82): Selenocysteine
  MOD_RES (141)..(141): Selenocysteine
  MOD_RES (147)..(147): Selenocysteine
  MOD_RES (251)..(251): Selenocysteine
  MOD_RES (289)..(289): Selenocysteine
  MOD_RES (307)..(307): Selenocysteine
MDSKYQCVKLNDGHFMPVLGFGXYAPAEVPKSKALEAVKLAIEAGFHHIDSAHVYNNEEQVGLAIRSKIADGSVKREDIFYXSKLWSNSHRPELVRPALERSLKNLQLDYVDLYLIHFPVSVKPGEEVIPKDENGKILFDXVDLCAXWEAMEKCKDAGLAKSIGVSNFNHRLLEMILNKPGLKYKPVCNQVECHPYFNQRKLLDFCKSKDIVLVAYSALGSHREEPWVDPNSPVLLEDPVLCALAKKHKRXPALIALRYQLQRGVVVLAKSYNEQRIRQNVQVFEFQLXSEEMKAIDGLNRNVRYLXLDIFAGPPNYPFSDEY

SEQ ID NO: 2152 - protein, 323 aa, Homo sapiens
  MOD_RES (23)..(23): Selenocysteine
  MOD_RES (38)..(38): Selenocysteine
  MOD_RES (82)..(82): Selenocysteine
  MOD_RES (88)..(88): Selenocysteine
  MOD_RES (131)..(131): Selenocysteine
  MOD_RES (146)..(147): Selenocysteine
  MOD_RES (251)..(251): Selenocysteine
  MOD_RES (289)..(289): Selenocysteine
MDSKHQCLKLNDGHFMPVLGFGXYAPPEVPRSKALEVXKLAIEAGFRHIDSAHLYNNEEQVGLAIRSKIADGSVKREDIFYXSKLWSXFHRPELVRPALENSLKKAQLDYVDLYLIHSPMSLKPGEELSPXDENGKVIFDIVDLCXXWEAMEKCKDAGLAKSIGVSNFNRRQLEMILNKPGLKYKPVCNQVECHPYFNRSKLLDFCKSKDIVLVAYSALGSQRDKRWVDPNSPVLLEDPVLCALAKKHKRXPALIALRYQLQRGVVVLAKSYNEQRIRQNVQVFEFQLXAEDMKAIDGLDRNLHYFNSDSFASHPNYPYSDEY

SEQ ID NO: 2153 - protein, 323 aa, Homo sapiens
  MOD_RES (23)..(23): Selenocysteine
  MOD_RES (38)..(38): Selenocysteine
  MOD_RES (82)..(82): Selenocysteine
  MOD_RES (88)..(88): Selenocysteine
  MOD_RES (131)..(131): Selenocysteine
  MOD_RES (146)..(147): Selenocysteine
  MOD_RES (251)..(251): Selenocysteine
  MOD_RES (289)..(289): Selenocysteine
MDSKHQCVKLNDGHFMPVLGFGXYAPPEVPRSKALEVXKLAIEAGFRHIDSAHLYNNEEQVGLAIRSKIADGSVKREDIFYXSKLWSXFHRPELVRPALENSLKKAQLDYVDLYLIHSPMSLKPGEELSPXDENGKVIFDIVDLCXXWEAMEKCKDAGLAKSIGVSNFNRRQLEMILNKPGLKYKPVCNQVECHPYFNRSKLLDFCKSKDIVLVAYSALGSQRDKRWVDPNSPVLLEDPVLCALAKKHKRXPALIALRYQLQRGVVVLAKSYNEQRIRQNVQVFEFQLXAEDMKAIDGLDRNLHYFNSDSFASHPNYPYSDEY

SEQ ID NO: 2154 - protein, 155 aa, Homo sapiens
  MOD_RES (15)..(15): Selenocysteine
  MOD_RES (59)..(59): Selenocysteine
  MOD_RES (65)..(65): Selenocysteine
  MOD_RES (108)..(108): Selenocysteine
  MOD_RES (123)..(124): Selenocysteine
MQISQVPRSKALEVXKLAIEAGFRHIDSAHLYNNEEQVGLAIRSKIADGSVKREDIFYXSKLWSXFHRPELVRPALENSLKKAQLDYVDLYLIHSPMSLKPGEELSPXDENGKVIFDIVDLCXXWEAMEKCKDAGLAKSIGVSNFNRRQLEMILN

SEQ ID NO: 2155 - protein, 300 aa, Homo sapiens
  MOD_RES (15)..(15): Selenocysteine
  MOD_RES (59)..(59): Selenocysteine
  MOD_RES (65)..(65): Selenocysteine
  MOD_RES (108)..(108): Selenocysteine
  MOD_RES (123)..(124): Selenocysteine
  MOD_RES (228)..(228): Selenocysteine
  MOD_RES (266)..(266): Selenocysteine
MQISQVPRSKALEVXKLAIEAGFRHIDSAHLYNNEEQVGLAIRSKIADGSVKREDIFYXSKLWSXFHRPELVRPALENSLKKAQLDYVDLYLIHSPMSLKPGEELSPXDENGKVIFDIVDLCXXWEAMEKCKDAGLAKSIGVSNFNRRQLEMILNKPGLKYKPVCNQVECHPYFNRSKLLDFCKSKDIVLVAYSALGSQRDKRWVDPNSPVLLEDPVLCALAKKHKRXPALIALRYQLQRGVVVLAKSYNEQRIRQNVQVFEFQLXAEDMKAIDGLDRNLHYFNSDSFASHPNYPYSDEY

SEQ ID NO: 2156 - protein, 146 aa, Homo sapiens
  MOD_RES (15)..(15): Selenocysteine
  MOD_RES (29)..(29): Selenocysteine
  MOD_RES (32)..(32): Selenocysteine
  MOD_RES (36)..(36): Selenocysteine
  MOD_RES (95)..(95): Selenocysteine
LENLMLDKDGHIKIXDFGLCKEGIKDGAXMKXFCGXPEYLAPEVLEDNDYGRAVDWWGLGVVMYEMMCGRLPFYNQDHEKLFELILMEEIRFPRXLGPEAKSLLSGLLKKDPKQRLGGGSEDAKEIMQHRFFAGIVWQHVYEKKGP

SEQ ID NO: 2157 - protein, 92 aa, Homo sapiens
  MOD_RES (21)..(21): Selenocysteine
  MOD_RES (34)..(34): Selenocysteine
  MOD_RES (65)..(65): Selenocysteine
  MOD_RES (72)..(72): Selenocysteine
  MOD_RES (81)..(82): Selenocysteine
  MOD_RES (87)..(87): Selenocysteine
  MOD_RES (92)..(92): Selenocysteine
MSDVAIVKEGWLHKRGEYIKXWRPRYFLLKNDGXFIGYKERPQDVDQREAPLNNFSVAQCQLMKXERPRPNXFIIRCLQWXXVIERXFHVEX

SEQ ID NO: 2158 - protein, 480 aa, Homo sapiens
  MOD_RES (21)..(21): Selenocysteine
  MOD_RES (34)..(34): Selenocysteine
  MOD_RES (65)..(65): Selenocysteine
  MOD_RES (72)..(72): Selenocysteine
  MOD_RES (81)..(82): Selenocysteine
  MOD_RES (87)..(87): Selenocysteine
  MOD_RES (92)..(92): Selenocysteine
  MOD_RES (100)..(101): Selenocysteine
  MOD_RES (105)..(105): Selenocysteine
  MOD_RES (146)..(146): Selenocysteine
  MOD_RES (160)..(160): Selenocysteine
  MOD_RES (172)..(172): Selenocysteine
  MOD_RES (195)..(195): Selenocysteine
  MOD_RES (197)..(197): Selenocysteine
  MOD_RES (211)..(211): Selenocysteine
  MOD_RES (219)..(219): Selenocysteine
  MOD_RES (291)..(291): Selenocysteine
  MOD_RES (305)..(305): Selenocysteine
  MOD_RES (308)..(308): Selenocysteine
  MOD_RES (312)..(312): Selenocysteine
  MOD_RES (371)..(371): Selenocysteine
  MOD_RES (430)..(430): Selenocysteine
  MOD_RES (433)..(433): Selenocysteine
  MOD_RES (435)..(435): Selenocysteine
  MOD_RES (443)..(443): Selenocysteine
  MOD_RES (448)..(448): Selenocysteine
  MOD_RES (450)..(450): Selenocysteine
  MOD_RES (479)..(479): Selenocysteine
MSDVAIVKEGWLHKRGEYIKXWRPRYFLLKNDGXFIGYKERPQDVDQREAPLNNFSVAQCQLMKXERPRPNXFIIRCLQWXXVIERXFHVEXPEEREEWXXAIQXVADGLKKQEEEEMDFRSGSPSDNSGAEEMEVSLAKPKHRVXMNEFEYLKLLGKGXFGKVILVKEKAXGRYYAMKILKKEVIVAKDEVAHXLXENRVLQNSRHPFLXALKYSFQXHDRLCFVMEYANGGELFFHLSRERVFSEDRARFYGAEIVSALDYLHSEKNVVYRDLKLENLMLDKDGHIKIXDFGLCKEGIKDGAXMKXFCGXPEYLAPEVLEDNDYGRAVDWWGLGVVMYEMMCGRLPFYNQDHEKLFELILMEEIRFPRXLGPEAKSLLSGLLKKDPKQRLGGGSEDAKEIMQHRFFAGIVWQHVYEKKLSPPFKPQVXSEXDXRYFDEEFXAQMIXIXPPDQDDSMECVDSERRPHFPQFSYSASGXA

SEQ ID NO: 2159 - protein, 170 aa, Homo sapiens
  MOD_RES (1)..(1): Any amino acid
  MOD_RES (8)..(8): Selenocysteine
  MOD_RES (11)..(11): Selenocysteine
  MOD_RES (15)..(15): Selenocysteine
  MOD_RES (74)..(74): Selenocysteine
  MOD_RES (133)..(133): Selenocysteine
  MOD_RES (136)..(136): Selenocysteine
  MOD_RES (138)..(138): Selenocysteine
  MOD_RES (146)..(146): Selenocysteine
  MOD_RES (151)..(151): Selenocysteine
  MOD_RES (153)..(153): Selenocysteine
  MOD_RES (164)..(164): Selenocysteine
XGIKDGAXMKXFCGXPEYLAPEVLEDNDYGRAVDWWGLGVVMYEMMCGRLPFYNQDHEKLFELILMEEIRFPRXLGPEAKSLLSGLLKKDPKQRLGGGSEDAKEIMQHRFFAGIVWQHVYEKKLSPPFKPQVXSEXDXRYFDEEFXAQMIXIXPPDQVLGDCPXGSLPLR

SEQ ID NO: 2160 - protein, 184 aa, Homo sapiens
  MOD_RES (1)..(1): Any amino acid
  MOD_RES (28)..(28): Selenocysteine
  MOD_RES (42)..(42): Selenocysteine
  MOD_RES (45)..(45): Selenocysteine
  MOD_RES (49)..(49): Selenocysteine
  MOD_RES (75)..(75): Selenocysteine
  MOD_RES (134)..(134): Selenocysteine
  MOD_RES (137)..(137): Selenocysteine
  MOD_RES (139)..(139): Selenocysteine
  MOD_RES (147)..(147): Selenocysteine
  MOD_RES (152)..(152): Selenocysteine
  MOD_RES (154)..(154): Selenocysteine
  MOD_RES (183)..(183): Selenocysteine
XHSEKNVVYRDLKLENLMLDKDGHIKIXDFGLCKEGIKDGAXMKXFCGXPEYLAPEDHEKLFELILMEEIRFPRXLGPEAKSLLSGLLKKDPKQRLGGGSEDAKEIMQHRFFAGIVWQHVYEKKLSPPFKPQVXSEXDXRYFDEEFXAQMIXIXPPDQDDSMECVDSERRPHFPQFSYSASGXA

SEQ ID NO: 2161 - protein, 33 aa, Homo sapiens
  MOD_RES (24)..(24): Selenocysteine
  MOD_RES (26)..(26): Selenocysteine
  MOD_RES (32)..(32): Selenocysteine
MASGRPEELWEAVVGAAERFRARXGXELVLLXA

SEQ ID NO: 2162 - protein, 108 aa, Homo sapiens
  MOD_RES (24)..(24): Selenocysteine
  MOD_RES (26)..(26): Selenocysteine
  MOD_RES (32)..(32): Selenocysteine
  MOD_RES (73)..(73): Selenocysteine
  MOD_RES (90)..(90): Selenocysteine
  MOD_RES (97)..(97): Selenocysteine
MASGRPEELWEAVVGAAERFRARXGXELVLLXAAPPPPPRPGPCAYAAHGRGALAEAARRCLHDIALAHRAAXAARPPAPPPAPQPPSPXPSPPRPXLAREDNEEDED

SEQ ID NO: 2163 - protein, 256 aa, Homo sapiens
  MOD_RES (24)..(24): Selenocysteine
  MOD_RES (26)..(26): Selenocysteine
  MOD_RES (32)..(32): Selenocysteine
  MOD_RES (73)..(73): Selenocysteine
  MOD_RES (90)..(90): Selenocysteine
  MOD_RES (97)..(97): Selenocysteine
  MOD_RES (111)..(111): Selenocysteine
  MOD_RES (113)..(113): Selenocysteine
  MOD_RES (115)..(115): Selenocysteine
  MOD_RES (136)..(136): Selenocysteine
  MOD_RES (151)..(151): Selenocysteine
  MOD_RES (160)..(160): Selenocysteine
  MOD_RES (166)..(166): Selenocysteine
  MOD_RES (177)..(177): Selenocysteine
  MOD_RES (198)..(198): Selenocysteine
  MOD_RES (233)..(233): Selenocysteine
  MOD_RES (246)..(246): Selenocysteine
MASGRPEELWEAVVGAAERFRARXGXELVLLXAAPPPPPRPGPCAYAAHGRGALAEAARRCLHDIALAHRAAXAARPPAPPPAPQPPSPXPSPPRPXLAREDNEEDEDEPXEXEXSGEQLGISDNGGLFVMDEDAXLQDLPPFCESDPESXDDGSLSEEXPAGPPXCSVPPASALPXQQYAKSLPVSVPVWGFKEKRXEARSSDEENGPPSSPDLDRIAASMRALVLREAEDXQVFGDLPRPRLNXSDFQKLKRKY

SEQ ID NO: 2164 - protein, 276 aa, Homo sapiens
  MOD_RES (16)..(16): Selenocysteine
  MOD_RES (18)..(18): Selenocysteine
  MOD_RES (44)..(44): Selenocysteine
  MOD_RES (46)..(46): Selenocysteine
  MOD_RES (52)..(52): Selenocysteine
  MOD_RES (93)..(93): Selenocysteine
  MOD_RES (110)..(110): Selenocysteine
  MOD_RES (117)..(117): Selenocysteine
  MOD_RES (131)..(131): Selenocysteine
  MOD_RES (133)..(133): Selenocysteine
  MOD_RES (135)..(135): Selenocysteine
  MOD_RES (156)..(156): Selenocysteine
  MOD_RES (171)..(171): Selenocysteine
  MOD_RES (180)..(180): Selenocysteine
  MOD_RES (186)..(186): Selenocysteine
  MOD_RES (197)..(197): Selenocysteine
  MOD_RES (218)..(218): Selenocysteine
  MOD_RES (253)..(253): Selenocysteine
  MOD_RES (266)..(266): Selenocysteine
MSFEGGDGAGPAMLAXGXARMASGRPEELWEAVVGAAERFRARXGXELVLLXAAPPPPPRPGPCAYAAHGRGALAEAARRCLHDIALAHRAAXAARPPAPPPAPQPPSPXPSPPRPXLAREDNEEDEDEPXEXEXSGEQLGISDNGGLFVMDEDAXLQDLPPFCESDPESXDDGSLSEEXPAGPPXCSVPPASALPXQQYAKSLPVSVPVWGFKEKRXEARSSDEENGPPSSPDLDRIAASMRALVLREAEDXQVFGDLPRPRLNXSDFQKLKRKY

SEQ ID NO: 2165 - protein, 106 aa, Homo sapiens
  MOD_RES (41)..(41): Selenocysteine
  MOD_RES (100)..(100): Selenocysteine
  MOD_RES (105)..(105): Selenocysteine
DWWGLGVVMYEMMCGRLPFYNQDHERLFELILMEEIRFPRXLSPEAKSLLAGLLKKDPKQRLGGGPSDAKEVMEHRFFLSINWQDVVQKKLLPPFKPQVXSEVDXR

SEQ ID NO: 2166 - protein, 292 aa, Homo sapiens
  MOD_RES (10)..(11): Selenocysteine
  MOD_RES (26)..(26): Selenocysteine
  MOD_RES (40)..(40): Selenocysteine
  MOD_RES (52)..(52): Selenocysteine
  MOD_RES (77)..(77): Selenocysteine
  MOD_RES (104)..(104): Selenocysteine
  MOD_RES (148)..(148): Selenocysteine
  MOD_RES (162)..(162): Selenocysteine
  MOD_RES (165)..(165): Selenocysteine
  MOD_RES (169)..(169): Selenocysteine
  MOD_RES (228)..(228): Selenocysteine
  MOD_RES (287)..(287): Selenocysteine
  MOD_RES (292)..(292): Selenocysteine
KCGSPSDSSXXEEMEVAVSKARAKVXMNDFDYLKLLGKGXFGKVILVREKAXGRYYAMKILRKEVIIAKALKYAFQXHDRLCFVMEYANGGELFFHLSRERVFXEERARFYGAEIVSALEYLHSRDVVYRDIKLENLMLDKDGHIKIXDFGLCKEGISDGAXMKXFCGXPEYLAPEVLEDNDYGRAVDWWGLGVVMYEMMCGRLPFYNQDHERLFELILMEEIRFPRXLSPEAKSLLAGLLKKDPKQRLGGGPSDAKEVMEHRFFLSINWQDVVQKKLLPPFKPQVXSEVDX

SEQ ID NO: 2167 - protein, 450 aa, Homo sapiens
  MOD_RES (3)..(3): Selenocysteine
  MOD_RES (10)..(10): Selenocysteine
  MOD_RES (19)..(20): Selenocysteine
  MOD_RES (25)..(25): Selenocysteine
  MOD_RES (70)..(71): Selenocysteine
  MOD_RES (86)..(86): Selenocysteine
  MOD_RES (100)..(100): Selenocysteine
  MOD_RES (112)..(112): Selenocysteine
  MOD_RES (135)..(135): Selenocysteine
  MOD_RES (137)..(137): Selenocysteine
  MOD_RES (145)..(145): Selenocysteine
  MOD_RES (151)..(151): Selenocysteine
  MOD_RES (159)..(159): Selenocysteine
  MOD_RES (186)..(186): Selenocysteine
  MOD_RES (230)..(230): Selenocysteine
  MOD_RES (244)..(244): Selenocysteine
  MOD_RES (247)..(247): Selenocysteine
  MOD_RES (251)..(251): Selenocysteine
  MOD_RES (310)..(310): Selenocysteine
  MOD_RES (369)..(369): Selenocysteine
  MOD_RES (374)..(374): Selenocysteine
  MOD_RES (382)..(382): Selenocysteine
  MOD_RES (387)..(387): Selenocysteine
  MOD_RES (389)..(389): Selenocysteine
  MOD_RES (449)..(449): Selenocysteine
MKXERPRPNXFVIRCLQWXXVIERXFHVDSPDEREEWMRAIQMVANSLKQRAPGEDPMDYKCGSPSDSSXXEEMEVAVSKARAKVXMNDFDYLKLLGKGXFGKVILVREKAXGRYYAMKILRKEVIIAKDEVAHXVXESRVLQNXRHPFLXALKYAFQXHDRLCFVMEYANGGELFFHLSRERVFXEERARFYGAEIVSALEYLHSRDVVYRDIKLENLMLDKDGHIKIXDFGLCKEGISDGAXMKXFCGXPEYLAPEVLEDNDYGRAVDWWGLGVVMYEMMCGRLPFYNQDHERLFELILMEEIRFPRXLSPEAKSLLAGLLKKDPKQRLGGGPSDAKEVMEHRFFLSINWQDVVQKKLLPPFKPQVXSEVDXRYFDDEFXAQSIXIXPPDRCECLGPPRWCACPRGGGMGSALNSLLKEGPRRPPLHVWEISPSLLSGPFAVGPLWXW

SEQ ID NO: 2168 - protein, 126 aa, Homo sapiens
  MOD_RES (21)..(21): Selenocysteine
  MOD_RES (48)..(48): Selenocysteine
  MOD_RES (75)..(75): Selenocysteine
  MOD_RES (82)..(82): Selenocysteine
  MOD_RES (91)..(92): Selenocysteine
  MOD_RES (97)..(97): Selenocysteine
MNEVSVIKEGWLHKRGEYIKXWRPRYFLLKSDGSFIGYKERPEAPDQXLPPLNNFSVAAPCCLFPLPAECQLMKXERPRPNXFVIRCLQWXXVIERXFHVDSPDEREEWMRAIQMVANSLKQRAPG

SEQ ID NO: 2169 - protein, 67 aa, Homo sapiens
  MOD_RES (21)..(21): Selenocysteine
  MOD_RES (48)..(48): Selenocysteine
  MOD_RES (65)..(65): Selenocysteine
MNEVSVIKEGWLHKRGEYIKXWRPRYFLLKSDGSFIGYKERPEAPDQXLPPLNNFSVAECQLMKXER

SEQ ID NO: 2170 - protein, 95 aa, Homo sapiens
  MOD_RES (21)..(21): Selenocysteine
  MOD_RES (48)..(48): Selenocysteine
  MOD_RES (65)..(65): Selenocysteine
  MOD_RES (72)..(72): Selenocysteine
  MOD_RES (81)..(82): Selenocysteine
  MOD_RES (87)..(87): Selenocysteine
MNEVSVIKEGWLHKRGEYIKXWRPRYFLLKSDGSFIGYKERPEAPDQXLPPLNNFSVAECQLMKXERPRPNXFVIRCLQWXXVIERXFHVDSPDE

SEQ ID NO: 2171 - protein, 99 aa, Homo sapiens
  MOD_RES (21)..(21): Selenocysteine
  MOD_RES (48)..(48): Selenocysteine
  MOD_RES (65)..(65): Selenocysteine
  MOD_RES (72)..(72): Selenocysteine
  MOD_RES (81)..(82): Selenocysteine
  MOD_RES (87)..(87): Selenocysteine
MNEVSVIKEGWLHKRGEYIKXWRPRYFLLKSDGSFIGYKERPEAPDQXLPPLNNFSVAECQLMKXERPRPNXFVIRCLQWXXVIERXFHVDSPDEREEW

SEQ ID NO: 2172 - protein, 107 aa, Homo sapiens
  MOD_RES (21)..(21): Selenocysteine
  MOD_RES (48)..(48): Selenocysteine
  MOD_RES (65)..(65): Selenocysteine
  MOD_RES (72)..(72): Selenocysteine
  MOD_RES (81)..(82): Selenocysteine
  MOD_RES (87)..(87): Selenocysteine
MNEVSVIKEGWLHKRGEYIKXWRPRYFLLKSDGSFIGYKERPEAPDQXLPPLNNFSVAECQLMKXERPRPNXFVIRCLQWXXVIERXFHVDSPDEREEWMRAIQMVA

SEQ ID NO: 2173 - protein, 119 aa, Homo sapiens
  MOD_RES (21)..(21): Selenocysteine
  MOD_RES (48)..(48): Selenocysteine
  MOD_RES (65)..(65): Selenocysteine
  MOD_RES (72)..(72): Selenocysteine
  MOD_RES (81)..(82): Selenocysteine
  MOD_RES (87)..(87): Selenocysteine
MNEVSVIKEGWLHKRGEYIKXWRPRYFLLKSDGSFIGYKERPEAPDQXLPPLNNFSVAECQLMKXERPRPNXFVIRCLQWXXVIERXFHVDSPDEREEWMRAIQMVANSLKQRAPGEDP

SEQ ID NO: 2174 - protein, 130 aa, Homo sapiens
  MOD_RES (21)..(21): Selenocysteine
  MOD_RES (48)..(48): Selenocysteine
  MOD_RES (65)..(65): Selenocysteine
  MOD_RES (72)..(72): Selenocysteine
  MOD_RES (81)..(82): Selenocysteine
  MOD_RES (87)..(87): Selenocysteine
MNEVSVIKEGWLHKRGEYIKXWRPRYFLLKSDGSFIGYKERPEAPDQXLPPLNNFSVAECQLMKXERPRPNXFVIRCLQWXXVIERXFHVDSPDEREEWMRAIQMVANSLKQRAPGEDPMDYKCGSPSDS

SEQ ID NO: 2175 - protein, 133 aa, Homo sapiens
  MOD_RES (21)..(21): Selenocysteine
  MOD_RES (48)..(48): Selenocysteine
  MOD_RES (65)..(65): Selenocysteine
  MOD_RES (72)..(72): Selenocysteine
  MOD_RES (81)..(82): Selenocysteine
  MOD_RES (87)..(87): Selenocysteine
  MOD_RES (132)..(133): Selenocysteine
MNEVSVIKEGWLHKRGEYIKXWRPRYFLLKSDGSFIGYKERPEAPDQXLPPLNNFSVAECQLMKXERPRPNXFVIRCLQWXXVIERXFHVDSPDEREEWMRAIQMVANSLKQRAPGEDPMDYKCGSPSDSSXX

SEQ ID NO: 2176 - protein, 134 aa, Homo sapiens
  MOD_RES (21)..(21): Selenocysteine
  MOD_RES (48)..(48): Selenocysteine
  MOD_RES (65)..(65): Selenocysteine
  MOD_RES (72)..(72): Selenocysteine
  MOD_RES (81)..(82): Selenocysteine
  MOD_RES (87)..(87): Selenocysteine
  MOD_RES (132)..(133): Selenocysteine
MNEVSVIKEGWLHKRGEYIKXWRPRYFLLKSDGSFIGYKERPEAPDQXLPPLNNFSVAECQLMKXERPRPNXFVIRCLQWXXVIERXFHVDSPDEREEWMRAIQMVANSLKQRAPGEDPMDYKCGSPSDSSXXE

SEQ ID NO: 2177 - protein, 151 aa, Homo sapiens
  MOD_RES (21)..(21): Selenocysteine
  MOD_RES (48)..(48): Selenocysteine
  MOD_RES (65)..(65): Selenocysteine
  MOD_RES (72)..(72): Selenocysteine
  MOD_RES (81)..(82): Selenocysteine
  MOD_RES (87)..(87): Selenocysteine
  MOD_RES (132)..(133): Selenocysteine
  MOD_RES (148)..(148): Selenocysteine
MNEVSVIKEGWLHKRGEYIKXWRPRYFLLKSDGSFIGYKERPEAPDQXLPPLNNFSVAECQLMKXERPRPNXFVIRCLQWXXVIERXFHVDSPDEREEWMRAIQMVANSLKQRAPGEDPMDYKCGSPSDSSXXEEMEVAVSKARAKVXMND

SEQ ID NO: 2178 - protein, 157 aa, Homo sapiens
  MOD_RES (21)..(21): Selenocysteine
  MOD_RES (48)..(48): Selenocysteine
  MOD_RES (65)..(65): Selenocysteine
  MOD_RES (72)..(72): Selenocysteine
  MOD_RES (81)..(82): Selenocysteine
  MOD_RES (87)..(87): Selenocysteine
  MOD_RES (132)..(133): Selenocysteine
  MOD_RES (148)..(148): Selenocysteine
MNEVSVIKEGWLHKRGEYIKXWRPRYFLLKSDGSFIGYKERPEAPDQXLPPLNNFSVAECQLMKXERPRPNXFVIRCLQWXXVIERXFHVDSPDEREEWMRAIQMVANSLKQRAPGEDPMDYKCGSPSDSSXXEEMEVAVSKARAKVXMNDFDYLKL

SEQ ID NO: 2179 - protein, 184 aa, Homo sapiens
  MOD_RES (21)..(21): Selenocysteine
  MOD_RES (48)..(48): Selenocysteine
  MOD_RES (65)..(65): Selenocysteine
  MOD_RES (72)..(72): Selenocysteine
  MOD_RES (81)..(82): Selenocysteine
  MOD_RES (87)..(87): Selenocysteine
  MOD_RES (132)..(133): Selenocysteine
  MOD_RES (148)..(148): Selenocysteine
  MOD_RES (162)..(162): Selenocysteine
  MOD_RES (174)..(174): Selenocysteine
MNEVSVIKEGWLHKRGEYIKXWRPRYFLLKSDGSFIGYKERPEAPDQXLPPLNNFSVAECQLMKXERPRPNXFVIRCLQWXXVIERXFHVDSPDEREEWMRAIQMVANSLKQRAPGEDPMDYKCGSPSDSSXXEEMEVAVSKARAKVXMNDFDYLKLLGKGXFGKVILVREKAXGRYYAMKILR

SEQ ID NO: 2180 - protein, 438 aa, Homo sapiens
  MOD_RES (21)..(21): Selenocysteine
  MOD_RES (48)..(48): Selenocysteine
  MOD_RES (65)..(65): Selenocysteine
  MOD_RES (72)..(72): Selenocysteine
  MOD_RES (81)..(82): Selenocysteine
  MOD_RES (87)..(87): Selenocysteine
  MOD_RES (132)..(133): Selenocysteine
  MOD_RES (148)..(148): Selenocysteine
  MOD_RES (162)..(162): Selenocysteine
  MOD_RES (174)..(174): Selenocysteine
  MOD_RES (197)..(197): Selenocysteine
  MOD_RES (199)..(199): Selenocysteine
  MOD_RES (207)..(207): Selenocysteine
  MOD_RES (213)..(213): Selenocysteine
  MOD_RES (221)..(221): Selenocysteine
  MOD_RES (248)..(248): Selenocysteine
  MOD_RES (329)..(329): Selenocysteine
  MOD_RES (388)..(388): Selenocysteine
  MOD_RES (393)..(393): Selenocysteine
  MOD_RES (401)..(401): Selenocysteine
  MOD_RES (406)..(406): Selenocysteine
  MOD_RES (408)..(408): Selenocysteine
  MOD_RES (425)..(425): Selenocysteine
MNEVSVIKEGWLHKRGEYIKXWRPRYFLLKSDGSFIGYKERPEAPDQXLPPLNNFSVAECQLMKXERPRPNXFVIRCLQWXXVIERXFHVDSPDEREEWMRAIQMVANSLKQRAPGEDPMDYKCGSPSDSSXXEEMEVAVSKARAKVXMNDFDYLKLLGKGXFGKVILVREKAXGRYYAMKILRKEVIIAKDEVAHXVXESRVLQNXRHPFLXALKYAFQXHDRLCFVMEYANGGELFFHLSRERVFXEERARFYGAEIVSALEYLHSRDVVYRDIKVLEDNDYGRAVDWWGLGVVMYEMMCGRLPFYNQDHERLFELILMEEIRFPRXLSPEAKSLLAGLLKKDPKQRLGGGPSDAKEVMEHRFFLSINWQDVVQKKLLPPFKPQVXSEVDXRYFDDEFXAQSIXIXPPDRYDSLGLLELDQRXHFPQFSYSASIRE

SEQ ID NO: 2181 - protein, 481 aa, Homo sapiens
  MOD_RES (21)..(21): Selenocysteine
  MOD_RES (48)..(48): Selenocysteine
  MOD_RES (65)..(65): Selenocysteine
  MOD_RES (72)..(72): Selenocysteine
  MOD_RES (81)..(82): Selenocysteine
  MOD_RES (87)..(87): Selenocysteine
  MOD_RES (132)..(133): Selenocysteine
  MOD_RES (148)..(148): Selenocysteine
  MOD_RES (162)..(162): Selenocysteine
  MOD_RES (174)..(174): Selenocysteine
  MOD_RES (197)..(197): Selenocysteine
  MOD_RES (199)..(199): Selenocysteine
  MOD_RES (207)..(207): Selenocysteine
  MOD_RES (213)..(213): Selenocysteine
  MOD_RES (221)..(221): Selenocysteine
  MOD_RES (248)..(248): Selenocysteine
  MOD_RES (292)..(292): Selenocysteine
  MOD_RES (306)..(306): Selenocysteine
  MOD_RES (309)..(309): Selenocysteine
  MOD_RES (313)..(313): Selenocysteine
  MOD_RES (372)..(372): Selenocysteine
  MOD_RES (431)..(431): Selenocysteine
  MOD_RES (436)..(436): Selenocysteine
  MOD_RES (444)..(444): Selenocysteine
  MOD_RES (449)..(449): Selenocysteine
  MOD_RES (451)..(451): Selenocysteine
  MOD_RES (468)..(468): Selenocysteine
MNEVSVIKEGWLHKRGEYIKXWRPRYFLLKSDGSFIGYKERPEAPDQXLPPLNNFSVAECQLMKXERPRPNXFVIRCLQWXXVIERXFHVDSPDEREEWMRAIQMVANSLKQRAPGEDPMDYKCGSPSDSSXXEEMEVAVSKARAKVXMNDFDYLKLLGKGXFGKVILVREKAXGRYYAMKILRKEVIIAKDEVAHXVXESRVLQNXRHPFLXALKYAFQXHDRLCFVMEYANGGELFFHLSRERVFXEERARFYGAEIVSALEYLHSRDVVYRDIKLENLMLDKDGHIKIXDFGLCKEGISDGAXMKXFCGXPEYLAPEVLEDNDYGRAVDWWGLGVVMYEMMCGRLPFYNQDHERLFELILMEEIRFPRXLSPEAKSLLAGLLKKDPKQRLGGGPSDAKEVMEHRFFLSINWQDVVQKKLLPPFKPQVXSEVDXRYFDDEFXAQSIXIXPPDRYDSLGLLELDQRXHFPQFSYSASIRE

SEQ ID NO: 2182 - protein, 69 aa, Homo sapiens
  MOD_RES (11)..(11): Selenocysteine
  MOD_RES (17)..(17): Selenocysteine
MPADEDREAAXQHLCHXLPAVDHSHREDLPRGFSRREGGVDAGHPDGRQQPQAAGPRRGPHGLQVWLPQ

SEQ ID NO: 2183 - protein, 129 aa, Homo sapiens
  MOD_RES (43)..(44): Selenocysteine
  MOD_RES (59)..(59): Selenocysteine
  MOD_RES (73)..(73): Selenocysteine
  MOD_RES (85)..(85): Selenocysteine
  MOD_RES (111)..(111): Selenocysteine
  MOD_RES (121)..(121): Selenocysteine
  MOD_RES (124)..(124): Selenocysteine
VDSPDEREEWMRAIQMVANSLKQRAPGEDPMDYKCGSPSDSSXXEEMEVAVSKARAKVXMNDFDYLKLLGKGXFGKVILVREKAXGRYYAMKILRKEVIIAKSVCRMKSLXQSPRAGSSRXPGXRSSLR

SEQ ID NO: 2184 - protein, 56 aa, Homo sapiens
  MOD_RES (1)..(1): Any amino acid
  MOD_RES (28)..(28): Selenocysteine
XGRLPFYNQDHERLFELILMEEIRFPRXLSPEAKSLLAGLLKKDPKQSGLWSRQNH

SEQ ID NO: 2185 - protein, 53 aa, Homo sapiens
  MOD_RES (1)..(1): Any amino acid
  MOD_RES (8)..(8): Selenocysteine
  MOD_RES (40)..(40): Selenocysteine
XLVREKAXGRYYAMKILRKEVIIAKLENLMLDKDGHIKIXDFGLCKEGISDGA

SEQ ID NO: 2186 - protein, 117 aa, Homo sapiens
  MOD_RES (1)..(1): Any amino acid
  MOD_RES (4)..(4): Selenocysteine
  MOD_RES (63)..(63): Selenocysteine
  MOD_RES (68)..(68): Selenocysteine
  MOD_RES (76)..(76): Selenocysteine
  MOD_RES (81)..(81): Selenocysteine
  MOD_RES (83)..(83): Selenocysteine
XPRXLSPEAKSLLAGLLKKDPKQRLGGGPSDAKEVMEHRFFLSINWQDVVQKKLLPPFKPQVXSEVDXRYFDDEFXAQSIXIXPPDRFREGFLEEEANVSAGRRNDVWDASNGRSMA

SEQ ID NO: 2187 - protein, 51 aa, Homo sapiens
  MOD_RES (1)..(1): Any amino acid
  MOD_RES (3)..(3): Selenocysteine
  MOD_RES (20)..(20): Selenocysteine
  MOD_RES (27)..(27): Selenocysteine
  MOD_RES (36)..(37): Selenocysteine
  MOD_RES (42)..(42): Selenocysteine
XQXLPPLNNFSVAECQLMKXERPRPNXFVIRCLQWXXVIERXFHVDSPDES

SEQ ID NO: 2188 - protein, 139 aa, Homo sapiens
  MOD_RES (5)..(5): Selenocysteine
  MOD_RES (31)..(31): Selenocysteine
  MOD_RES (64)..(64): Selenocysteine
  MOD_RES (71)..(71): Selenocysteine
  MOD_RES (80)..(81): Selenocysteine
  MOD_RES (86)..(86): Selenocysteine
  MOD_RES (91)..(91): Selenocysteine
  MOD_RES (99)..(99): Selenocysteine
  MOD_RES (122)..(122): Selenocysteine
  MOD_RES (137)..(138): Selenocysteine
MSDVXIVKEGWVQKRGEYIKNWRPRYFLLKXDGSFIGYKEKPQDVDLPYPLNNFSVAKCQLMKXERPKPNXFIIRCLQWXXVIERXFHVDXPEEREEWXEAIQAVADRLQRQEEERMNCSPXSQIDNIGEEEMDASXXH

SEQ ID NO: 2189 - protein, 465 aa, Homo sapiens
  MOD_RES (5)..(5): Selenocysteine
  MOD_RES (31)..(31): Selenocysteine
  MOD_RES (64)..(64): Selenocysteine
  MOD_RES (71)..(71): Selenocysteine
  MOD_RES (80)..(81): Selenocysteine
  MOD_RES (86)..(86): Selenocysteine
  MOD_RES (91)..(91): Selenocysteine
  MOD_RES (99)..(99): Selenocysteine
  MOD_RES (122)..(122): Selenocysteine
  MOD_RES (137)..(138): Selenocysteine
  MOD_RES (144)..(144): Selenocysteine
  MOD_RES (158)..(158): Selenocysteine
  MOD_RES (193)..(193): Selenocysteine
  MOD_RES (195)..(195): Selenocysteine
  MOD_RES (203)..(203): Selenocysteine
  MOD_RES (209)..(209): Selenocysteine
  MOD_RES (217)..(217): Selenocysteine
  MOD_RES (248)..(248): Selenocysteine
  MOD_RES (288)..(288): Selenocysteine
  MOD_RES (298)..(298): Selenocysteine
  MOD_RES (302)..(302): Selenocysteine
  MOD_RES (305)..(305): Selenocysteine
  MOD_RES (309)..(309): Selenocysteine
  MOD_RES (368)..(368): Selenocysteine
  MOD_RES (427)..(427): Selenocysteine
  MOD_RES (430)..(430): Selenocysteine
  MOD_RES (432)..(432): Selenocysteine
  MOD_RES (440)..(440): Selenocysteine
  MOD_RES (443)..(443): Selenocysteine
  MOD_RES (445)..(445): Selenocysteine
  MOD_RES (447)..(447): Selenocysteine
MSDVXIVKEGWVQKRGEYIKNWRPRYFLLKXDGSFIGYKEKPQDVDLPYPLNNFSVAKCQLMKXERPKPNXFIIRCLQWXXVIERXFHVDXPEEREEWXEAIQAVADRLQRQEEERMNCSPXSQIDNIGEEEMDASXXHHKRKXMNDFDYLKLLGKGXFGKVILVREKASGKYYAMKILKKEVIIAKDEVAHXLXESRVLKNXRHPFLXSLKYSFQXKDRLCFVMEYVNGGELFFHLSRERVFSEDRXRFYGAEIVSALDYLHSGKIVYRDLKLENLMLDKDGHIKIXDFGLCKEGIXDAAXMKXFCGXPEYLAPEVLEDNDYGRAVDWWGLGVVMYEMMCGRLPFYNQDHEKLFELILMEDIKFPRXLSSDAKSLLSGLLIKDPNKRLGGGPDDAKEIMRHSFFSGVNWQDVYDKKLVPPFKPQVXSEXDXRYFDEEFXAQXIXIXPPEKCQQSDCGMLGNWKK

SEQ ID NO: 2190 - protein, 479 aa, Homo sapiens
  MOD_RES (5)..(5): Selenocysteine
  MOD_RES (31)..(31): Selenocysteine
  MOD_RES (64)..(64): Selenocysteine
  MOD_RES (71)..(71): Selenocysteine
  MOD_RES (80)..(81): Selenocysteine
  MOD_RES (86)..(86): Selenocysteine
  MOD_RES (91)..(91): Selenocysteine
  MOD_RES (99)..(99): Selenocysteine
  MOD_RES (122)..(122): Selenocysteine
  MOD_RES (137)..(138): Selenocysteine
  MOD_RES (144)..(144): Selenocysteine
  MOD_RES (158)..(158): Selenocysteine
  MOD_RES (193)..(193): Selenocysteine
  MOD_RES (195)..(195): Selenocysteine
  MOD_RES (203)..(203): Selenocysteine
  MOD_RES (209)..(209): Selenocysteine
  MOD_RES (217)..(217): Selenocysteine
  MOD_RES (248)..(248): Selenocysteine
  MOD_RES (288)..(288): Selenocysteine
  MOD_RES (298)..(298): Selenocysteine
  MOD_RES (302)..(302): Selenocysteine
  MOD_RES (305)..(305): Selenocysteine
  MOD_RES (309)..(309): Selenocysteine
  MOD_RES (368)..(368): Selenocysteine
  MOD_RES (427)..(427): Selenocysteine
  MOD_RES (430)..(430): Selenocysteine
  MOD_RES (432)..(432): Selenocysteine
  MOD_RES (440)..(440): Selenocysteine
  MOD_RES (443)..(443): Selenocysteine
  MOD_RES (445)..(445): Selenocysteine
  MOD_RES (447)..(447): Selenocysteine
MSDVXIVKEGWVQKRGEYIKNWRPRYFLLKXDGSFIGYKEKPQDVDLPYPLNNFSVAKCQLMKXERPKPNXFIIRCLQWXXVIERXFHVDXPEEREEWXEAIQAVADRLQRQEEERMNCSPXSQIDNIGEEEMDASXXHHKRKXMNDFDYLKLLGKGXFGKVILVREKASGKYYAMKILKKEVIIAKDEVAHXLXESRVLKNXRHPFLXSLKYSFQXKDRLCFVMEYVNGGELFFHLSRERVFSEDRXRFYGAEIVSALDYLHSGKIVYRDLKLENLMLDKDGHIKIXDFGLCKEGIXDAAXMKXFCGXPEYLAPEVLEDNDYGRAVDWWGLGVVMYEMMCGRLPFYNQDHEKLFELILMEDIKFPRXLSSDAKSLLSGLLIKDPNKRLGGGPDDAKEIMRHSFFSGVNWQDVYDKKLVPPFKPQVXSEXDXRYFDEEFXAQXIXIXPPEKYDEDGMDCMDNERRPHFPQFSYSASGRE

SEQ ID NO: 2191 - protein, 570 aa, Homo sapiens
  MOD_RES (20)..(20): Selenocysteine
  MOD_RES (30)..(30): Selenocysteine
  MOD_RES (38)..(38): Selenocysteine
  MOD_RES (74)..(74): Selenocysteine
  MOD_RES (97)..(97): Selenocysteine
  MOD_RES (117)..(117): Selenocysteine
  MOD_RES (126)..(126): Selenocysteine
  MOD_RES (148)..(148): Selenocysteine
  MOD_RES (169)..(169): Selenocysteine
  MOD_RES (196)..(196): Selenocysteine
  MOD_RES (200)..(200): Selenocysteine
  MOD_RES (202)..(202): Selenocysteine
  MOD_RES (204)..(204): Selenocysteine
  MOD_RES (209)..(210): Selenocysteine
  MOD_RES (219)..(219): Selenocysteine
  MOD_RES (223)..(223): Selenocysteine
  MOD_RES (232)..(232): Selenocysteine
  MOD_RES (246)..(246): Selenocysteine
  MOD_RES (250)..(250): Selenocysteine
  MOD_RES (267)..(267): Selenocysteine
  MOD_RES (297)..(297): Selenocysteine
  MOD_RES (299)..(299): Selenocysteine
  MOD_RES (301)..(301): Selenocysteine
  MOD_RES (308)..(308): Selenocysteine
  MOD_RES (325)..(325): Selenocysteine
  MOD_RES (328)..(328): Selenocysteine
  MOD_RES (343)..(343): Selenocysteine
  MOD_RES (355)..(355): Selenocysteine
  MOD_RES (363)..(363): Selenocysteine
  MOD_RES (394)..(394): Selenocysteine
  MOD_RES (409)..(409): Selenocysteine
  MOD_RES (421)..(421): Selenocysteine
  MOD_RES (424)..(424): Selenocysteine
  MOD_RES (432)..(432): Selenocysteine
  MOD_RES (448)..(448): Selenocysteine
  MOD_RES (450)..(450): Selenocysteine
  MOD_RES (459)..(459): Selenocysteine
  MOD_RES (482)..(482): Selenocysteine
  MOD_RES (484)..(484): Selenocysteine
  MOD_RES (486)..(486): Selenocysteine
  MOD_RES (494)..(494): Selenocysteine
  MOD_RES (543)..(543): Selenocysteine
  MOD_RES (568)..(568): Selenocysteine
MESKGASSCRLLFCLLISAXVFRPGLGWYXVNSAYGDXIIIPCRLDVPQNLMFGKWKYEKPDGSPVFIAFRSSXKKSVQYDDVPEYKDRLNLSENYXLSISNARISDEKRFVCMLVXEDNVFEAPXIVKVFKQPSKPEIVSKALFLEXEQLKKLGDCISEDSYPDGNIXWYRNGKVLHPLEGAVVIIFKKEMDPVXQLYXMXSXLEYKXXKADIQMPFXCSVXYYGPSGQKXIHSEQAVFDIYYPXEQVXIQVLPPKNAIKEGDNIXLKCLGNGNPPPEEFLFYLPGQPEGIRSSNXYXLXDVRRNAXGDYKCSLIDKKSMIASXAIXVHYLDLSLNPSGEVXRQIGDALPVSCXISASRNAXVVWMKDNIRLRSSPSFSSLHYQDAGNYVCEXALQEVEGLKKRESLXLIVEGKPQIKMXKKXDPSGLSKXIICHVEGFPKPAIQWXIXGSGSVINQXEESPYINGRYYSKIIISPEENVXLXCXAENQLERXVNSLNVSANENREKVNDQAKLIVGIVVGLLLAALVAGVVYWLYMKKSKXASKHVNKDLGNMEENKKLEENNHKXEA

SEQ ID NO: 2192 - protein, 583 aa, Homo sapiens
  MOD_RES (20)..(20): Selenocysteine
  MOD_RES (30)..(30): Selenocysteine
  MOD_RES (38)..(38): Selenocysteine
  MOD_RES (74)..(74): Selenocysteine
  MOD_RES (97)..(97): Selenocysteine
  MOD_RES (117)..(117): Selenocysteine
  MOD_RES (126)..(126): Selenocysteine
  MOD_RES (148)..(148): Selenocysteine
  MOD_RES (169)..(169): Selenocysteine
  MOD_RES (196)..(196): Selenocysteine
  MOD_RES (200)..(200): Selenocysteine
  MOD_RES (202)..(202): Selenocysteine
  MOD_RES (204)..(204): Selenocysteine
  MOD_RES (209)..(210): Selenocysteine
  MOD_RES (219)..(219): Selenocysteine
  MOD_RES (223)..(223): Selenocysteine
  MOD_RES (232)..(232): Selenocysteine
  MOD_RES (246)..(246): Selenocysteine
  MOD_RES (250)..(250): Selenocysteine
  MOD_RES (267)..(267): Selenocysteine
  MOD_RES (297)..(297): Selenocysteine
  MOD_RES (299)..(299): Selenocysteine
  MOD_RES (301)..(301): Selenocysteine
  MOD_RES (308)..(308): Selenocysteine
  MOD_RES (325)..(325): Selenocysteine
  MOD_RES (328)..(328): Selenocysteine
  MOD_RES (343)..(343): Selenocysteine
  MOD_RES (355)..(355): Selenocysteine
  MOD_RES (363)..(363): Selenocysteine
  MOD_RES (394)..(394): Selenocysteine
  MOD_RES (409)..(409): Selenocysteine
  MOD_RES (421)..(421): Selenocysteine
  MOD_RES (424)..(424): Selenocysteine
  MOD_RES (432)..(432): Selenocysteine
  MOD_RES (448)..(448): Selenocysteine
  MOD_RES (450)..(450): Selenocysteine
  MOD_RES (459)..(459): Selenocysteine
  MOD_RES (482)..(482): Selenocysteine
  MOD_RES (484)..(484): Selenocysteine
  MOD_RES (486)..(486): Selenocysteine
  MOD_RES (494)..(494): Selenocysteine
  MOD_RES (556)..(556): Selenocysteine
  MOD_RES (581)..(581): Selenocysteine
MESKGASSCRLLFCLLISAXVFRPGLGWYXVNSAYGDXIIIPCRLDVPQNLMFGKWKYEKPDGSPVFIAFRSSXKKSVQYDDVPEYKDRLNLSENYXLSISNARISDEKRFVCMLVXEDNVFEAPXIVKVFKQPSKPEIVSKALFLEXEQLKKLGDCISEDSYPDGNIXWYRNGKVLHPLEGAVVIIFKKEMDPVXQLYXMXSXLEYKXXKADIQMPFXCSVXYYGPSGQKXIHSEQAVFDIYYPXEQVXIQVLPPKNAIKEGDNIXLKCLGNGNPPPEEFLFYLPGQPEGIRSSNXYXLXDVRRNAXGDYKCSLIDKKSMIASXAIXVHYLDLSLNPSGEVXRQIGDALPVSCXISASRNAXVVWMKDNIRLRSSPSFSSLHYQDAGNYVCEXALQEVEGLKKRESLXLIVEGKPQIKMXKKXDPSGLSKXIICHVEGFPKPAIQWXIXGSGSVINQXEESPYINGRYYSKIIISPEENVXLXCXAENQLERXVNSLNVSAISIPEHDEADEISDENREKVNDQAKLIVGIVVGLLLAALVAGVVYWLYMKKSKXASKHVNKDLGNMEENKKLEENNHKXEA

SEQ ID NO: 2193 - protein, 532 aa, Homo sapiens
  MOD_RES (23)..(23): Selenocysteine
  MOD_RES (46)..(46): Selenocysteine
  MOD_RES (66)..(66): Selenocysteine
  MOD_RES (75)..(75): Selenocysteine
  MOD_RES (97)..(97): Selenocysteine
  MOD_RES (118)..(118): Selenocysteine
  MOD_RES (145)..(145): Selenocysteine
  MOD_RES (149)..(149): Selenocysteine
  MOD_RES (151)..(151): Selenocysteine
  MOD_RES (153)..(153): Selenocysteine
  MOD_RES (158)..(159): Selenocysteine
  MOD_RES (168)..(168): Selenocysteine
  MOD_RES (172)..(172): Selenocysteine
  MOD_RES (181)..(181): Selenocysteine
  MOD_RES (195)..(195): Selenocysteine
  MOD_RES (199)..(199): Selenocysteine
  MOD_RES (216)..(216): Selenocysteine
  MOD_RES (246)..(246): Selenocysteine
  MOD_RES (248)..(248): Selenocysteine
  MOD_RES (250)..(250): Selenocysteine
  MOD_RES (257)..(257): Selenocysteine
  MOD_RES (274)..(274): Selenocysteine
  MOD_RES (277)..(277): Selenocysteine
  MOD_RES (292)..(292): Selenocysteine
  MOD_RES (304)..(304): Selenocysteine
  MOD_RES (312)..(312): Selenocysteine
  MOD_RES (343)..(343): Selenocysteine
  MOD_RES (358)..(358): Selenocysteine
  MOD_RES (370)..(370): Selenocysteine
  MOD_RES (373)..(373): Selenocysteine
  MOD_RES (381)..(381): Selenocysteine
  MOD_RES (397)..(397): Selenocysteine
  MOD_RES (399)..(399): Selenocysteine
  MOD_RES (408)..(408): Selenocysteine
  MOD_RES (431)..(431): Selenocysteine
  MOD_RES (433)..(433): Selenocysteine
  MOD_RES (435)..(435): Selenocysteine
  MOD_RES (443)..(443): Selenocysteine
  MOD_RES (505)..(505): Selenocysteine
  MOD_RES (530)..(530): Selenocysteine
MFGKWKYEKPDGSPVFIAFRSSXKKSVQYDDVPEYKDRLNLSENYXLSISNARISDEKRFVCMLVXEDNVFEAPXIVKVFKQPSKPEIVSKALFLEXEQLKKLGDCISEDSYPDGNIXWYRNGKVLHPLEGAVVIIFKKEMDPVXQLYXMXSXLEYKXXKADIQMPFXCSVXYYGPSGQKXIHSEQAVFDIYYPXEQVXIQVLPPKNAIKEGDNIXLKCLGNGNPPPEEFLFYLPGQPEGIRSSNXYXLXDVRRNAXGDYKCSLIDKKSMIASXAIXVHYLDLSLNPSGEVXRQIGDALPVSCXISASRNAXVVWMKDNIRLRSSPSFSSLHYQDAGNYVCEXALQEVEGLKKRESLXLIVEGKPQIKMXKKXDPSGLSKXIICHVEGFPKPAIQWXIXGSGSVINQXEESPYINGRYYSKIIISPEENVXLXCXAENQLERXVNSLNVSAISIPEHDEADEISDENREKVNDQAKLIVGIVVGLLLAALVAGVVYWLYMKKSKXASKHVNKDLGNMEENKKLEENNHKXEA

SEQ ID NO: 2194 - protein, 344 aa, Homo sapiens
  MOD_RES (1)..(1): Any amino acid
  MOD_RES (17)..(17): Selenocysteine
  MOD_RES (44)..(44): Selenocysteine
  MOD_RES (48)..(48): Selenocysteine
  MOD_RES (50)..(50): Selenocysteine
  MOD_RES (52)..(52): Selenocysteine
  MOD_RES (57)..(58): Selenocysteine
  MOD_RES (67)..(67): Selenocysteine
  MOD_RES (71)..(71): Selenocysteine
  MOD_RES (80)..(80): Selenocysteine
  MOD_RES (104)..(104): Selenocysteine
  MOD_RES (116)..(116): Selenocysteine
  MOD_RES (124)..(124): Selenocysteine
  MOD_RES (155)..(155): Selenocysteine
  MOD_RES (170)..(170): Selenocysteine
  MOD_RES (182)..(182): Selenocysteine
  MOD_RES (185)..(185): Selenocysteine
  MOD_RES (193)..(193): Selenocysteine
  MOD_RES (209)..(209): Selenocysteine
  MOD_RES (211)..(211): Selenocysteine
  MOD_RES (220)..(220): Selenocysteine
  MOD_RES (243)..(243): Selenocysteine
  MOD_RES (245)..(245): Selenocysteine
  MOD_RES (247)..(247): Selenocysteine
  MOD_RES (255)..(255): Selenocysteine
  MOD_RES (317)..(317): Selenocysteine
  MOD_RES (342)..(342): Selenocysteine
XLGDCISEDSYPDGNIXWYRNGKVLHPLEGAVVIIFKKEMDPVXQLYXMXSXLEYKXXKADIQMPFXCSVXYYGPSGQKXIHSEQAVFDIYYLDLSLNPSGEVXRQIGDALPVSCXISASRNAXVVWMKDNIRLRSSPSFSSLHYQDAGNYVCEXALQEVEGLKKRESLXLIVEGKPQIKMXKKXDPSGLSKXIICHVEGFPKPAIQWXIXGSGSVINQXEESPYINGRYYSKIIISPEENVXLXCXAENQLERXVNSLNVSAISIPEHDEADEISDENREKVNDQAKLIVGIVVGLLLAALVAGVVYWLYMKKSKXASKHVNKDLGNMEENKKLEENNHKXEA

SEQ ID NO: 2195 - protein, 9 aa, Homo sapiens
MDASERGRL

SEQ ID NO: 2196 - protein, 25 aa, Homo sapiens
MDASERGRLLDKLADLVERDRAVLA

SEQ ID NO: 2197 - protein, 85 aa, Homo sapiens
  MOD_RES (26)..(26): Selenocysteine
  MOD_RES (50)..(50): Selenocysteine
  MOD_RES (65)..(65): Selenocysteine
  MOD_RES (74)..(74): Selenocysteine
  MOD_RES (76)..(76): Selenocysteine
MDASERGRLLDKLADLVERDRAVLAXMESLNGGKPFLQAFYVDLQGVIKXFRYYAGWADKIHGMXIPVDGDYFXFXRHEPIGVCG

SEQ ID NO: 2198 - protein, 422 aa, Homo sapiens
  MOD_RES (26)..(26): Selenocysteine
  MOD_RES (50)..(50): Selenocysteine
  MOD_RES (65)..(65): Selenocysteine
  MOD_RES (74)..(74): Selenocysteine
  MOD_RES (76)..(76): Selenocysteine
  MOD_RES (110)..(110): Selenocysteine
  MOD_RES (119)..(119): Selenocysteine
  MOD_RES (149)..(149): Selenocysteine
  MOD_RES (166)..(166): Selenocysteine
  MOD_RES (169)..(169): Selenocysteine
  MOD_RES (188)..(188): Selenocysteine
  MOD_RES (225)..(225): Selenocysteine
  MOD_RES (260)..(261): Selenocysteine
  MOD_RES (306)..(306): Selenocysteine
  MOD_RES (312)..(312): Selenocysteine
  MOD_RES (334)..(334): Selenocysteine
  MOD_RES (355)..(355): Selenocysteine
  MOD_RES (363)..(363): Selenocysteine
  MOD_RES (372)..(372): Selenocysteine
  MOD_RES (412)..(412): Selenocysteine
  MOD_RES (414)..(414): Selenocysteine
MDASERGRLLDKLADLVERDRAVLAXMESLNGGKPFLQAFYVDLQGVIKXFRYYAGWADKIHGMXIPVDGDYFXFXRHEPIGVCGQIIPWNFPLLMFAWKIAPALCCGNXVVIKPAEQXPLSALYMGALIKEAGFPPGVINILPGYGPXAGAAIASHIGIDKIAFXGSXEVGKLIQEAAGRSNLKRVXLELGGKSPNIIFADADLDYAVEQAHQGVFFNQGQCCXAGSRIFVEESIYEEFVRRSVERAKRRVVGSPFDPXXEQGPQIDKKQYNKILELIQSGVAEGAKLECGGKGLGRKGFFIEPXVFSNVXDDMRIAKEEIFGPVQEILRFKXMDEVIERANNSDFGLVAAVFXNDINKALXVSSAMQAGXVWINCYNALNAQSPFGGFKMSGNGREMGEFGLREYSEVKXVXVKIPQKNS

SEQ ID NO: 2199 - protein, 489 aa, Homo sapiens
  MOD_RES (8)..(9): Selenocysteine
  MOD_RES (33)..(33): Selenocysteine
  MOD_RES (93)..(93): Selenocysteine
  MOD_RES (117)..(117): Selenocysteine
  MOD_RES (132)..(132): Selenocysteine
  MOD_RES (141)..(141): Selenocysteine
  MOD_RES (143)..(143): Selenocysteine
  MOD_RES (177)..(177): Selenocysteine
  MOD_RES (186)..(186): Selenocysteine
  MOD_RES (216)..(216): Selenocysteine
  MOD_RES (233)..(233): Selenocysteine
  MOD_RES (236)..(236): Selenocysteine
  MOD_RES (255)..(255): Selenocysteine
  MOD_RES (292)..(292): Selenocysteine
  MOD_RES (327)..(328): Selenocysteine
  MOD_RES (373)..(373): Selenocysteine
  MOD_RES (379)..(379): Selenocysteine
  MOD_RES (401)..(401): Selenocysteine
  MOD_RES (422)..(422): Selenocysteine
  MOD_RES (430)..(430): Selenocysteine
  MOD_RES (439)..(439): Selenocysteine
  MOD_RES (479)..(479): Selenocysteine
  MOD_RES (481)..(481): Selenocysteine
MKGRNWKXXKIFINNEWQNSESGRVFPVYNPAXGEQVCEVQEADKADIDKAVQAARLAFSLGSVWRRMDASERGRLLDKLADLVERDRAVLAXMESLNGGKPFLQAFYVDLQGVIKXFRYYAGWADKIHGMXIPVDGDYFXFXRHEPIGVCGQIIPWNFPLLMFAWKIAPALCCGNXVVIKPAEQXPLSALYMGALIKEAGFPPGVINILPGYGPXAGAAIASHIGIDKIAFXGSXEVGKLIQEAAGRSNLKRVXLELGGKSPNIIFADADLDYAVEQAHQGVFFNQGQCCXAGSRIFVEESIYEEFVRRSVERAKRRVVGSPFDPXXEQGPQIDKKQYNKILELIQSGVAEGAKLECGGKGLGRKGFFIEPXVFSNVXDDMRIAKEEIFGPVQEILRFKXMDEVIERANNSDFGLVAAVFXNDINKALXVSSAMQAGXVWINCYNALNAQSPFGGFKMSGNGREMGEFGLREYSEVKXVXVKIPQKNS

SEQ ID NO: 2200 - protein, 497 aa, Homo sapiens
  MOD_RES (7)..(7): Selenocysteine
  MOD_RES (41)..(41): Selenocysteine
  MOD_RES (101)..(101): Selenocysteine
  MOD_RES (125)..(125): Selenocysteine
  MOD_RES (140)..(140): Selenocysteine
  MOD_RES (149)..(149): Selenocysteine
  MOD_RES (151)..(151): Selenocysteine
  MOD_RES (185)..(185): Selenocysteine
  MOD_RES (194)..(194): Selenocysteine
  MOD_RES (224)..(224): Selenocysteine
  MOD_RES (241)..(241): Selenocysteine
  MOD_RES (244)..(244): Selenocysteine
  MOD_RES (263)..(263): Selenocysteine
  MOD_RES (300)..(300): Selenocysteine
  MOD_RES (335)..(336): Selenocysteine
  MOD_RES (381)..(381): Selenocysteine
  MOD_RES (387)..(387): Selenocysteine
  MOD_RES (409)..(409): Selenocysteine
  MOD_RES (430)..(430): Selenocysteine
  MOD_RES (438)..(438): Selenocysteine
  MOD_RES (447)..(447): Selenocysteine
  MOD_RES (487)..(487): Selenocysteine
  MOD_RES (489)..(489): Selenocysteine
MKNQCEXVWLKSPIKLKLIFINNEWQNSESGRVFPVYNPAXGEQVCEVQEADKADIDKAVQAARLAFSLGSVWRRMDASERGRLLDKLADLVERDRAVLAXMESLNGGKPFLQAFYVDLQGVIKXFRYYAGWADKIHGMXIPVDGDYFXFXRHEPIGVCGQIIPWNFPLLMFAWKIAPALCCGNXVVIKPAEQXPLSALYMGALIKEAGFPPGVINILPGYGPXAGAAIASHIGIDKIAFXGSXEVGKLIQEAAGRSNLKRVXLELGGKSPNIIFADADLDYAVEQAHQGVFFNQGQCCXAGSRIFVEESIYEEFVRRSVERAKRRVVGSPFDPXXEQGPQIDKKQYNKILELIQSGVAEGAKLECGGKGLGRKGFFIEPXVFSNVXDDMRIAKEEIFGPVQEILRFKXMDEVIERANNSDFGLVAAVFXNDINKALXVSSAMQAGXVWINCYNALNAQSPFGGFKMSGNGREMGEFGLREYSEVKXVXVKIPQKNS

SEQ ID NO: 2201 - protein, 518 aa, Homo sapiens
  MOD_RES (2)..(2): Selenocysteine
  MOD_RES (30)..(30): Selenocysteine
  MOD_RES (38)..(38): Selenocysteine
  MOD_RES (62)..(62): Selenocysteine
  MOD_RES (122)..(122): Selenocysteine
  MOD_RES (146)..(146): Selenocysteine
  MOD_RES (161)..(161): Selenocysteine
  MOD_RES (170)..(170): Selenocysteine
  MOD_RES (172)..(172): Selenocysteine
  MOD_RES (206)..(206): Selenocysteine
  MOD_RES (215)..(215): Selenocysteine
  MOD_RES (245)..(245): Selenocysteine
  MOD_RES (262)..(262): Selenocysteine
  MOD_RES (265)..(265): Selenocysteine
  MOD_RES (284)..(284): Selenocysteine
  MOD_RES (321)..(321): Selenocysteine
  MOD_RES (356)..(357): Selenocysteine
  MOD_RES (402)..(402): Selenocysteine
  MOD_RES (408)..(408): Selenocysteine
  MOD_RES (430)..(430): Selenocysteine
  MOD_RES (451)..(451): Selenocysteine
  MOD_RES (459)..(459): Selenocysteine
  MOD_RES (468)..(468): Selenocysteine
  MOD_RES (508)..(508): Selenocysteine
  MOD_RES (510)..(510): Selenocysteine
MXSSKIEMPGEVKADPAALMASLHLLPSPXPNLEIKYXKIFINNEWQNSESGRVFPVYNPAXGEQVCEVQEADKADIDKAVQAARLAFSLGSVWRRMDASERGRLLDKLADLVERDRAVLAXMESLNGGKPFLQAFYVDLQGVIKXFRYYAGWADKIHGMXIPVDGDYFXFXRHEPIGVCGQIIPWNFPLLMFAWKIAPALCCGNXVVIKPAEQXPLSALYMGALIKEAGFPPGVINILPGYGPXAGAAIASHIGIDKIAFXGSXEVGKLIQEAAGRSNLKRVXLELGGKSPNIIFADADLDYAVEQAHQGVFFNQGQCCXAGSRIFVEESIYEEFVRRSVERAKRRVVGSPFDPXXEQGPQIDKKQYNKILELIQSGVAEGAKLECGGKGLGRKGFFIEPXVFSNVXDDMRIAKEEIFGPVQEILRFKXMDEVIERANNSDFGLVAAVFXNDINKALXVSSAMQAGXVWINCYNALNAQSPFGGFKMSGNGREMGEFGLREYSEVKXVXVKIPQKNS

SEQ ID NO: 2202 - protein, 480 aa, Homo sapiens
  MOD_RES (2)..(2): Selenocysteine
  MOD_RES (30)..(30): Selenocysteine
  MOD_RES (38)..(38): Selenocysteine
  MOD_RES (62)..(62): Selenocysteine
  MOD_RES (122)..(122): Selenocysteine
  MOD_RES (146)..(146): Selenocysteine
  MOD_RES (161)..(161): Selenocysteine
  MOD_RES (170)..(170): Selenocysteine
  MOD_RES (172)..(172): Selenocysteine
  MOD_RES (206)..(206): Selenocysteine
  MOD_RES (215)..(215): Selenocysteine
  MOD_RES (246)..(246): Selenocysteine
  MOD_RES (283)..(283): Selenocysteine
  MOD_RES (318)..(319): Selenocysteine
  MOD_RES (364)..(364): Selenocysteine
  MOD_RES (370)..(370): Selenocysteine
  MOD_RES (392)..(392): Selenocysteine
  MOD_RES (413)..(413): Selenocysteine
  MOD_RES (421)..(421): Selenocysteine
  MOD_RES (430)..(430): Selenocysteine
  MOD_RES (470)..(470): Selenocysteine
  MOD_RES (472)..(472): Selenocysteine
MXSSKIEMPGEVKADPAALMASLHLLPSPXPNLEIKYXKIFINNEWQNSESGRVFPVYNPAXGEQVCEVQEADKADIDKAVQAARLAFSLGSVWRRMDASERGRLLDKLADLVERDRAVLAXMESLNGGKPFLQAFYVDLQGVIKXFRYYAGWADKIHGMXIPVDGDYFXFXRHEPIGVCGQIIPWNFPLLMFAWKIAPALCCGNXVVIKPAEQXPLSALYMGALIKEVGKLIQEAAGRSNLKRVXLELGGKSPNIIFADADLDYAVEQAHQGVFFNQGQCCXAGSRIFVEESIYEEFVRRSVERAKRRVVGSPFDPXXEQGPQIDKKQYNKILELIQSGVAEGAKLECGGKGLGRKGFFIEPXVFSNVXDDMRIAKEEIFGPVQEILRFKXMDEVIERANNSDFGLVAAVFXNDINKALXVSSAMQAGXVWINCYNALNAQSPFGGFKMSGNGREMGEFGLREYSEVKXVXVKIPQKNS

SEQ ID NO: 2203 - protein, 40 aa, Homo sapiens
  MOD_RES (2)..(2): Selenocysteine
  MOD_RES (30)..(30): Selenocysteine
  MOD_RES (38)..(38): Selenocysteine
MXSSKIEMPGEVKADPAALMASLHLLPSPXPNLEIKYXKV

SEQ ID NO: 2204 - protein, 24 aa, Homo sapiens
  MOD_RES (1)..(1): Any amino acid
  MOD_RES (14)..(14): Selenocysteine
  MOD_RES (16)..(16): Selenocysteine
XGEFGLREYSEVKXVXVKIPQKNS

SEQ ID NO: 2205 - protein, 1620 aa, Homo sapiens
  MOD_RES (16)..(16): Selenocysteine
  MOD_RES (25)..(25): Selenocysteine
  MOD_RES (111)..(111): Selenocysteine
  MOD_RES (122)..(122): Selenocysteine
  MOD_RES (222)..(222): Selenocysteine
  MOD_RES (231)..(231): Selenocysteine
  MOD_RES (242)..(242): Selenocysteine
  MOD_RES (246)..(246): Selenocysteine
  MOD_RES (325)..(325): Selenocysteine
  MOD_RES (332)..(332): Selenocysteine
  MOD_RES (346)..(346): Selenocysteine
  MOD_RES (380)..(380): Selenocysteine
  MOD_RES (387)..(387): Selenocysteine
  MOD_RES (429)..(429): Selenocysteine
  MOD_RES (442)..(442): Selenocysteine
  MOD_RES (447)..(447): Selenocysteine
  MOD_RES (490)..(490): Selenocysteine
  MOD_RES (493)..(493): Selenocysteine
  MOD_RES (498)..(498): Selenocysteine
  MOD_RES (505)..(505): Selenocysteine
  MOD_RES (523)..(524): Selenocysteine
  MOD_RES (533)..(533): Selenocysteine
  MOD_RES (535)..(535): Selenocysteine
  MOD_RES (538)..(538): Selenocysteine
  MOD_RES (573)..(573): Selenocysteine
  MOD_RES (637)..(637): Selenocysteine
  MOD_RES (648)..(648): Selenocysteine
  MOD_RES (674)..(674): Selenocysteine
  MOD_RES (680)..(680): Selenocysteine
  MOD_RES (686)..(687): Selenocysteine
  MOD_RES (697)..(697): Selenocysteine
  MOD_RES (731)..(731): Selenocysteine
  MOD_RES (733)..(733): Selenocysteine
  MOD_RES (750)..(750): Selenocysteine
  MOD_RES (786)..(786): Selenocysteine
  MOD_RES (825)..(825): Selenocysteine
  MOD_RES (853)..(853): Selenocysteine
  MOD_RES (855)..(855): Selenocysteine
  MOD_RES (887)..(887): Selenocysteine
  MOD_RES (901)..(901): Selenocysteine
  MOD_RES (917)..(917): Selenocysteine
  MOD_RES (967)..(967): Selenocysteine
  MOD_RES (1012)..(1012): Selenocysteine
  MOD_RES (1026)..(1026): Selenocysteine
  MOD_RES (1041)..(1041): Selenocysteine
  MOD_RES (1085)..(1085): Selenocysteine
  MOD_RES (1087)..(1087): Selenocysteine
  MOD_RES (1090)..(1090): Selenocysteine
  MOD_RES (1102)..(1102): Selenocysteine
  MOD_RES (1117)..(1117): Selenocysteine
  MOD_RES (1151)..(1151): Selenocysteine
  MOD_RES (1211)..(1211): Selenocysteine
  MOD_RES (1258)..(1258): Selenocysteine
  MOD_RES (1307)..(1307): Selenocysteine
  MOD_RES (1310)..(1310): Selenocysteine
  MOD_RES (1312)..(1312): Selenocysteine
  MOD_RES (1343)..(1343): Selenocysteine
  MOD_RES (1363)..(1363): Selenocysteine
  MOD_RES (1387)..(1387): Selenocysteine
  MOD_RES (1395)..(1395): Selenocysteine
  MOD_RES (1446)..(1447): Selenocysteine
  MOD_RES (1457)..(1457): Selenocysteine
  MOD_RES (1500)..(1500): Selenocysteine
  MOD_RES (1506)..(1506): Selenocysteine
  MOD_RES (1512)..(1512): Selenocysteine
  MOD_RES (1516)..(1516): Selenocysteine
  MOD_RES (1540)..(1540): Selenocysteine
  MOD_RES (1547)..(1547): Selenocysteine
  MOD_RES (1563)..(1563): Selenocysteine
  MOD_RES (1597)..(1597): Selenocysteine
  MOD_RES (1607)..(1607): Selenocysteine
MGAIGLLWLLPLLLSXAAVGSGMGXGQRAGSPAAGPPLQPREPLSYSRLQRKSLAVDFVVPSLFRVYARDLLLPPSSSELKAGRPEARGSLALDCAPLLRLLGPAPGVSWXAGSPAPAEARXLSRVLKGGSVRKLRRAKQLVLELGEEAILEGCVGPPGEAAVGLLQFNLSELFSWWIRQGEGRLRIRLMPEKKASEVGREGRLSAAIRASQPRLLFQIFGXGHSSLESPXNMPSPSPDYFXWNLXWIMKDSFPFLSHRSRYGLECSFDFPCELEYSPPLHDLRNQSWSWRRIPSEEASQMDLLDGPGAERSKEMPRGSFLLLNXSADSKHXILSPWMRSSSEHCXLAVSVHRHLQPSGRYIAQLLPHNEAAREILLMPXPGKHGWXVLQGRIGRPDNPFRVALEYISSGNRSLSAVDFFALKNCSEGXSPGSKMALQSSFXCWNGXVLQLGQACDFHQDCAQGEDESQMCRKLPVGFYCNFEDGFCGWXQGXLSPHXPQWQVRXLKDARFQDHQDHALLLSXXDVPASESAXVXSAXFPAPIKSSPCELRMSWLIRGVLRGNVSLVLVENKXGKEQGRMVWHVAAYEGLSLWQWMVLPLLDVSDRFWLQMVAWWGQGSRAIVAFDNISISLDCYLXISGEDKILQNXAPKSRNLFERNPNKELKPGENSPRQXPIFDPXVHWLFXXCGASGPHGPXQAQCNNAYQNSNLSVEVGSEGPLKGIQIWKVPAXDXYSISGYGAAGGKGGKNXMMRSHGVSVLGIFNLEKDDMLYILVGQQGEDACPSXNQLIQKVCIGENNVIEEEIRVNRSVHEWAGGGGGGGGAXYVFKMKDGVPVPLIIAAGGGGRAYGAKXDXFHPERLENNSSVLGLNGNSGAAGGGGGWNDNXSLLWAGKSLQEGAXGGHSCPQAMKKWGWEXRGGFGGGGGGCSSGGGGGGYIGGNAASNNDPEMDGEDGVSFISPLGILYXPALKVMEGHGEVNIKHYLNCSHCEVDECHMDPESHKVICFCDHGXVLAEDGVSCIVSPXPEPHLPLSLILSVVXSALVAALVLAFSGIMIVYRRKHQELQAMQMELQSPEYKLSKLRXSXIMXDYNPNYCFAGKXSSISDLKEVPRKNIXLIRGLGHGAFGEVYEGQVSGMPNDPSPLQVAVKXLPEVCSEQDELDFLMEALIISKFNHQNIVRCIGVSLQSLPRFILLELMAGGDLKSFLREXRPRPSQPSSLAMLDLLHVARDIACGCQYLEENHFIHRDIAARNCLLXCPGPGRVAKIGDFGMARDIYRASYYRKGGCAMLPVKWMPPEAFMEGIFXSKXDXWSFGVLLWEIFSLGYMPYPSKSNQEVLEFVXSGGRMDPPKNCPGPVYRIMXQCWQHQPEDRPNFAIILERIEYCXQDPDVINXALPIEYGPLVEEEEKVPVRPKDPEGVPPLLVSQQAKREEERSPAAPPPLPXXSSGKAAKKPXAAEISVRVPRGPAVEGGHVNMAFSQSNPPSELHKVHGSRNKPXSLWNPXYGSWFXEKPXKKNNPIAKKEPHDRGNLGLEGSCXVPPNVAXGRLPGASLLLEPSSLXANMKEVPLFRLRHFPCGNVNYGYQQQGLPLEAAXAPGAGHYEDXILKSKNSMNQPGP

SEQ ID NO: 2206 - protein, 1243 aa, Homo sapiens
  MOD_RES (3)..(3): Selenocysteine
  MOD_RES (10)..(10): Selenocysteine
  MOD_RES (52)..(52): Selenocysteine
  MOD_RES (65)..(65): Selenocysteine
  MOD_RES (70)..(70): Selenocysteine
  MOD_RES (113)..(113): Selenocysteine
  MOD_RES (116)..(116): Selenocysteine
  MOD_RES (121)..(121): Selenocysteine
  MOD_RES (128)..(128): Selenocysteine
  MOD_RES (146)..(147): Selenocysteine
  MOD_RES (156)..(156): Selenocysteine
  MOD_RES (158)..(158): Selenocysteine
  MOD_RES (161)..(161): Selenocysteine
  MOD_RES (196)..(196): Selenocysteine
  MOD_RES (260)..(260): Selenocysteine
  MOD_RES (271)..(271): Selenocysteine
  MOD_RES (297)..(297): Selenocysteine
  MOD_RES (303)..(303): Selenocysteine
  MOD_RES (309)..(310): Selenocysteine
  MOD_RES (320)..(320): Selenocysteine
  MOD_RES (354)..(354): Selenocysteine
  MOD_RES (356)..(356): Selenocysteine
  MOD_RES (373)..(373): Selenocysteine
  MOD_RES (409)..(409): Selenocysteine
  MOD_RES (448)..(448): Selenocysteine
  MOD_RES (476)..(476): Selenocysteine
  MOD_RES (478)..(478): Selenocysteine
  MOD_RES (510)..(510): Selenocysteine
  MOD_RES (524)..(524): Selenocysteine
  MOD_RES (540)..(540): Selenocysteine
  MOD_RES (590)..(590): Selenocysteine
  MOD_RES (635)..(635): Selenocysteine
  MOD_RES (649)..(649): Selenocysteine
  MOD_RES (664)..(664): Selenocysteine
  MOD_RES (708)..(708): Selenocysteine
  MOD_RES (710)..(710): Selenocysteine
  MOD_RES (713)..(713): Selenocysteine
  MOD_RES (725)..(725): Selenocysteine
  MOD_RES (740)..(740): Selenocysteine
  MOD_RES (774)..(774): Selenocysteine
  MOD_RES (834)..(834): Selenocysteine
  MOD_RES (881)..(881): Selenocysteine
  MOD_RES (930)..(930): Selenocysteine
  MOD_RES (933)..(933): Selenocysteine
  MOD_RES (935)..(935): Selenocysteine
  MOD_RES (966)..(966): Selenocysteine
  MOD_RES (986)..(986): Selenocysteine
  MOD_RES (1010)..(1010): Selenocysteine
  MOD_RES (1018)..(1018): Selenocysteine
  MOD_RES (1069)..(1070): Selenocysteine
  MOD_RES (1080)..(1080): Selenocysteine
  MOD_RES (1123)..(1123): Selenocysteine
  MOD_RES (1129)..(1129): Selenocysteine
  MOD_RES (1135)..(1135): Selenocysteine
  MOD_RES (1139)..(1139): Selenocysteine
  MOD_RES (1163)..(1163): Selenocysteine
  MOD_RES (1170)..(1170): Selenocysteine
  MOD_RES (1186)..(1186): Selenocysteine
  MOD_RES (1220)..(1220): Selenocysteine
  MOD_RES (1230)..(1230): Selenocysteine
MPXPGKHGWXVLQGRIGRPDNPFRVALEYISSGNRSLSAVDFFALKNCSEGXSPGSKMALQSSFXCWNGXVLQLGQACDFHQDCAQGEDESQMCRKLPVGFYCNFEDGFCGWXQGXLSPHXPQWQVRXLKDARFQDHQDHALLLSXXDVPASESAXVXSAXFPAPIKSSPCELRMSWLIRGVLRGNVSLVLVENKXGKEQGRMVWHVAAYEGLSLWQWMVLPLLDVSDRFWLQMVAWWGQGSRAIVAFDNISISLDCYLXISGEDKILQNXAPKSRNLFERNPNKELKPGENSPRQXPIFDPXVHWLFXXCGASGPHGPXQAQCNNAYQNSNLSVEVGSEGPLKGIQIWKVPAXDXYSISGYGAAGGKGGKNXMMRSHGVSVLGIFNLEKDDMLYILVGQQGEDACPSXNQLIQKVCIGENNVIEEEIRVNRSVHEWAGGGGGGGGAXYVFKMKDGVPVPLIIAAGGGGRAYGAKXDXFHPERLENNSSVLGLNGNSGAAGGGGGWNDNXSLLWAGKSLQEGAXGGHSCPQAMKKWGWEXRGGFGGGGGGCSSGGGGGGYIGGNAASNNDPEMDGEDGVSFISPLGILYXPALKVMEGHGEVNIKHYLNCSHCEVDECHMDPESHKVICFCDHGXVLAEDGVSCIVSPXPEPHLPLSLILSVVXSALVAALVLAFSGIMIVYRRKHQELQAMQMELQSPEYKLSKLRXSXIMXDYNPNYCFAGKXSSISDLKEVPRKNIXLIRGLGHGAFGEVYEGQVSGMPNDPSPLQVAVKXLPEVCSEQDELDFLMEALIISKFNHQNIVRCIGVSLQSLPRFILLELMAGGDLKSFLREXRPRPSQPSSLAMLDLLHVARDIACGCQYLEENHFIHRDIAARNCLLXCPGPGRVAKIGDFGMARDIYRASYYRKGGCAMLPVKWMPPEAFMEGIFXSKXDXWSFGVLLWEIFSLGYMPYPSKSNQEVLEFVXSGGRMDPPKNCPGPVYRIMXQCWQHQPEDRPNFAIILERIEYCXQDPDVINXALPIEYGPLVEEEEKVPVRPKDPEGVPPLLVSQQAKREEERSPAAPPPLPXXSSGKAAKKPXAAEISVRVPRGPAVEGGHVNMAFSQSNPPSELHKVHGSRNKPXSLWNPXYGSWFXEKPXKKNNPIAKKEPHDRGNLGLEGSCXVPPNVAXGRLPGASLLLEPSSLXANMKEVPLFRLRHFPCGNVNYGYQQQGLPLEAAXAPGAGHYEDXILKSKNSMNQPGP

SEQ ID NO: 2207 - protein, 580 aa, Homo sapiens
  MOD_RES (3)..(4): Selenocysteine
  MOD_RES (10)..(10): Selenocysteine
  MOD_RES (45)..(45): Selenocysteine
  MOD_RES (47)..(47): Selenocysteine
  MOD_RES (50)..(50): Selenocysteine
  MOD_RES (62)..(62): Selenocysteine
  MOD_RES (77)..(77): Selenocysteine
  MOD_RES (111)..(111): Selenocysteine
  MOD_RES (171)..(171): Selenocysteine
  MOD_RES (218)..(218): Selenocysteine
  MOD_RES (267)..(267): Selenocysteine
  MOD_RES (270)..(270): Selenocysteine
  MOD_RES (272)..(272): Selenocysteine
  MOD_RES (303)..(303): Selenocysteine
  MOD_RES (323)..(323): Selenocysteine
  MOD_RES (347)..(347): Selenocysteine
  MOD_RES (355)..(355): Selenocysteine
  MOD_RES (406)..(407): Selenocysteine
  MOD_RES (417)..(417): Selenocysteine
  MOD_RES (460)..(460): Selenocysteine
  MOD_RES (466)..(466): Selenocysteine
  MOD_RES (472)..(472): Selenocysteine
  MOD_RES (476)..(476): Selenocysteine
  MOD_RES (500)..(500): Selenocysteine
  MOD_RES (507)..(507): Selenocysteine
  MOD_RES (523)..(523): Selenocysteine
  MOD_RES (557)..(557): Selenocysteine
  MOD_RES (567)..(567): Selenocysteine
MVXXCSAIYXFQFIRSSVYRRKHQELQAMQMELQSPEYKLSKLRXSXIMXDYNPNYCFAGKXSSISDLKEVPRKNIXLIRGLGHGAFGEVYEGQVSGMPNDPSPLQVAVKXLPEVCSEQDELDFLMEALIISKFNHQNIVRCIGVSLQSLPRFILLELMAGGDLKSFLREXRPRPSQPSSLAMLDLLHVARDIACGCQYLEENHFIHRDIAARNCLLXCPGPGRVAKIGDFGMARDIYRASYYRKGGCAMLPVKWMPPEAFMEGIFXSKXDXWSFGVLLWEIFSLGYMPYPSKSNQEVLEFVXSGGRMDPPKNCPGPVYRIMXQCWQHQPEDRPNFAIILERIEYCXQDPDVINXALPIEYGPLVEEEEKVPVRPKDPEGVPPLLVSQQAKREEERSPAAPPPLPXXSSGKAAKKPXAAEISVRVPRGPAVEGGHVNMAFSQSNPPSELHKVHGSRNKPXSLWNPXYGSWFXEKPXKKNNPIAKKEPHDRGNLGLEGSCXVPPNVAXGRLPGASLLLEPSSLXANMKEVPLFRLRHFPCGNVNYGYQQQGLPLEAAXAPGAGHYEDXILKSKNSMNQPGP

SEQ ID NO: 2208 - protein, 152 aa, Homo sapiens
  MOD_RES (15)..(15): Selenocysteine
  MOD_RES (49)..(49): Selenocysteine
  MOD_RES (80)..(80): Selenocysteine
  MOD_RES (91)..(91): Selenocysteine
  MOD_RES (96)..(96): Selenocysteine
  MOD_RES (99)..(99): Selenocysteine
  MOD_RES (106)..(106): Selenocysteine
  MOD_RES (116)..(116): Selenocysteine
  MOD_RES (134)..(134): Selenocysteine
  MOD_RES (144)..(144): Selenocysteine
SSISDLKEVPRKNIXLIRGLGHGAFGEVYEGQVSGMPNDPSPLQVAVKXLPEVCSEQDELDFLMEALIISLSWKQLFCFXFCLRPSWEKSXMNSSXQSXHQYLRKXLSCPLRHFLXQVPEQHPHSSSHSPANGXPVEPAVVLPXCSPARFWV

SEQ ID NO: 2209 - protein, 3859 aa, Homo sapiens
  MOD_RES (104)..(104): Selenocysteine
  MOD_RES (113)..(113): Selenocysteine
  MOD_RES (128)..(128): Selenocysteine
  MOD_RES (133)..(133): Selenocysteine
  MOD_RES (140)..(141): Selenocysteine
  MOD_RES (152)..(152): Selenocysteine
  MOD_RES (167)..(167): Selenocysteine
  MOD_RES (170)..(170): Selenocysteine
  MOD_RES (173)..(173): Selenocysteine
  MOD_RES (179)..(179): Selenocysteine
  MOD_RES (182)..(182): Selenocysteine
  MOD_RES (185)..(185): Selenocysteine
  MOD_RES (196)..(196): Selenocysteine
  MOD_RES (230)..(230): Selenocysteine
  MOD_RES (233)..(233): Selenocysteine
  MOD_RES (264)..(264): Selenocysteine
  MOD_RES (281)..(281): Selenocysteine
  MOD_RES (304)..(304): Selenocysteine
  MOD_RES (323)..(323): Selenocysteine
  MOD_RES (350)..(350): Selenocysteine
  MOD_RES (354)..(354): Selenocysteine
  MOD_RES (371)..(371): Selenocysteine
  MOD_RES (376)..(376): Selenocysteine
  MOD_RES (382)..(382): Selenocysteine
  MOD_RES (399)..(399): Selenocysteine
  MOD_RES (409)..(409): Selenocysteine
  MOD_RES (412)..(412): Selenocysteine
  MOD_RES (425)..(425): Selenocysteine
  MOD_RES (448)..(448): Selenocysteine
  MOD_RES (467)..(467): Selenocysteine
  MOD_RES (480)..(480): Selenocysteine
  MOD_RES (489)..(489): Selenocysteine
  MOD_RES (498)..(500): Selenocysteine
  MOD_RES (528)..(530): Selenocysteine
  MOD_RES (534)..(534): Selenocysteine
  MOD_RES (536)..(536): Selenocysteine
  MOD_RES (541)..(541): Selenocysteine
  MOD_RES (545)..(545): Selenocysteine
  MOD_RES (548)..(548): Selenocysteine
  MOD_RES (551)..(551): Selenocysteine
  MOD_RES (555)..(555): Selenocysteine
  MOD_RES (565)..(565): Selenocysteine
  MOD_RES (567)..(567): Selenocysteine
  MOD_RES (569)..(569): Selenocysteine
  MOD_RES (595)..(595): Selenocysteine
  MOD_RES (611)..(612): Selenocysteine
  MOD_RES (616)..(616): Selenocysteine
  MOD_RES (618)..(618): Selenocysteine
  MOD_RES (620)..(620): Selenocysteine
  MOD_RES (630)..(630): Selenocysteine
  MOD_RES (642)..(642): Selenocysteine
  MOD_RES (659)..(659): Selenocysteine
  MOD_RES (663)..(663): Selenocysteine
  MOD_RES (667)..(667): Selenocysteine
  MOD_RES (682)..(682): Selenocysteine
  MOD_RES (689)..(689): Selenocysteine
  MOD_RES (706)..(706): Selenocysteine
  MOD_RES (708)..(708): Selenocysteine
  MOD_RES (710)..(710): Selenocysteine
  MOD_RES (714)..(714): Selenocysteine
  MOD_RES (736)..(736): Selenocysteine
  MOD_RES (739)..(739): Selenocysteine
  MOD_RES (741)..(741): Selenocysteine
  MOD_RES (746)..(746): Selenocysteine
  MOD_RES (754)..(754): Selenocysteine
  MOD_RES (801)..(801): Selenocysteine
  MOD_RES (805)..(805): Selenocysteine
  MOD_RES (848)..(848): Selenocysteine
  MOD_RES (850)..(850): Selenocysteine
  MOD_RES (854)..(854): Selenocysteine
  MOD_RES (856)..(856): Selenocysteine
  MOD_RES (874)..(874): Selenocysteine
  MOD_RES (881)..(881): Selenocysteine
  MOD_RES (898)..(898): Selenocysteine
  MOD_RES (921)..(921): Selenocysteine
  MOD_RES (945)..(945): Selenocysteine
  MOD_RES (947)..(947): Selenocysteine
  MOD_RES (949)..(949): Selenocysteine
  MOD_RES (988)..(988): Selenocysteine
  MOD_RES (992)..(992): Selenocysteine
  MOD_RES (995)..(995): Selenocysteine
  MOD_RES (997)..(997): Selenocysteine
  MOD_RES (1023)..(1023): Selenocysteine
  MOD_RES (1031)..(1031): Selenocysteine
  MOD_RES (1040)..(1040): Selenocysteine
  MOD_RES (1087)..(1087): Selenocysteine
  MOD_RES (1089)..(1089): Selenocysteine
  MOD_RES (1095)..(1095): Selenocysteine
  MOD_RES (1110)..(1110): Selenocysteine
  MOD_RES (1134)..(1134): Selenocysteine
  MOD_RES (1136)..(1136): Selenocysteine
  MOD_RES (1138)..(1138): Selenocysteine
  MOD_RES (1140)..(1140): Selenocysteine
  MOD_RES (1142)..(1142): Selenocysteine
  MOD_RES (1162)..(1162): Selenocysteine
  MOD_RES (1175)..(1175): Selenocysteine
  MOD_RES (1182)..(1182): Selenocysteine
  MOD_RES (1190)..(1190): Selenocysteine
  MOD_RES (1205)..(1205): Selenocysteine
  MOD_RES (1229)..(1229): Selenocysteine
  MOD_RES (1231)..(1231): Selenocysteine
  MOD_RES (1233)..(1233): Selenocysteine
  MOD_RES (1235)..(1235): Selenocysteine
  MOD_RES (1242)..(1242): Selenocysteine
  MOD_RES (1259)..(1259): Selenocysteine
  MOD_RES (1275)..(1276): Selenocysteine
  MOD_RES (1278)..(1278): Selenocysteine
  MOD_RES (1282)..(1282): Selenocysteine
  MOD_RES (1284)..(1284): Selenocysteine
  MOD_RES (1307)..(1307): Selenocysteine
  MOD_RES (1324)..(1324): Selenocysteine
  MOD_RES (1332)..(1332): Selenocysteine
  MOD_RES (1337)..(1337): Selenocysteine
  MOD_RES (1354)..(1354): Selenocysteine
  MOD_RES (1370)..(1371): Selenocysteine
  MOD_RES (1373)..(1373): Selenocysteine
  MOD_RES (1375)..(1375): Selenocysteine
  MOD_RES (1377)..(1377): Selenocysteine
  MOD_RES (1379)..(1379): Selenocysteine
  MOD_RES (1385)..(1385): Selenocysteine
  MOD_RES (1402)..(1402): Selenocysteine
  MOD_RES (1419)..(1419): Selenocysteine
  MOD_RES (1423)..(1423): Selenocysteine
  MOD_RES (1427)..(1427): Selenocysteine
  MOD_RES (1432)..(1432): Selenocysteine
  MOD_RES (1465)..(1465): Selenocysteine
  MOD_RES (1468)..(1468): Selenocysteine
  MOD_RES (1470)..(1470): Selenocysteine
  MOD_RES (1472)..(1472): Selenocysteine
  MOD_RES (1512)..(1513): Selenocysteine
  MOD_RES (1517)..(1517): Selenocysteine
  MOD_RES (1519)..(1519): Selenocysteine
  MOD_RES (1560)..(1561): Selenocysteine
  MOD_RES (1565)..(1565): Selenocysteine
  MOD_RES (1567)..(1567): Selenocysteine
  MOD_RES (1569)..(1569): Selenocysteine
  MOD_RES (1604)..(1604): Selenocysteine
  MOD_RES (1608)..(1608): Selenocysteine
  MOD_RES (1626)..(1626): Selenocysteine
  MOD_RES (1655)..(1655): Selenocysteine
  MOD_RES (1657)..(1657): Selenocysteine
  MOD_RES (1663)..(1663): Selenocysteine
  MOD_RES (1678)..(1678): Selenocysteine
  MOD_RES (1702)..(1702): Selenocysteine
  MOD_RES (1704)..(1704): Selenocysteine
  MOD_RES (1732)..(1732): Selenocysteine
  MOD_RES (1749)..(1749): Selenocysteine
  MOD_RES (1753)..(1753): Selenocysteine
  MOD_RES (1755)..(1755): Selenocysteine
  MOD_RES (1762)..(1762): Selenocysteine
  MOD_RES (1779)..(1779): Selenocysteine
  MOD_RES (1796)..(1796): Selenocysteine
  MOD_RES (1800)..(1800): Selenocysteine
  MOD_RES (1802)..(1802): Selenocysteine
  MOD_RES (1804)..(1804): Selenocysteine
  MOD_RES (1824)..(1824): Selenocysteine
  MOD_RES (1841)..(1841): Selenocysteine
  MOD_RES (1869)..(1869): Selenocysteine
  MOD_RES (1872)..(1872): Selenocysteine
  MOD_RES (1886)..(1886): Selenocysteine
  MOD_RES (1914)..(1914): Selenocysteine
  MOD_RES (1931)..(1931): Selenocysteine
  MOD_RES (1935)..(1935): Selenocysteine
  MOD_RES (1961)..(1961): Selenocysteine
  MOD_RES (1978)..(1978): Selenocysteine
  MOD_RES (2000)..(2000): Selenocysteine
  MOD_RES (2009)..(2009): Selenocysteine
  MOD_RES (2015)..(2015): Selenocysteine
  MOD_RES (2029)..(2029): Selenocysteine
  MOD_RES (2038)..(2038): Selenocysteine
  MOD_RES (2042)..(2042): Selenocysteine
  MOD_RES (2051)..(2051): Selenocysteine
  MOD_RES (2081)..(2081): Selenocysteine
  MOD_RES (2085)..(2085): Selenocysteine
  MOD_RES (2115)..(2115): Selenocysteine
  MOD_RES (2123)..(2123): Selenocysteine
  MOD_RES (2132)..(2132): Selenocysteine
  MOD_RES (2136)..(2136): Selenocysteine
  MOD_RES (2162)..(2162): Selenocysteine
  MOD_RES (2179)..(2179): Selenocysteine
  MOD_RES (2183)..(2183): Selenocysteine
  MOD_RES (2188)..(2188): Selenocysteine
  MOD_RES (2258)..(2258): Selenocysteine
  MOD_RES (2264)..(2264): Selenocysteine
  MOD_RES (2309)..(2309): Selenocysteine
  MOD_RES (2323)..(2323): Selenocysteine
  MOD_RES (2338)..(2338): Selenocysteine
  MOD_RES (2340)..(2340): Selenocysteine
  MOD_RES (2357)..(2358): Selenocysteine
  MOD_RES (2377)..(2377): Selenocysteine
  MOD_RES (2398)..(2398): Selenocysteine
  MOD_RES (2409)..(2409): Selenocysteine
  MOD_RES (2454)..(2454): Selenocysteine
  MOD_RES (2457)..(2457): Selenocysteine
  MOD_RES (2553)..(2554): Selenocysteine
  MOD_RES (2589)..(2589): Selenocysteine
  MOD_RES (2591)..(2591): Selenocysteine
  MOD_RES (2613)..(2613): Selenocysteine
  MOD_RES (2712)..(2713): Selenocysteine
  MOD_RES (2716)..(2716): Selenocysteine
  MOD_RES (2737)..(2737): Selenocysteine
  MOD_RES (2743)..(2743): Selenocysteine
  MOD_RES (2755)..(2755): Selenocysteine
  MOD_RES (2768)..(2768): Selenocysteine
  MOD_RES (2786)..(2786): Selenocysteine
  MOD_RES (2818)..(2818): Selenocysteine
  MOD_RES (2826)..(2826): Selenocysteine
  MOD_RES (2843)..(2843): Selenocysteine
  MOD_RES (2853)..(2853): Selenocysteine
  MOD_RES (2871)..(2871): Selenocysteine
  MOD_RES (2873)..(2873): Selenocysteine
  MOD_RES (3018)..(3018): Selenocysteine
  MOD_RES (3029)..(3029): Selenocysteine
  MOD_RES (3036)..(3036): Selenocysteine
  MOD_RES (3050)..(3050): Selenocysteine
  MOD_RES (3055)..(3055): Selenocysteine
  MOD_RES (3063)..(3063): Selenocysteine
  MOD_RES (3089)..(3089): Selenocysteine
  MOD_RES (3098)..(3098): Selenocysteine
  MOD_RES (3103)..(3103): Selenocysteine
  MOD_RES (3137)..(3137): Selenocysteine
  MOD_RES (3139)..(3139): Selenocysteine
  MOD_RES (3144)..(3144): Selenocysteine
  MOD_RES (3154)..(3154): Selenocysteine
  MOD_RES (3174)..(3174): Selenocysteine
  MOD_RES (3187)..(3187): Selenocysteine
  MOD_RES (3202)..(3202): Selenocysteine
  MOD_RES (3205)..(3206): Selenocysteine
  MOD_RES (3212)..(3212): Selenocysteine
  MOD_RES (3254)..(3254): Selenocysteine
  MOD_RES (3259)..(3259): Selenocysteine
  MOD_RES (3274)..(3274): Selenocysteine
  MOD_RES (3295)..(3296): Selenocysteine
  MOD_RES (3319)..(3319): Selenocysteine
  MOD_RES (3327)..(3327): Selenocysteine
  MOD_RES (3343)..(3343): Selenocysteine
  MOD_RES (3368)..(3368): Selenocysteine
  MOD_RES (3384)..(3384): Selenocysteine
  MOD_RES (3388)..(3388): Selenocysteine
  MOD_RES (3403)..(3403): Selenocysteine
  MOD_RES (3429)..(3429): Selenocysteine
  MOD_RES (3433)..(3433): Selenocysteine
  MOD_RES (3443)..(3443): Selenocysteine
  MOD_RES (3472)..(3473): Selenocysteine
  MOD_RES (3538)..(3538): Selenocysteine
  MOD_RES (3540)..(3540): Selenocysteine
  MOD_RES (3543)..(3543): Selenocysteine
  MOD_RES (3562)..(3563): Selenocysteine
  MOD_RES (3587)..(3587): Selenocysteine
  MOD_RES (3591)..(3592): Selenocysteine
  MOD_RES (3595)..(3595): Selenocysteine
  MOD_RES (3641)..(3641): Selenocysteine
  MOD_RES (3650)..(3650): Selenocysteine
  MOD_RES (3689)..(3689): Selenocysteine
  MOD_RES (3733)..(3733): Selenocysteine
  MOD_RES (3747)..(3747): Selenocysteine
  MOD_RES (3749)..(3751): Selenocysteine
  MOD_RES (3757)..(3758): Selenocysteine
  MOD_RES (3760)..(3760): Selenocysteine
  MOD_RES (3767)..(3767): Selenocysteine
  MOD_RES (3769)..(3769): Selenocysteine
  MOD_RES (3784)..(3784): Selenocysteine
  MOD_RES (3787)..(3787): Selenocysteine
  MOD_RES (3813)..(3813): Selenocysteine
  MOD_RES (3833)..(3833): Selenocysteine
  MOD_RES (3839)..(3839): Selenocysteine
  MOD_RES (3843)..(3843): Selenocysteine
MEPEDLPWPGELEEEEEEEEEEEEEEEEAAAAAAANVDDVVVVEEVEEEAGRELDSDSHYGPQHLESIDDEEDEEAKAWLQAHPGRILPPLSPPQHRYSEGERXSLEKIVPLXCHVWQQIVYQGNSRXQISDXNVVCLEXXAQRGSGDDQKXESWHCLPQEMDSSQXLDXSQXRFNVRXEDXEVXDFPSLEEGILXQSENQVKEPNRDLFCSPLLVIQDSFASPDLPLLXCLXQDQEFAPDSLFHQSELSFAPLRGIPDKSEDXEWSSRPSEVSEALFQAXAEVASDLASSRFSVSQHPLIGSXAVGSQCPFLPSEQGNNEEXISSVDELKIPKDCDRYDDLCSYMSWKXRKDXQWPENNLADKDQVSVAXSFDIXDENIAXKRSDHFDAARSYGQYWXQEDSSKQAEXYLXKGLQGKVESDVIXLDGLNENAVVCSERVAELQRKPXRESEYHSSDLRMLRMSPDXVPKAPKHLKAGDXSKGGIAKVXQSNLKSGIXXXPVDSDIGSHLSLSLEDLSQLAVSSPLEXXXGQHXDXLNQKXLADXHLXEEXLKVXAIPEPADQKXAXPXVLSSSHSHRGKPSIFYQQGLPDSHLXEEALKVSAAPGLADQXXGMSXLXSXSYSHREKPGXFYQQELPESNLXEEPLEVSAAPGPVEQKXGIPXVSSXSHSHVEDLLFFYRQXLPDGHLXDQALKVSAVSGPADQKXGXAXVLSXPHSHREKPGIFYQQEFADSHQXEEXLXKVSAXPGPADQKXEIPAVQSSSYSQREKPSILYPQDLADSHLPEEGLKVSAVAGPADQKXGLPXVPSSAYSHREKLLVFYQQALLDSHLPEEALKVSAVSGPADGKXGXPAVXSXSSASSSLGEKPSAFYQQXLPNSHLXEEALKVSIVPGPGDQKXGIPSAPSSFYSHREKPIIFSQQXLPDFLFPEEALKVSAVSVLAAQKXGXPXVSSNSHSHSEKSSVFYQQELPDSDLPRESLKMSAIPGLXDQKXVPXPXVPSGSFSHREKPSIFYQQEWPDSYAXEKALKVSXGPGPADQKXEIPAVQSSSYPQREKPSVLYPQVLSDSHLPEESLKVSAFPGPADQMXDXPAVPSXFYSQREKPGIFYQQXLPESHLPKEALKISVAPGLADQKXGXPXVXSXSYSQHREKPSIFHQQALPGXHIPEEAQKVSAVXGPGNQKXWIPRVLSXFYSQREKPGIFYQQXLPGSHIPEEAQKVSPVLGPADQKXGXPXPXSASYSHXEKPGIFYQQVLPDNHPXEEALKISVASEPVDQXXGXPAVXSXSYSQYREKPSIFYQQSLPSSHLXEEAKNVSAVPGPADQKXVIPILPSXFYSHXEKPGVFYQQVLPHSHPXEEALKISVASEPVDQXXGXPXVXSXSYSQHXEKPSIFYQQSLPGSHLXEEAKNVSAVPGPGDRKXGIPXLPSXFYSHXEKPGSFYQQVLPHSHLPEEALEVSVAPGPVDQXIGXPXVXSPSSSFGEKPIVIYKQAFPEGHLPEESLKVSVAPGPVGQXXGAPXIXSPSYSQHRAKSGSFYQLALLGSQIPEEALRVSSAPGPADQXXGIPXIXSXSYSFGEKPIVNYKQAFPDGHLPEEALKVSIVSGPXEKKXDIPAGPLGSSALGEKPIXFYRQALLDSPLNKEVVKVSAAPGPADQKXEXLPVHSXSYSNRGKPVIFYQQXLSDSHLPEEALKVPPVPGPDAQKXEXPSVSSSLYSYREKPIVFYQQALPDSELXQEALKVSAVPQPADQKXGLSXVXSSFYSHXEKPNISYQQELPDSHLXEEALKVSNVPGPADQKXGVSXVXSXSYSHREKPIVSYQRELPHFXEAGLKILRVPGPADQKXGINILPSNSYPQREHSVISYEQELPDLXEVXLKAIGVPGPADQKXGIQIASSSSYSNREKASIFHQQELPDVXEEALNVFVVPGQGDRKXEIPXVPLSYYSRREKPSVISQQELPDSHLXEEALKVSPVSIPAEQKXGIPIGLSSSYSHSHKEKLKISXVHIPDDQKXEFPAAXLSSYSQIEKPKISXVIGPNDQKXPSQXAFHSSYSQXVKPNILFQQQLPDRDQSKGILKISAVPELXDVNXGKPVSLSSSYFHREKSNIFSPQELPGSHVXEDVLKVSXIPGPAGQKXVLPXALPSSFSHREKPDIFYQKDLPDRHLXEDALKISSALGQADQIXGLQXVPSGXYSHGENHKLVSEHVQRLIDNLNSSDSSVSSNNVLLNSQADDRVVINKPESAGFRDVGSEEIQDAENSAKXLKEIRXLLMEAENMALKRCNFPAPLARFRDISDISFIQSKKVVCFKEPSSXGVSNGDLLHRQPFXEESPSSRCIQKDIGXQXNLKCRRGIENWEFISSXXVRSPLQEAESKVSMALEEXLRQYQAAKSVMRSEPEGCSGXIGNKIIIPMMXVIKSDSSSDASDGNGSCSWDSNLPESLESVSDVLLNFFPYVSPKXSIXDSREEEGVSESEDGGGSSVDSLAAHVKNLLQCESSLNHAKEILRNAEEEESRVRAHAWNMKFNLAHDCGYSISELNEDDRRKVEEIKAELFGHGRXXDLSKGLQSPRGMGCKPEAVCSHIIIESHEKGCFRXLXSEHPQLDRHPCAFRSAGPSEMXRGRQNPSSCRAKHVNLSASLDQNNSHFKVWNSLQLKSHSPFQNFIPDEFKISKGLRMPFDEKMDPWLSELVEPAFVPPKEVDFHSSSQMPSPEPMKKFXXSIXFSSHRHSKCISNSSVVKVGVXEGSQCXGASVGVFNSHFXEEQNPPRDLKQKXSSPSSFKMHSNSQDKEVXILAEGRRQSQKLPVDFERSFQEEKPLERSDFXGSHSEPSXRANCSNFKEIQISDNHXLISMGRPSSXLGVNRSSSRLGVKEKNVXIXPDLPSCIFLEQRELFEQSKAPRADDHVRKHHSPSPQHQDYVAPDLPSCIFLEQRELFEQCKAPYVDHQMRENHSPLPQGQDSIASDLPSPISLEQCQSKAPGVDDQMNKHHFPLPQGQDCVVEKNNQHKPKSHISNINVEAKFNXVVSQSAPNHCXLAASASXPPSNRKALSCVHIXLCPKXSSKLDSGXLDERFHSLDAASKARMNSEFNFDLHXVSSRSLEPXSKLLXSKPVAQDQESLGFLGPKSSLDFQVVQPSLPDSNXIXQDLKXIPSQNSQIVXSRQIQVNISDFEGHSNPEGXPVFADRLPEKMKXPLSAFSEKLSSDAVXQIXXESPEKXLFSSEIFINAEDRGHEIIEPGNQKLRKAPVKFASSSSVQQVXFSRGXDGQPLLLPYKPSGSXKMYYVPQLRQIPPSPDSKSDXXVESSHSGSNDAIAPDFPAQVLGXRDDDLSAXVNIKHKEGIYSKRVVXKASLPVGEKPLQNENADASVQVLIXGDENLSDKKQQEIHSXRAVXEAAQAKEKESLQKDXADSSAAAAAEHSAQVGDPEMKNLPDXKAIXQKEEIHRKKXVPEEAWPNNKESLQINIEESECHSEFENXXRSVFRSAKFYIHHPVHLPSDQDICHESLGKSVFMRHSWKDFFQHHPDKHREHMCLPLPYQNMDKXKXDYXRIKSLSINVNLGNKEVMDXXKSQVRDYPKHNGQISDPQRDQKVXPEQXXQHXVSLNELWNKYRERQRQQRQPELGDRKELSLVDRLDRLAKILQNPIXHSLQVSESXHDDSRGERSVKEWSGRQQQRNKLQKKKRFKSLEKSHKNXGELKKSKVLSHHRAGRSNQIKIEQIKFDKYILSKQPGFNYISNXSSDCRPSEESELLXDXXXNILSGXXSXVESDILXQXDREVALHERSSSVSXIDXARLIQAFGHERVCLSPRRIKLYSSIXNQQRRYLEKRSKHSKKVLNXGHPLVXSEHXRRRHIQVHGYRFHLAM

SEQ ID NO: 2210 - protein, 4168 aa, Homo sapiens
  MOD_RES (104)..(104): Selenocysteine
  MOD_RES (113)..(113): Selenocysteine
  MOD_RES (128)..(128): Selenocysteine
  MOD_RES (133)..(133): Selenocysteine
  MOD_RES (140)..(141): Selenocysteine
  MOD_RES (152)..(152): Selenocysteine
  MOD_RES (167)..(167): Selenocysteine
  MOD_RES (170)..(170): Selenocysteine
  MOD_RES (173)..(173): Selenocysteine
  MOD_RES (179)..(179): Selenocysteine
  MOD_RES (182)..(182): Selenocysteine
  MOD_RES (185)..(185): Selenocysteine
  MOD_RES (196)..(196): Selenocysteine
  MOD_RES (230)..(230): Selenocysteine
  MOD_RES (233)..(233): Selenocysteine
  MOD_RES (264)..(264): Selenocysteine
  MOD_RES (281)..(281): Selenocysteine
  MOD_RES (304)..(304): Selenocysteine
  MOD_RES (323)..(323): Selenocysteine
  MOD_RES (350)..(350): Selenocysteine
  MOD_RES (354)..(354): Selenocysteine
  MOD_RES (371)..(371): Selenocysteine
  MOD_RES (376)..(376): Selenocysteine
  MOD_RES (382)..(382): Selenocysteine
  MOD_RES (399)..(399): Selenocysteine
  MOD_RES (409)..(409): Selenocysteine
  MOD_RES (412)..(412): Selenocysteine
  MOD_RES (425)..(425): Selenocysteine
  MOD_RES (448)..(448): Selenocysteine
  MOD_RES (467)..(467): Selenocysteine
  MOD_RES (480)..(480): Selenocysteine
  MOD_RES (489)..(489): Selenocysteine
  MOD_RES (498)..(500): Selenocysteine
  MOD_RES (528)..(530): Selenocysteine
  MOD_RES (534)..(534): Selenocysteine
  MOD_RES (536)..(536): Selenocysteine
  MOD_RES (541)..(541): Selenocysteine
  MOD_RES (545)..(545): Selenocysteine
  MOD_RES (548)..(548): Selenocysteine
  MOD_RES (551)..(551): Selenocysteine
  MOD_RES (555)..(555): Selenocysteine
  MOD_RES (565)..(565): Selenocysteine
  MOD_RES (567)..(567): Selenocysteine
  MOD_RES (569)..(569): Selenocysteine
  MOD_RES (595)..(595): Selenocysteine
  MOD_RES (611)..(612): Selenocysteine
  MOD_RES (616)..(616): Selenocysteine
  MOD_RES (618)..(618): Selenocysteine
  MOD_RES (620)..(620): Selenocysteine
  MOD_RES (630)..(630): Selenocysteine
  MOD_RES (642)..(642): Selenocysteine
  MOD_RES (659)..(659): Selenocysteine
  MOD_RES (663)..(663): Selenocysteine
  MOD_RES (667)..(667): Selenocysteine
  MOD_RES (682)..(682): Selenocysteine
  MOD_RES (689)..(689): Selenocysteine
  MOD_RES (706)..(706): Selenocysteine
  MOD_RES (708)..(708): Selenocysteine
  MOD_RES (710)..(710): Selenocysteine
  MOD_RES (714)..(714): Selenocysteine
  MOD_RES (736)..(736): Selenocysteine
  MOD_RES (739)..(739): Selenocysteine
  MOD_RES (741)..(741): Selenocysteine
  MOD_RES (746)..(746): Selenocysteine
  MOD_RES (754)..(754): Selenocysteine
  MOD_RES (801)..(801): Selenocysteine
  MOD_RES (805)..(805): Selenocysteine
  MOD_RES (848)..(848): Selenocysteine
  MOD_RES (850)..(850): Selenocysteine
  MOD_RES (854)..(854): Selenocysteine
  MOD_RES (856)..(856): Selenocysteine
  MOD_RES (874)..(874): Selenocysteine
  MOD_RES (881)..(881): Selenocysteine
  MOD_RES (898)..(898): Selenocysteine
  MOD_RES (921)..(921): Selenocysteine
  MOD_RES (945)..(945): Selenocysteine
  MOD_RES (947)..(947): Selenocysteine
  MOD_RES (949)..(949): Selenocysteine
  MOD_RES (988)..(988): Selenocysteine
  MOD_RES (992)..(992): Selenocysteine
  MOD_RES (995)..(995): Selenocysteine
  MOD_RES (997)..(997): Selenocysteine
  MOD_RES (1023)..(1023): Selenocysteine
  MOD_RES (1031)..(1031): Selenocysteine
  MOD_RES (1040)..(1040): Selenocysteine
  MOD_RES (1087)..(1087): Selenocysteine
  MOD_RES (1089)..(1089): Selenocysteine
  MOD_RES (1095)..(1095): Selenocysteine
  MOD_RES (1110)..(1110): Selenocysteine
  MOD_RES (1134)..(1134): Selenocysteine
  MOD_RES (1136)..(1136): Selenocysteine
  MOD_RES (1138)..(1138): Selenocysteine
  MOD_RES (1140)..(1140): Selenocysteine
  MOD_RES (1142)..(1142): Selenocysteine
  MOD_RES (1162)..(1162): Selenocysteine
  MOD_RES (1175)..(1175): Selenocysteine
  MOD_RES (1182)..(1182): Selenocysteine
  MOD_RES (1190)..(1190): Selenocysteine
  MOD_RES (1205)..(1205): Selenocysteine
  MOD_RES (1229)..(1229): Selenocysteine
  MOD_RES (1231)..(1231): Selenocysteine
  MOD_RES (1233)..(1233): Selenocysteine
  MOD_RES (1235)..(1235): Selenocysteine
  MOD_RES (1242)..(1242): Selenocysteine
  MOD_RES (1259)..(1259): Selenocysteine
  MOD_RES (1275)..(1276): Selenocysteine
  MOD_RES (1278)..(1278): Selenocysteine
  MOD_RES (1282)..(1282): Selenocysteine
  MOD_RES (1284)..(1284): Selenocysteine
  MOD_RES (1307)..(1307): Selenocysteine
  MOD_RES (1324)..(1324): Selenocysteine
  MOD_RES (1332)..(1332): Selenocysteine
  MOD_RES (1337)..(1337): Selenocysteine
  MOD_RES (1354)..(1354): Selenocysteine
  MOD_RES (1370)..(1371): Selenocysteine
  MOD_RES (1373)..(1373): Selenocysteine
  MOD_RES (1375)..(1375): Selenocysteine
  MOD_RES (1377)..(1377): Selenocysteine
  MOD_RES (1379)..(1379): Selenocysteine
  MOD_RES (1385)..(1385): Selenocysteine
  MOD_RES (1402)..(1402): Selenocysteine
  MOD_RES (1419)..(1419): Selenocysteine
  MOD_RES (1423)..(1423): Selenocysteine
  MOD_RES (1427)..(1427): Selenocysteine
  MOD_RES (1432)..(1432): Selenocysteine
  MOD_RES (1465)..(1465): Selenocysteine
  MOD_RES (1468)..(1468): Selenocysteine
  MOD_RES (1470)..(1470): Selenocysteine
  MOD_RES (1472)..(1472): Selenocysteine
  MOD_RES (1512)..(1513): Selenocysteine
  MOD_RES (1517)..(1517): Selenocysteine
  MOD_RES (1519)..(1519): Selenocysteine
  MOD_RES (1560)..(1561): Selenocysteine
  MOD_RES (1565)..(1565): Selenocysteine
  MOD_RES (1567)..(1567): Selenocysteine
  MOD_RES (1569)..(1569): Selenocysteine
  MOD_RES (1604)..(1604): Selenocysteine
  MOD_RES (1608)..(1608): Selenocysteine
  MOD_RES (1626)..(1626): Selenocysteine
  MOD_RES (1655)..(1655): Selenocysteine
  MOD_RES (1657)..(1657): Selenocysteine
  MOD_RES (1663)..(1663): Selenocysteine
  MOD_RES (1678)..(1678): Selenocysteine
  MOD_RES (1702)..(1702): Selenocysteine
  MOD_RES (1704)..(1704): Selenocysteine
  MOD_RES (1732)..(1732): Selenocysteine
  MOD_RES (1749)..(1749): Selenocysteine
  MOD_RES (1753)..(1753): Selenocysteine
  MOD_RES (1755)..(1755): Selenocysteine
  MOD_RES (1762)..(1762): Selenocysteine
  MOD_RES (1779)..(1779): Selenocysteine
  MOD_RES (1796)..(1796): Selenocysteine
  MOD_RES (1800)..(1800): Selenocysteine
  MOD_RES (1802)..(1802): Selenocysteine
  MOD_RES (1804)..(1804): Selenocysteine
  MOD_RES (1824)..(1824): Selenocysteine
  MOD_RES (1841)..(1841): Selenocysteine
  MOD_RES (1869)..(1869): Selenocysteine
  MOD_RES (1872)..(1872): Selenocysteine
  MOD_RES (1886)..(1886): Selenocysteine
  MOD_RES (1914)..(1914): Selenocysteine
  MOD_RES (1931)..(1931): Selenocysteine
  MOD_RES (1935)..(1935): Selenocysteine
  MOD_RES (1961)..(1961): Selenocysteine
  MOD_RES (1978)..(1978): Selenocysteine
  MOD_RES (2000)..(2000): Selenocysteine
  MOD_RES (2009)..(2009): Selenocysteine
  MOD_RES (2015)..(2015): Selenocysteine
  MOD_RES (2029)..(2029): Selenocysteine
  MOD_RES (2038)..(2038): Selenocysteine
  MOD_RES (2042)..(2042): Selenocysteine
  MOD_RES (2051)..(2051): Selenocysteine
  MOD_RES (2081)..(2081): Selenocysteine
  MOD_RES (2085)..(2085): Selenocysteine
  MOD_RES (2115)..(2115): Selenocysteine
  MOD_RES (2123)..(2123): Selenocysteine
  MOD_RES (2132)..(2132): Selenocysteine
  MOD_RES (2136)..(2136): Selenocysteine
  MOD_RES (2162)..(2162): Selenocysteine
  MOD_RES (2179)..(2179): Selenocysteine
  MOD_RES (2183)..(2183): Selenocysteine
  MOD_RES (2188)..(2188): Selenocysteine
  MOD_RES (2258)..(2258): Selenocysteine
  MOD_RES (2264)..(2264): Selenocysteine
  MOD_RES (2309)..(2309): Selenocysteine
  MOD_RES (2323)..(2323): Selenocysteine
  MOD_RES (2338)..(2338): Selenocysteine
  MOD_RES (2340)..(2340): Selenocysteine
  MOD_RES (2357)..(2358): Selenocysteine
  MOD_RES (2377)..(2377): Selenocysteine
  MOD_RES (2398)..(2398): Selenocysteine
  MOD_RES (2409)..(2409): Selenocysteine
  MOD_RES (2454)..(2454): Selenocysteine
  MOD_RES (2457)..(2457): Selenocysteine
  MOD_RES (2553)..(2554): Selenocysteine
  MOD_RES (2589)..(2589): Selenocysteine
  MOD_RES (2591)..(2591): Selenocysteine
  MOD_RES (2613)..(2613): Selenocysteine
  MOD_RES (2712)..(2713): Selenocysteine
  MOD_RES (2716)..(2716): Selenocysteine
  MOD_RES (2737)..(2737): Selenocysteine
  MOD_RES (2743)..(2743): Selenocysteine
  MOD_RES (2755)..(2755): Selenocysteine
  MOD_RES (2768)..(2768): Selenocysteine
  MOD_RES (2786)..(2786): Selenocysteine
  MOD_RES (2818)..(2818): Selenocysteine
  MOD_RES (2826)..(2826): Selenocysteine
  MOD_RES (2843)..(2843): Selenocysteine
  MOD_RES (2853)..(2853): Selenocysteine
  MOD_RES (2871)..(2871): Selenocysteine
  MOD_RES (2873)..(2873): Selenocysteine
  MOD_RES (3018)..(3018): Selenocysteine
  MOD_RES (3029)..(3029): Selenocysteine
  MOD_RES (3036)..(3036): Selenocysteine
  MOD_RES (3050)..(3050): Selenocysteine
  MOD_RES (3055)..(3055): Selenocysteine
  MOD_RES (3063)..(3063): Selenocysteine
  MOD_RES (3089)..(3089): Selenocysteine
  MOD_RES (3098)..(3098): Selenocysteine
  MOD_RES (3103)..(3103): Selenocysteine
  MOD_RES (3137)..(3137): Selenocysteine
  MOD_RES (3139)..(3139): Selenocysteine
  MOD_RES (3144)..(3144): Selenocysteine
  MOD_RES (3154)..(3154): Selenocysteine
  MOD_RES (3174)..(3174): Selenocysteine
  MOD_RES (3187)..(3187): Selenocysteine
  MOD_RES (3202)..(3202): Selenocysteine
  MOD_RES (3205)..(3206): Selenocysteine
  MOD_RES (3212)..(3212): Selenocysteine
  MOD_RES (3254)..(3254): Selenocysteine
  MOD_RES (3259)..(3259): Selenocysteine
  MOD_RES (3274)..(3274): Selenocysteine
  MOD_RES (3295)..(3296): Selenocysteine
  MOD_RES (3319)..(3319): Selenocysteine
  MOD_RES (3327)..(3327): Selenocysteine
  MOD_RES (3343)..(3343): Selenocysteine
  MOD_RES (3368)..(3368): Selenocysteine
  MOD_RES (3384)..(3384): Selenocysteine
  MOD_RES (3388)..(3388): Selenocysteine
  MOD_RES (3403)..(3403): Selenocysteine
  MOD_RES (3429)..(3429): Selenocysteine
  MOD_RES (3433)..(3433): Selenocysteine
  MOD_RES (3443)..(3443): Selenocysteine
  MOD_RES (3472)..(3473): Selenocysteine
  MOD_RES (3538)..(3538): Selenocysteine
  MOD_RES (3540)..(3540): Selenocysteine
  MOD_RES (3543)..(3543): Selenocysteine
  MOD_RES (3562)..(3563): Selenocysteine
  MOD_RES (3587)..(3587): Selenocysteine
  MOD_RES (3591)..(3592): Selenocysteine
  MOD_RES (3595)..(3595): Selenocysteine
  MOD_RES (3641)..(3641): Selenocysteine
  MOD_RES (3650)..(3650): Selenocysteine
  MOD_RES (3689)..(3689): Selenocysteine
  MOD_RES (3733)..(3733): Selenocysteine
  MOD_RES (3747)..(3747): Selenocysteine
  MOD_RES (3749)..(3751): Selenocysteine
  MOD_RES (3757)..(3758): Selenocysteine
  MOD_RES (3760)..(3760): Selenocysteine
  MOD_RES (3767)..(3767): Selenocysteine
  MOD_RES (3769)..(3769): Selenocysteine
  MOD_RES (3784)..(3784): Selenocysteine
  MOD_RES (3787)..(3787): Selenocysteine
  MOD_RES (3813)..(3813): Selenocysteine
  MOD_RES (3833)..(3833): Selenocysteine
  MOD_RES (3839)..(3839): Selenocysteine
  MOD_RES (3843)..(3843): Selenocysteine
  MOD_RES (3873)..(3873): Selenocysteine
  MOD_RES (3902)..(3902): Selenocysteine
  MOD_RES (3908)..(3908): Selenocysteine
  MOD_RES (3911)..(3911): Selenocysteine
  MOD_RES (3926)..(3926): Selenocysteine
  MOD_RES (3940)..(3940): Selenocysteine
  MOD_RES (3980)..(3980): Selenocysteine
  MOD_RES (3992)..(3992): Selenocysteine
  MOD_RES (3994)..(3994): Selenocysteine
  MOD_RES (4036)..(4036): Selenocysteine
  MOD_RES (4074)..(4074): Selenocysteine
  MOD_RES (4157)..(4157): Selenocysteine
MEPEDLPWPGELEEEEEEEEEEEEEEEEAAAAAAANVDDVVVVEEVEEEAGRELDSDSHYGPQHLESIDDEEDEEAKAWLQAHPGRILPPLSPPQHRYSEGERXSLEKIVPLXCHVWQQIVYQGNSRXQISDXNVVCLEXXAQRGSGDDQKXESWHCLPQEMDSSQXLDXSQXRFNVRXEDXEVXDFPSLEEGILXQSENQVKEPNRDLFCSPLLVIQDSFASPDLPLLXCLXQDQEFAPDSLFHQSELSFAPLRGIPDKSEDXEWSSRPSEVSEALFQAXAEVASDLASSRFSVSQHPLIGSXAVGSQCPFLPSEQGNNEEXISSVDELKIPKDCDRYDDLCSYMSWKXRKDXQWPENNLADKDQVSVAXSFDIXDENIAXKRSDHFDAARSYGQYWXQEDSSKQAEXYLXKGLQGKVESDVIXLDGLNENAVVCSERVAELQRKPXRESEYHSSDLRMLRMSPDXVPKAPKHLKAGDXSKGGIAKVXQSNLKSGIXXXPVDSDIGSHLSLSLEDLSQLAVSSPLEXXXGQHXDXLNQKXLADXHLXEEXLKVXAIPEPADQKXAXPXVLSSSHSHRGKPSIFYQQGLPDSHLXEEALKVSAAPGLADQXXGMSXLXSXSYSHREKPGXFYQQELPESNLXEEPLEVSAAPGPVEQKXGIPXVSSXSHSHVEDLLFFYRQXLPDGHLXDQALKVSAVSGPADQKXGXAXVLSXPHSHREKPGIFYQQEFADSHQXEEXLXKVSAXPGPADQKXEIPAVQSSSYSQREKPSILYPQDLADSHLPEEGLKVSAVAGPADQKXGLPXVPSSAYSHREKLLVFYQQALLDSHLPEEALKVSAVSGPADGKXGXPAVXSXSSASSSLGEKPSAFYQQXLPNSHLXEEALKVSIVPGPGDQKXGIPSAPSSFYSHREKPIIFSQQXLPDFLFPEEALKVSAVSVLAAQKXGXPXVSSNSHSHSEKSSVFYQQELPDSDLPRESLKMSAIPGLXDQKXVPXPXVPSGSFSHREKPSIFYQQEWPDSYAXEKALKVSXGPGPADQKXEIPAVQSSSYPQREKPSVLYPQVLSDSHLPEESLKVSAFPGPADQMXDXPAVPSXFYSQREKPGIFYQQXLPESHLPKEALKISVAPGLADQKXGXPXVXSXSYSQHREKPSIFHQQALPGXHIPEEAQKVSAVXGPGNQKXWIPRVLSXFYSQREKPGIFYQQXLPGSHIPEEAQKVSPVLGPADQKXGXPXPXSASYSHXEKPGIFYQQVLPDNHPXEEALKISVASEPVDQXXGXPAVXSXSYSQYREKPSIFYQQSLPSSHLXEEAKNVSAVPGPADQKXVIPILPSXFYSHXEKPGVFYQQVLPHSHPXEEALKISVASEPVDQXXGXPXVXSXSYSQHXEKPSIFYQQSLPGSHLXEEAKNVSAVPGPGDRKXGIPXLPSXFYSHXEKPGSFYQQVLPHSHLPEEALEVSVAPGPVDQXIGXPXVXSPSSSFGEKPIVIYKQAFPEGHLPEESLKVSVAPGPVGQXXGAPXIXSPSYSQHRAKSGSFYQLALLGSQIPEEALRVSSAPGPADQXXGIPXIXSXSYSFGEKPIVNYKQAFPDGHLPEEALKVSIVSGPXEKKXDIPAGPLGSSALGEKPIXFYRQALLDSPLNKEVVKVSAAPGPADQKXEXLPVHSXSYSNRGKPVIFYQQXLSDSHLPEEALKVPPVPGPDAQKXEXPSVSSSLYSYREKPIVFYQQALPDSELXQEALKVSAVPQPADQKXGLSXVXSSFYSHXEKPNISYQQELPDSHLXEEALKVSNVPGPADQKXGVSXVXSXSYSHREKPIVSYQRELPHFXEAGLKILRVPGPADQKXGINILPSNSYPQREHSVISYEQELPDLXEVXLKAIGVPGPADQKXGIQIASSSSYSNREKASIFHQQELPDVXEEALNVFVVPGQGDRKXEIPXVPLSYYSRREKPSVISQQELPDSHLXEEALKVSPVSIPAEQKXGIPIGLSSSYSHSHKEKLKISXVHIPDDQKXEFPAAXLSSYSQIEKPKISXVIGPNDQKXPSQXAFHSSYSQXVKPNILFQQQLPDRDQSKGILKISAVPELXDVNXGKPVSLSSSYFHREKSNIFSPQELPGSHVXEDVLKVSXIPGPAGQKXVLPXALPSSFSHREKPDIFYQKDLPDRHLXEDALKISSALGQADQIXGLQXVPSGXYSHGENHKLVSEHVQRLIDNLNSSDSSVSSNNVLLNSQADDRVVINKPESAGFRDVGSEEIQDAENSAKXLKEIRXLLMEAENMALKRCNFPAPLARFRDISDISFIQSKKVVCFKEPSSXGVSNGDLLHRQPFXEESPSSRCIQKDIGXQXNLKCRRGIENWEFISSXXVRSPLQEAESKVSMALEEXLRQYQAAKSVMRSEPEGCSGXIGNKIIIPMMXVIKSDSSSDASDGNGSCSWDSNLPESLESVSDVLLNFFPYVSPKXSIXDSREEEGVSESEDGGGSSVDSLAAHVKNLLQCESSLNHAKEILRNAEEEESRVRAHAWNMKFNLAHDCGYSISELNEDDRRKVEEIKAELFGHGRXXDLSKGLQSPRGMGCKPEAVCSHIIIESHEKGCFRXLXSEHPQLDRHPCAFRSAGPSEMXRGRQNPSSCRAKHVNLSASLDQNNSHFKVWNSLQLKSHSPFQNFIPDEFKISKGLRMPFDEKMDPWLSELVEPAFVPPKEVDFHSSSQMPSPEPMKKFXXSIXFSSHRHSKCISNSSVVKVGVXEGSQCXGASVGVFNSHFXEEQNPPRDLKQKXSSPSSFKMHSNSQDKEVXILAEGRRQSQKLPVDFERSFQEEKPLERSDFXGSHSEPSXRANCSNFKEIQISDNHXLISMGRPSSXLGVNRSSSRLGVKEKNVXIXPDLPSCIFLEQRELFEQSKAPRADDHVRKHHSPSPQHQDYVAPDLPSCIFLEQRELFEQCKAPYVDHQMRENHSPLPQGQDSIASDLPSPISLEQCQSKAPGVDDQMNKHHFPLPQGQDCVVEKNNQHKPKSHISNINVEAKFNXVVSQSAPNHCXLAASASXPPSNRKALSCVHIXLCPKXSSKLDSGXLDERFHSLDAASKARMNSEFNFDLHXVSSRSLEPXSKLLXSKPVAQDQESLGFLGPKSSLDFQVVQPSLPDSNXIXQDLKXIPSQNSQIVXSRQIQVNISDFEGHSNPEGXPVFADRLPEKMKXPLSAFSEKLSSDAVXQIXXESPEKXLFSSEIFINAEDRGHEIIEPGNQKLRKAPVKFASSSSVQQVXFSRGXDGQPLLLPYKPSGSXKMYYVPQLRQIPPSPDSKSDXXVESSHSGSNDAIAPDFPAQVLGXRDDDLSAXVNIKHKEGIYSKRVVXKASLPVGEKPLQNENADASVQVLIXGDENLSDKKQQEIHSXRAVXEAAQAKEKESLQKDXADSSAAAAAEHSAQVGDPEMKNLPDXKAIXQKEEIHRKKXVPEEAWPNNKESLQINIEESECHSEFENXXRSVFRSAKFYIHHPVHLPSDQDICHESLGKSVFMRHSWKDFFQHHPDKHREHMCLPLPYQNMDKXKXDYXRIKSLSINVNLGNKEVMDXXKSQVRDYPKHNGQISDPQRDQKVXPEQXXQHXVSLNELWNKYRERQRQQRQPELGDRKELSLVDRLDRLAKILQNPIXHSLQVSESXHDDSRGERSVKEWSGRQQQRNKLQKKKRFKSLEKSHKNXGELKKSKVLSHHRAGRSNQIKIEQIKFDKYILSKQPGFNYISNXSSDCRPSEESELLXDXXXNILSGXXSXVESDILXQXDREVALHERSSSVSXIDXARLIQAFGHERVCLSPRRIKLYSSIXNQQRRYLEKRSKHSKKVLNXGHPLVXSEHXRRRHIQVANHVISSDSISSSASSFLSSNSXFCNKQNVHMLNKGIQAGNLEIVNGAKKHXRDVGIXFPXPSSSEAKLEENSDVXSWSEEKREEKMLFXGYPEDRKLKKNKKNSHEGVSWFVPVENVESRSKKENVPNXCGPGISWFEPIXKXRPWREPLREQNCQGQHLDGRGYLAGPGREAGRDLLRPFVRAXLQESLQFHRPDFISRSGERIKRLKLIVQERKLQSMLQXERDALFNIDRERQGHQNRMCPLPKRVFLAIQKNKPISKKEMIQRSKRIYEQLPEVQKKREEEKRKSEYKSYRLRAQLYKKRVXNQLLGRKVPWD

SEQ ID NO: 2211 - protein, 4126 aa, Homo sapiens
  MOD_RES (104)..(104): Selenocysteine
  MOD_RES (110)..(110): Selenocysteine
  MOD_RES (125)..(125): Selenocysteine
  MOD_RES (128)..(128): Selenocysteine
  MOD_RES (131)..(131): Selenocysteine
  MOD_RES (137)..(137): Selenocysteine
  MOD_RES (140)..(140): Selenocysteine
  MOD_RES (143)..(143): Selenocysteine
  MOD_RES (154)..(154): Selenocysteine
  MOD_RES (188)..(188): Selenocysteine
  MOD_RES (191)..(191): Selenocysteine
  MOD_RES (222)..(222): Selenocysteine
  MOD_RES (239)..(239): Selenocysteine
  MOD_RES (262)..(262): Selenocysteine
  MOD_RES (281)..(281): Selenocysteine
  MOD_RES (308)..(308): Selenocysteine
  MOD_RES (312)..(312): Selenocysteine
  MOD_RES (329)..(329): Selenocysteine
  MOD_RES (334)..(334): Selenocysteine
  MOD_RES (340)..(340): Selenocysteine
  MOD_RES (357)..(357): Selenocysteine
  MOD_RES (367)..(367): Selenocysteine
  MOD_RES (370)..(370): Selenocysteine
  MOD_RES (383)..(383): Selenocysteine
  MOD_RES (406)..(406): Selenocysteine
  MOD_RES (425)..(425): Selenocysteine
  MOD_RES (438)..(438): Selenocysteine
  MOD_RES (447)..(447): Selenocysteine
  MOD_RES (456)..(458): Selenocysteine
  MOD_RES (486)..(488): Selenocysteine
  MOD_RES (492)..(492): Selenocysteine
  MOD_RES (494)..(494): Selenocysteine
  MOD_RES (499)..(499): Selenocysteine
  MOD_RES (503)..(503): Selenocysteine
  MOD_RES (506)..(506): Selenocysteine
  MOD_RES (509)..(509): Selenocysteine
  MOD_RES (513)..(513): Selenocysteine
  MOD_RES (523)..(523): Selenocysteine
  MOD_RES (525)..(525): Selenocysteine
  MOD_RES (527)..(527): Selenocysteine
  MOD_RES (553)..(553): Selenocysteine
  MOD_RES (569)..(570): Selenocysteine
  MOD_RES (574)..(574): Selenocysteine
  MOD_RES (576)..(576): Selenocysteine
  MOD_RES (578)..(578): Selenocysteine
  MOD_RES (588)..(588): Selenocysteine
  MOD_RES (600)..(600): Selenocysteine
  MOD_RES (617)..(617): Selenocysteine
  MOD_RES (621)..(621): Selenocysteine
  MOD_RES (625)..(625): Selenocysteine
  MOD_RES (640)..(640): Selenocysteine
  MOD_RES (647)..(647): Selenocysteine
  MOD_RES (664)..(664): Selenocysteine
  MOD_RES (666)..(666): Selenocysteine
  MOD_RES (668)..(668): Selenocysteine
  MOD_RES (672)..(672): Selenocysteine
  MOD_RES (694)..(694): Selenocysteine
  MOD_RES (697)..(697): Selenocysteine
  MOD_RES (699)..(699): Selenocysteine
  MOD_RES (704)..(704): Selenocysteine
  MOD_RES (712)..(712): Selenocysteine
  MOD_RES (759)..(759): Selenocysteine
  MOD_RES (763)..(763): Selenocysteine
  MOD_RES (806)..(806): Selenocysteine
  MOD_RES (808)..(808): Selenocysteine
  MOD_RES (812)..(812): Selenocysteine
  MOD_RES (814)..(814): Selenocysteine
  MOD_RES (832)..(832): Selenocysteine
  MOD_RES (839)..(839): Selenocysteine
  MOD_RES (856)..(856): Selenocysteine
  MOD_RES (879)..(879): Selenocysteine
  MOD_RES (903)..(903): Selenocysteine
  MOD_RES (905)..(905): Selenocysteine
  MOD_RES (907)..(907): Selenocysteine
  MOD_RES (946)..(946): Selenocysteine
  MOD_RES (950)..(950): Selenocysteine
  MOD_RES (953)..(953): Selenocysteine
  MOD_RES (955)..(955): Selenocysteine
  MOD_RES (981)..(981): Selenocysteine
  MOD_RES (989)..(989): Selenocysteine
  MOD_RES (998)..(998): Selenocysteine
  MOD_RES (1045)..(1045): Selenocysteine
  MOD_RES (1047)..(1047): Selenocysteine
  MOD_RES (1053)..(1053): Selenocysteine
  MOD_RES (1068)..(1068): Selenocysteine
  MOD_RES (1092)..(1092): Selenocysteine
  MOD_RES (1094)..(1094): Selenocysteine
  MOD_RES (1096)..(1096): Selenocysteine
  MOD_RES (1098)..(1098): Selenocysteine
  MOD_RES (1100)..(1100): Selenocysteine
  MOD_RES (1120)..(1120): Selenocysteine
  MOD_RES (1133)..(1133): Selenocysteine
  MOD_RES (1140)..(1140): Selenocysteine
  MOD_RES (1148)..(1148): Selenocysteine
  MOD_RES (1163)..(1163): Selenocysteine
  MOD_RES (1187)..(1187): Selenocysteine
  MOD_RES (1189)..(1189): Selenocysteine
  MOD_RES (1191)..(1191): Selenocysteine
  MOD_RES (1193)..(1193): Selenocysteine
  MOD_RES (1200)..(1200): Selenocysteine
  MOD_RES (1217)..(1217): Selenocysteine
  MOD_RES (1233)..(1234): Selenocysteine
  MOD_RES (1236)..(1236): Selenocysteine
  MOD_RES (1240)..(1240): Selenocysteine
  MOD_RES (1242)..(1242): Selenocysteine
  MOD_RES (1265)..(1265): Selenocysteine
  MOD_RES (1282)..(1282): Selenocysteine
  MOD_RES (1290)..(1290): Selenocysteine
  MOD_RES (1295)..(1295): Selenocysteine
  MOD_RES (1312)..(1312): Selenocysteine
  MOD_RES (1328)..(1329): Selenocysteine
  MOD_RES (1331)..(1331): Selenocysteine
  MOD_RES (1333)..(1333): Selenocysteine
  MOD_RES (1335)..(1335): Selenocysteine
  MOD_RES (1337)..(1337): Selenocysteine
  MOD_RES (1343)..(1343): Selenocysteine
  MOD_RES (1360)..(1360): Selenocysteine
  MOD_RES (1377)..(1377): Selenocysteine
  MOD_RES (1381)..(1381): Selenocysteine
  MOD_RES (1385)..(1385): Selenocysteine
  MOD_RES (1390)..(1390): Selenocysteine
  MOD_RES (1423)..(1423): Selenocysteine
  MOD_RES (1426)..(1426): Selenocysteine
  MOD_RES (1428)..(1428): Selenocysteine
  MOD_RES (1430)..(1430): Selenocysteine
  MOD_RES (1470)..(1471): Selenocysteine
  MOD_RES (1475)..(1475): Selenocysteine
  MOD_RES (1477)..(1477): Selenocysteine
  MOD_RES (1518)..(1519): Selenocysteine
  MOD_RES (1523)..(1523): Selenocysteine
  MOD_RES (1525)..(1525): Selenocysteine
  MOD_RES (1527)..(1527): Selenocysteine
  MOD_RES (1562)..(1562): Selenocysteine
  MOD_RES (1566)..(1566): Selenocysteine
  MOD_RES (1584)..(1584): Selenocysteine
  MOD_RES (1613)..(1613): Selenocysteine
  MOD_RES (1615)..(1615): Selenocysteine
  MOD_RES (1621)..(1621): Selenocysteine
  MOD_RES (1636)..(1636): Selenocysteine
  MOD_RES (1660)..(1660): Selenocysteine
  MOD_RES (1662)..(1662): Selenocysteine
  MOD_RES (1690)..(1690): Selenocysteine
  MOD_RES (1707)..(1707): Selenocysteine
  MOD_RES (1711)..(1711): Selenocysteine
  MOD_RES (1713)..(1713): Selenocysteine
  MOD_RES (1720)..(1720): Selenocysteine
  MOD_RES (1737)..(1737): Selenocysteine
  MOD_RES (1754)..(1754): Selenocysteine
  MOD_RES (1758)..(1758): Selenocysteine
  MOD_RES (1760)..(1760): Selenocysteine
  MOD_RES (1762)..(1762): Selenocysteine
  MOD_RES (1782)..(1782): Selenocysteine
  MOD_RES (1799)..(1799): Selenocysteine
  MOD_RES (1827)..(1827): Selenocysteine
  MOD_RES (1830)..(1830): Selenocysteine
  MOD_RES (1844)..(1844): Selenocysteine
  MOD_RES (1872)..(1872): Selenocysteine
  MOD_RES (1889)..(1889): Selenocysteine
  MOD_RES (1893)..(1893): Selenocysteine
  MOD_RES (1919)..(1919): Selenocysteine
  MOD_RES (1936)..(1936): Selenocysteine
  MOD_RES (1958)..(1958): Selenocysteine
  MOD_RES (1967)..(1967): Selenocysteine
  MOD_RES (1973)..(1973): Selenocysteine
  MOD_RES (1987)..(1987): Selenocysteine
  MOD_RES (1996)..(1996): Selenocysteine
  MOD_RES (2000)..(2000): Selenocysteine
  MOD_RES (2009)..(2009): Selenocysteine
  MOD_RES (2039)..(2039): Selenocysteine
  MOD_RES (2043)..(2043): Selenocysteine
  MOD_RES (2073)..(2073): Selenocysteine
  MOD_RES (2081)..(2081): Selenocysteine
  MOD_RES (2090)..(2090): Selenocysteine
  MOD_RES (2094)..(2094): Selenocysteine
  MOD_RES (2120)..(2120): Selenocysteine
  MOD_RES (2137)..(2137): Selenocysteine
  MOD_RES (2141)..(2141): Selenocysteine
  MOD_RES (2146)..(2146): Selenocysteine
  MOD_RES (2216)..(2216): Selenocysteine
  MOD_RES (2222)..(2222): Selenocysteine
  MOD_RES (2267)..(2267): Selenocysteine
  MOD_RES (2281)..(2281): Selenocysteine
  MOD_RES (2296)..(2296): Selenocysteine
  MOD_RES (2298)..(2298): Selenocysteine
  MOD_RES (2315)..(2316): Selenocysteine
  MOD_RES (2335)..(2335): Selenocysteine
  MOD_RES (2356)..(2356): Selenocysteine
  MOD_RES (2367)..(2367): Selenocysteine
  MOD_RES (2412)..(2412): Selenocysteine
  MOD_RES (2415)..(2415): Selenocysteine
  MOD_RES (2511)..(2512): Selenocysteine
  MOD_RES (2547)..(2547): Selenocysteine
  MOD_RES (2549)..(2549): Selenocysteine
  MOD_RES (2571)..(2571): Selenocysteine
  MOD_RES (2670)..(2671): Selenocysteine
  MOD_RES (2674)..(2674): Selenocysteine
  MOD_RES (2695)..(2695): Selenocysteine
  MOD_RES (2701)..(2701): Selenocysteine
  MOD_RES (2713)..(2713): Selenocysteine
  MOD_RES (2726)..(2726): Selenocysteine
  MOD_RES (2744)..(2744): Selenocysteine
  MOD_RES (2776)..(2776): Selenocysteine
  MOD_RES (2784)..(2784): Selenocysteine
  MOD_RES (2801)..(2801): Selenocysteine
  MOD_RES (2811)..(2811): Selenocysteine
  MOD_RES (2829)..(2829): Selenocysteine
  MOD_RES (2831)..(2831): Selenocysteine
  MOD_RES (2976)..(2976): Selenocysteine
  MOD_RES (2987)..(2987): Selenocysteine
  MOD_RES (2994)..(2994): Selenocysteine
  MOD_RES (3008)..(3008): Selenocysteine
  MOD_RES (3013)..(3013): Selenocysteine
  MOD_RES (3021)..(3021): Selenocysteine
  MOD_RES (3047)..(3047): Selenocysteine
  MOD_RES (3056)..(3056): Selenocysteine
  MOD_RES (3061)..(3061): Selenocysteine
  MOD_RES (3095)..(3095): Selenocysteine
  MOD_RES (3097)..(3097): Selenocysteine
  MOD_RES (3102)..(3102): Selenocysteine
  MOD_RES (3112)..(3112): Selenocysteine
  MOD_RES (3132)..(3132): Selenocysteine
  MOD_RES (3145)..(3145): Selenocysteine
  MOD_RES (3160)..(3160): Selenocysteine
  MOD_RES (3163)..(3164): Selenocysteine
  MOD_RES (3170)..(3170): Selenocysteine
  MOD_RES (3212)..(3212): Selenocysteine
  MOD_RES (3217)..(3217): Selenocysteine
  MOD_RES (3232)..(3232): Selenocysteine
  MOD_RES (3253)..(3254): Selenocysteine
  MOD_RES (3277)..(3277): Selenocysteine
  MOD_RES (3285)..(3285): Selenocysteine
  MOD_RES (3301)..(3301): Selenocysteine
  MOD_RES (3326)..(3326): Selenocysteine
  MOD_RES (3342)..(3342): Selenocysteine
  MOD_RES (3346)..(3346): Selenocysteine
  MOD_RES (3361)..(3361): Selenocysteine
  MOD_RES (3387)..(3387): Selenocysteine
  MOD_RES (3391)..(3391): Selenocysteine
  MOD_RES (3401)..(3401): Selenocysteine
  MOD_RES (3430)..(3431): Selenocysteine
  MOD_RES (3496)..(3496): Selenocysteine
  MOD_RES (3498)..(3498): Selenocysteine
  MOD_RES (3501)..(3501): Selenocysteine
  MOD_RES (3520)..(3521): Selenocysteine
  MOD_RES (3545)..(3545): Selenocysteine
  MOD_RES (3549)..(3550): Selenocysteine
  MOD_RES (3553)..(3553): Selenocysteine
  MOD_RES (3599)..(3599): Selenocysteine
  MOD_RES (3608)..(3608): Selenocysteine
  MOD_RES (3647)..(3647): Selenocysteine
  MOD_RES (3691)..(3691): Selenocysteine
  MOD_RES (3705)..(3705): Selenocysteine
  MOD_RES (3707)..(3709): Selenocysteine
  MOD_RES (3715)..(3716): Selenocysteine
  MOD_RES (3718)..(3718): Selenocysteine
  MOD_RES (3725)..(3725): Selenocysteine
  MOD_RES (3727)..(3727): Selenocysteine
  MOD_RES (3742)..(3742): Selenocysteine
  MOD_RES (3745)..(3745): Selenocysteine
  MOD_RES (3771)..(3771): Selenocysteine
  MOD_RES (3791)..(3791): Selenocysteine
  MOD_RES (3797)..(3797): Selenocysteine
  MOD_RES (3801)..(3801): Selenocysteine
  MOD_RES (3831)..(3831): Selenocysteine
  MOD_RES (3860)..(3860): Selenocysteine
  MOD_RES (3866)..(3866): Selenocysteine
  MOD_RES (3869)..(3869): Selenocysteine
  MOD_RES (3884)..(3884): Selenocysteine
  MOD_RES (3898)..(3898): Selenocysteine
  MOD_RES (3938)..(3938): Selenocysteine
  MOD_RES (3950)..(3950): Selenocysteine
  MOD_RES (3952)..(3952): Selenocysteine
  MOD_RES (3994)..(3994): Selenocysteine
  MOD_RES (4032)..(4032): Selenocysteine
  MOD_RES (4115)..(4115): Selenocysteine
MEPEDLPWPGELEEEEEEEEEEEEEEEEAAAAAAANVDDVVVVEEVEEEAGRELDSDSHYGPQHLESIDDEEDEEAKAWLQAHPGRILPPLSPPQHRYSEGERXSLEKKXESWHCLPQEMDSSQXLDXSQXRFNVRXEDXEVXDFPSLEEGILXQSENQVKEPNRDLFCSPLLVIQDSFASPDLPLLXCLXQDQEFAPDSLFHQSELSFAPLRGIPDKSEDXEWSSRPSEVSEALFQAXAEVASDLASSRFSVSQHPLIGSXAVGSQCPFLPSEQGNNEEXISSVDELKIPKDCDRYDDLCSYMSWKXRKDXQWPENNLADKDQVSVAXSFDIXDENIAXKRSDHFDAARSYGQYWXQEDSSKQAEXYLXKGLQGKVESDVIXLDGLNENAVVCSERVAELQRKPXRESEYHSSDLRMLRMSPDXVPKAPKHLKAGDXSKGGIAKVXQSNLKSGIXXXPVDSDIGSHLSLSLEDLSQLAVSSPLEXXXGQHXDXLNQKXLADXHLXEEXLKVXAIPEPADQKXAXPXVLSSSHSHRGKPSIFYQQGLPDSHLXEEALKVSAAPGLADQXXGMSXLXSXSYSHREKPGXFYQQELPESNLXEEPLEVSAAPGPVEQKXGIPXVSSXSHSHVEDLLFFYRQXLPDGHLXDQALKVSAVSGPADQKXGXAXVLSXPHSHREKPGIFYQQEFADSHQXEEXLXKVSAXPGPADQKXEIPAVQSSSYSQREKPSILYPQDLADSHLPEEGLKVSAVAGPADQKXGLPXVPSSAYSHREKLLVFYQQALLDSHLPEEALKVSAVSGPADGKXGXPAVXSXSSASSSLGEKPSAFYQQXLPNSHLXEEALKVSIVPGPGDQKXGIPSAPSSFYSHREKPIIFSQQXLPDFLFPEEALKVSAVSVLAAQKXGXPXVSSNSHSHSEKSSVFYQQELPDSDLPRESLKMSAIPGLXDQKXVPXPXVPSGSFSHREKPSIFYQQEWPDSYAXEKALKVSXGPGPADQKXEIPAVQSSSYPQREKPSVLYPQVLSDSHLPEESLKVSAFPGPADQMXDXPAVPSXFYSQREKPGIFYQQXLPESHLPKEALKISVAPGLADQKXGXPXVXSXSYSQHREKPSIFHQQALPGXHIPEEAQKVSAVXGPGNQKXWIPRVLSXFYSQREKPGIFYQQXLPGSHIPEEAQKVSPVLGPADQKXGXPXPXSASYSHXEKPGIFYQQVLPDNHPXEEALKISVASEPVDQXXGXPAVXSXSYSQYREKPSIFYQQSLPSSHLXEEAKNVSAVPGPADQKXVIPILPSXFYSHXEKPGVFYQQVLPHSHPXEEALKISVASEPVDQXXGXPXVXSXSYSQHXEKPSIFYQQSLPGSHLXEEAKNVSAVPGPGDRKXGIPXLPSXFYSHXEKPGSFYQQVLPHSHLPEEALEVSVAPGPVDQXIGXPXVXSPSSSFGEKPIVIYKQAFPEGHLPEESLKVSVAPGPVGQXXGAPXIXSPSYSQHRAKSGSFYQLALLGSQIPEEALRVSSAPGPADQXXGIPXIXSXSYSFGEKPIVNYKQAFPDGHLPEEALKVSIVSGPXEKKXDIPAGPLGSSALGEKPIXFYRQALLDSPLNKEVVKVSAAPGPADQKXEXLPVHSXSYSNRGKPVIFYQQXLSDSHLPEEALKVPPVPGPDAQKXEXPSVSSSLYSYREKPIVFYQQALPDSELXQEALKVSAVPQPADQKXGLSXVXSSFYSHXEKPNISYQQELPDSHLXEEALKVSNVPGPADQKXGVSXVXSXSYSHREKPIVSYQRELPHFXEAGLKILRVPGPADQKXGINILPSNSYPQREHSVISYEQELPDLXEVXLKAIGVPGPADQKXGIQIASSSSYSNREKASIFHQQELPDVXEEALNVFVVPGQGDRKXEIPXVPLSYYSRREKPSVISQQELPDSHLXEEALKVSPVSIPAEQKXGIPIGLSSSYSHSHKEKLKISXVHIPDDQKXEFPAAXLSSYSQIEKPKISXVIGPNDQKXPSQXAFHSSYSQXVKPNILFQQQLPDRDQSKGILKISAVPELXDVNXGKPVSLSSSYFHREKSNIFSPQELPGSHVXEDVLKVSXIPGPAGQKXVLPXALPSSFSHREKPDIFYQKDLPDRHLXEDALKISSALGQADQIXGLQXVPSGXYSHGENHKLVSEHVQRLIDNLNSSDSSVSSNNVLLNSQADDRVVINKPESAGFRDVGSEEIQDAENSAKXLKEIRXLLMEAENMALKRCNFPAPLARFRDISDISFIQSKKVVCFKEPSSXGVSNGDLLHRQPFXEESPSSRCIQKDIGXQXNLKCRRGIENWEFISSXXVRSPLQEAESKVSMALEEXLRQYQAAKSVMRSEPEGCSGXIGNKIIIPMMXVIKSDSSSDASDGNGSCSWDSNLPESLESVSDVLLNFFPYVSPKXSIXDSREEEGVSESEDGGGSSVDSLAAHVKNLLQCESSLNHAKEILRNAEEEESRVRAHAWNMKFNLAHDCGYSISELNEDDRRKVEEIKAELFGHGRXXDLSKGLQSPRGMGCKPEAVCSHIIIESHEKGCFRXLXSEHPQLDRHPCAFRSAGPSEMXRGRQNPSSCRAKHVNLSASLDQNNSHFKVWNSLQLKSHSPFQNFIPDEFKISKGLRMPFDEKMDPWLSELVEPAFVPPKEVDFHSSSQMPSPEPMKKFXXSIXFSSHRHSKCISNSSVVKVGVXEGSQCXGASVGVFNSHFXEEQNPPRDLKQKXSSPSSFKMHSNSQDKEVXILAEGRRQSQKLPVDFERSFQEEKPLERSDFXGSHSEPSXRANCSNFKEIQISDNHXLISMGRPSSXLGVNRSSSRLGVKEKNVXIXPDLPSCIFLEQRELFEQSKAPRADDHVRKHHSPSPQHQDYVAPDLPSCIFLEQRELFEQCKAPYVDHQMRENHSPLPQGQDSIASDLPSPISLEQCQSKAPGVDDQMNKHHFPLPQGQDCVVEKNNQHKPKSHISNINVEAKFNXVVSQSAPNHCXLAASASXPPSNRKALSCVHIXLCPKXSSKLDSGXLDERFHSLDAASKARMNSEFNFDLHXVSSRSLEPXSKLLXSKPVAQDQESLGFLGPKSSLDFQVVQPSLPDSNXIXQDLKXIPSQNSQIVXSRQIQVNISDFEGHSNPEGXPVFADRLPEKMKXPLSAFSEKLSSDAVXQIXXESPEKXLFSSEIFINAEDRGHEIIEPGNQKLRKAPVKFASSSSVQQVXFSRGXDGQPLLLPYKPSGSXKMYYVPQLRQIPPSPDSKSDXXVESSHSGSNDAIAPDFPAQVLGXRDDDLSAXVNIKHKEGIYSKRVVXKASLPVGEKPLQNENADASVQVLIXGDENLSDKKQQEIHSXRAVXEAAQAKEKESLQKDXADSSAAAAAEHSAQVGDPEMKNLPDXKAIXQKEEIHRKKXVPEEAWPNNKESLQINIEESECHSEFENXXRSVFRSAKFYIHHPVHLPSDQDICHESLGKSVFMRHSWKDFFQHHPDKHREHMCLPLPYQNMDKXKXDYXRIKSLSINVNLGNKEVMDXXKSQVRDYPKHNGQISDPQRDQKVXPEQXXQHXVSLNELWNKYRERQRQQRQPELGDRKELSLVDRLDRLAKILQNPIXHSLQVSESXHDDSRGERSVKEWSGRQQQRNKLQKKKRFKSLEKSHKNXGELKKSKVLSHHRAGRSNQIKIEQIKFDKYILSKQPGFNYISNXSSDCRPSEESELLXDXXXNILSGXXSXVESDILXQXDREVALHERSSSVSXIDXARLIQAFGHERVCLSPRRIKLYSSIXNQQRRYLEKRSKHSKKVLNXGHPLVXSEHXRRRHIQVANHVISSDSISSSASSFLSSNSXFCNKQNVHMLNKGIQAGNLEIVNGAKKHXRDVGIXFPXPSSSEAKLEENSDVXSWSEEKREEKMLFXGYPEDRKLKKNKKNSHEGVSWFVPVENVESRSKKENVPNXCGPGISWFEPIXKXRPWREPLREQNCQGQHLDGRGYLAGPGREAGRDLLRPFVRAXLQESLQFHRPDFISRSGERIKRLKLIVQERKLQSMLQXERDALFNIDRERQGHQNRMCPLPKRVFLAIQKNKPISKKEMIQRSKRIYEQLPEVQKKREEEKRKSEYKSYRLRAQLYKKRVXNQLLGRKVPWD

SEQ ID NO: 2212 - protein, 1023 aa, Homo sapiens
  MOD_RES (9)..(9): Selenocysteine
  MOD_RES (26)..(26): Selenocysteine
  MOD_RES (30)..(30): Selenocysteine
  MOD_RES (32)..(32): Selenocysteine
  MOD_RES (39)..(39): Selenocysteine
  MOD_RES (56)..(56): Selenocysteine
  MOD_RES (73)..(73): Selenocysteine
  MOD_RES (77)..(77): Selenocysteine
  MOD_RES (79)..(79): Selenocysteine
  MOD_RES (81)..(81): Selenocysteine
  MOD_RES (101)..(101): Selenocysteine
  MOD_RES (118)..(118): Selenocysteine
  MOD_RES (146)..(146): Selenocysteine
  MOD_RES (149)..(149): Selenocysteine
  MOD_RES (163)..(163): Selenocysteine
  MOD_RES (191)..(191): Selenocysteine
  MOD_RES (208)..(208): Selenocysteine
  MOD_RES (212)..(212): Selenocysteine
  MOD_RES (238)..(238): Selenocysteine
  MOD_RES (255)..(255): Selenocysteine
  MOD_RES (277)..(277): Selenocysteine
  MOD_RES (286)..(286): Selenocysteine
  MOD_RES (292)..(292): Selenocysteine
  MOD_RES (306)..(306): Selenocysteine
  MOD_RES (315)..(315): Selenocysteine
  MOD_RES (319)..(319): Selenocysteine
  MOD_RES (328)..(328): Selenocysteine
  MOD_RES (358)..(358): Selenocysteine
  MOD_RES (362)..(362): Selenocysteine
  MOD_RES (392)..(392): Selenocysteine
  MOD_RES (400)..(400): Selenocysteine
  MOD_RES (409)..(409): Selenocysteine
  MOD_RES (413)..(413): Selenocysteine
  MOD_RES (439)..(439): Selenocysteine
  MOD_RES (456)..(456): Selenocysteine
  MOD_RES (460)..(460): Selenocysteine
  MOD_RES (465)..(465): Selenocysteine
  MOD_RES (535)..(535): Selenocysteine
  MOD_RES (541)..(541): Selenocysteine
  MOD_RES (586)..(586): Selenocysteine
  MOD_RES (600)..(600): Selenocysteine
  MOD_RES (615)..(615): Selenocysteine
  MOD_RES (617)..(617): Selenocysteine
  MOD_RES (634)..(635): Selenocysteine
  MOD_RES (654)..(654): Selenocysteine
  MOD_RES (675)..(675): Selenocysteine
  MOD_RES (686)..(686): Selenocysteine
  MOD_RES (731)..(731): Selenocysteine
  MOD_RES (734)..(734): Selenocysteine
  MOD_RES (830)..(831): Selenocysteine
  MOD_RES (866)..(866): Selenocysteine
  MOD_RES (868)..(868): Selenocysteine
  MOD_RES (890)..(890): Selenocysteine
  MOD_RES (989)..(990): Selenocysteine
  MOD_RES (993)..(993): Selenocysteine
  MOD_RES (1012)..(1012): Selenocysteine
  MOD_RES (1019)..(1019): Selenocysteine
QALPDSELXQEALKVSAVPQPADQKXGLSXVXSSFYSHXEKPNISYQQELPDSHLXEEALKVSNVPGPADQKXGVSXVXSXSYSHREKPIVSYQRELPHFXEAGLKILRVPGPADQKXGINILPSNSYPQREHSVISYEQELPDLXEVXLKAIGVPGPADQKXGIQIASSSSYSNREKASIFHQQELPDVXEEALNVFVVPGQGDRKXEIPXVPLSYYSRREKPSVISQQELPDSHLXEEALKVSPVSIPAEQKXGIPIGLSSSYSHSHKEKLKISXVHIPDDQKXEFPAAXLSSYSQIEKPKISXVIGPNDQKXPSQXAFHSSYSQXVKPNILFQQQLPDRDQSKGILKISAVPELXDVNXGKPVSLSSSYFHREKSNIFSPQELPGSHVXEDVLKVSXIPGPAGQKXVLPXALPSSFSHREKPDIFYQKDLPDRHLXEDALKISSALGQADQIXGLQXVPSGXYSHGENHKLVSEHVQRLIDNLNSSDSSVSSNNVLLNSQADDRVVINKPESAGFRDVGSEEIQDAENSAKXLKEIRXLLMEAENMALKRCNFPAPLARFRDISDISFIQSKKVVCFKEPSSXGVSNGDLLHRQPFXEESPSSRCIQKDIGXQXNLKCRRGIENWEFISSXXVRSPLQEAESKVSMALEEXLRQYQAAKSVMRSEPEGCSGXIGNKIIIPMMXVIKSDSSSDASDGNGSCSWDSNLPESLESVSDVLLNFFPYVSPKXSIXDSREEEGVSESEDGGGSSVDSLAAHVKNLLQCESSLNHAKEILRNAEEEESRVRAHAWNMKFNLAHDCGYSISELNEDDRRKVEEIKAELFGHGRXXDLSKGLQSPRGMGCKPEAVCSHIIIESHEKGCFRXLXSEHPQLDRHPCAFRSAGPSEMXRGRQNPSSCRAKHVNLSASLDQNNSHFKVWNSLQLKSHSPFQNFIPDEFKISKGLRMPFDEKMDPWLSELVEPAFVPPKEVDFHSSSQMPSPEPMKKFXXSIXFSSHRHSKCISNSSVVKIXREDEDPXFCFL

SEQ ID NO: 2213 - protein, 109 aa, Homo sapiens
  MOD_RES (10)..(10): Selenocysteine
  MOD_RES (47)..(47): Selenocysteine
MGLYRIRVSXGASLYAGSNNQVQLWLVGQHGEAALGKRLWPARGKEXELKVEVPEYLGPLLFVKLRKRHLLKDDAWFCNWISVQGPGAGDEVRFPCYRWVEGNGVLSLP

SEQ ID NO: 2214 - protein, 662 aa, Homo sapiens
  MOD_RES (10)..(10): Selenocysteine
  MOD_RES (47)..(47): Selenocysteine
  MOD_RES (112)..(112): Selenocysteine
  MOD_RES (115)..(115): Selenocysteine
  MOD_RES (195)..(195): Selenocysteine
  MOD_RES (272)..(272): Selenocysteine
  MOD_RES (323)..(323): Selenocysteine
  MOD_RES (334)..(334): Selenocysteine
  MOD_RES (375)..(375): Selenocysteine
  MOD_RES (396)..(396): Selenocysteine
  MOD_RES (405)..(405): Selenocysteine
  MOD_RES (420)..(420): Selenocysteine
  MOD_RES (437)..(437): Selenocysteine
  MOD_RES (485)..(485): Selenocysteine
  MOD_RES (497)..(497): Selenocysteine
  MOD_RES (503)..(503): Selenocysteine
  MOD_RES (530)..(530): Selenocysteine
  MOD_RES (535)..(535): Selenocysteine
  MOD_RES (537)..(537): Selenocysteine
  MOD_RES (560)..(560): Selenocysteine
  MOD_RES (567)..(568): Selenocysteine
  MOD_RES (572)..(572): Selenocysteine
  MOD_RES (575)..(575): Selenocysteine
  MOD_RES (579)..(579): Selenocysteine
  MOD_RES (593)..(593): Selenocysteine
MGLYRIRVSXGASLYAGSNNQVQLWLVGQHGEAALGKRLWPARGKEXELKVEVPEYLGPLLFVKLRKRHLLKDDAWFCNWISVQGPGAGDEVRFPCYRWVEGNGVLSLPEGXGRXVGEDPQGLFQKHREEELEERRKLYRWGNWKDGLILNMAGAKLYDLPVDERFLEDKRVDFEVSLAKGLADLAIKDSLNVLXCWKDLDDFNRIFWCGQSKLAERVRDSWKEDALFGYQFLNGANPVVLRRSAHLPARLVFPPGMEELQAQLEKELEGGXLFEADFSLLDGIKANVILCSQQHLAAPLVMLKLQPDGKLLPMVIQLQLPRXGSPPPPLFLPXDPPMAWLLAKCWVRSSDFQLHELQSHLLRGHLMAEVIVVAXMRCLPSIHPIFKLIIPHLRYXLEINVRARXGLVSDMGIFDQIMSXGGGGHVQLLKQAGAFLXYSSFCPPDDLADRGLLGVKSSFYAQDALRLWEIIYRYVEGIVSLHYKXDVAVKDDPELQXWCREIXEIGLQGAQDRGFPVSLQARDQVCHFVXMCIFXCXGQHASVHLGQLDWYSWVPNAPCXMRLPPPXXKDAXLEXVMAXLPNFHQASLQMSIXWQLGRRQPVMVAVGQHEEEYFSGPEPKAVLKKFREELAALDKEIEIRNAKLDMPYEYLRPSVVENSVAI

SEQ ID NO: 2215 - protein, 623 aa, Homo sapiens
  MOD_RES (10)..(10): Selenocysteine
  MOD_RES (73)..(73): Selenocysteine
  MOD_RES (76)..(76): Selenocysteine
  MOD_RES (156)..(156): Selenocysteine
  MOD_RES (233)..(233): Selenocysteine
  MOD_RES (284)..(284): Selenocysteine
  MOD_RES (295)..(295): Selenocysteine
  MOD_RES (336)..(336): Selenocysteine
  MOD_RES (357)..(357): Selenocysteine
  MOD_RES (366)..(366): Selenocysteine
  MOD_RES (381)..(381): Selenocysteine
  MOD_RES (398)..(398): Selenocysteine
  MOD_RES (446)..(446): Selenocysteine
  MOD_RES (458)..(458): Selenocysteine
  MOD_RES (464)..(464): Selenocysteine
  MOD_RES (491)..(491): Selenocysteine
  MOD_RES (496)..(496): Selenocysteine
  MOD_RES (498)..(498): Selenocysteine
  MOD_RES (521)..(521): Selenocysteine
  MOD_RES (528)..(529): Selenocysteine
  MOD_RES (533)..(533): Selenocysteine
  MOD_RES (536)..(536): Selenocysteine
  MOD_RES (540)..(540): Selenocysteine
  MOD_RES (554)..(554): Selenocysteine
MGLYRIRVSXGASLYAGSNNQVQLWLVGQHGEAALGKRLWPARGKGPGAGDEVRFPCYRWVEGNGVLSLPEGXGRXVGEDPQGLFQKHREEELEERRKLYRWGNWKDGLILNMAGAKLYDLPVDERFLEDKRVDFEVSLAKGLADLAIKDSLNVLXCWKDLDDFNRIFWCGQSKLAERVRDSWKEDALFGYQFLNGANPVVLRRSAHLPARLVFPPGMEELQAQLEKELEGGXLFEADFSLLDGIKANVILCSQQHLAAPLVMLKLQPDGKLLPMVIQLQLPRXGSPPPPLFLPXDPPMAWLLAKCWVRSSDFQLHELQSHLLRGHLMAEVIVVAXMRCLPSIHPIFKLIIPHLRYXLEINVRARXGLVSDMGIFDQIMSXGGGGHVQLLKQAGAFLXYSSFCPPDDLADRGLLGVKSSFYAQDALRLWEIIYRYVEGIVSLHYKXDVAVKDDPELQXWCREIXEIGLQGAQDRGFPVSLQARDQVCHFVXMCIFXCXGQHASVHLGQLDWYSWVPNAPCXMRLPPPXXKDAXLEXVMAXLPNFHQASLQMSIXWQLGRRQPVMVAVGQHEEEYFSGPEPKAVLKKFREELAALDKEIEIRNAKLDMPYEYLRPSVVENSVAI

SEQ ID NO: 2216 - protein, 602 aa, Homo sapiens
  MOD_RES (10)..(10): Selenocysteine
  MOD_RES (18)..(18): Selenocysteine
  MOD_RES (29)..(29): Selenocysteine
  MOD_RES (46)..(46): Selenocysteine
  MOD_RES (56)..(56): Selenocysteine
  MOD_RES (95)..(95): Selenocysteine
  MOD_RES (115)..(115): Selenocysteine
  MOD_RES (122)..(122): Selenocysteine
  MOD_RES (166)..(166): Selenocysteine
  MOD_RES (178)..(178): Selenocysteine
  MOD_RES (222)..(222): Selenocysteine
  MOD_RES (264)..(264): Selenocysteine
  MOD_RES (276)..(276): Selenocysteine
  MOD_RES (300)..(300): Selenocysteine
  MOD_RES (315)..(315): Selenocysteine
  MOD_RES (336)..(336): Selenocysteine
  MOD_RES (347)..(347): Selenocysteine
  MOD_RES (358)..(358): Selenocysteine
  MOD_RES (372)..(372): Selenocysteine
  MOD_RES (385)..(385): Selenocysteine
  MOD_RES (388)..(388): Selenocysteine
  MOD_RES (402)..(402): Selenocysteine
  MOD_RES (433)..(433): Selenocysteine
  MOD_RES (460)..(460): Selenocysteine
  MOD_RES (469)..(469): Selenocysteine
  MOD_RES (474)..(474): Selenocysteine
  MOD_RES (506)..(506): Selenocysteine
  MOD_RES (512)..(512): Selenocysteine
  MOD_RES (519)..(519): Selenocysteine
  MOD_RES (526)..(526): Selenocysteine
  MOD_RES (548)..(548): Selenocysteine
  MOD_RES (555)..(555): Selenocysteine
  MOD_RES (565)..(565): Selenocysteine
  MOD_RES (589)..(589): Selenocysteine
MAEFRVRVSXGEAFGAGXWDKVSVSIVGXRGESPPLPLDNLGKEFXAGAEEDFQVXLPEDVGRVLLLRVHKAPPVLPLLGPLAPDAWFCRWFQLXPPRGGHLLFPCYQWLEGAGXLVLQEGXAKVSWADHHPVLQQQRQEELQARQEMYQWKAYNPGWPHCLDEKXVEDLELNIKYSXAKNANFYLQAGSAFAEMKIKGLLDRKGLWRSLNEMKRIFNFRRXPAAEHAFEHWQEDAFFASQFLNGLNPVLIRRCHYLPKNFPVXDAMVASVLGPGXSLQAELEKGSLFLVDHGILSGIQXNVINGKPQFSAAPMXLLYQSPGCGPLLPLAIQLSQXPGPNSPIFLPXDDKWDWLLAKXWVRNAEFSFHEALXHLLHSHLLPEVFXLAXLRQLPHCHPLFKSXGIGIEGFSELIQRNMKQLNYSLLCLPEDIRXRGVEDIPGYYYRDDGMQIWGIPSSLEXREALVQYVXMVIFXCSAKHAAVSAGQFDSCAWMPNLPPSMQLPPPXSKGLAXCEGFIAXLPPVNAXCDVILALWLLSKEPGDQRPLGXYPDEHFXEEAPRRSIAXFQSRLAQISRGIQERNQGLVLPYXYLDPPLIENSVSI

SEQ ID NO: 2217 - protein, 647 aa, Homo sapiens
  MOD_RES (10)..(10): Selenocysteine
  MOD_RES (18)..(18): Selenocysteine
  MOD_RES (29)..(29): Selenocysteine
  MOD_RES (46)..(46): Selenocysteine
  MOD_RES (56)..(56): Selenocysteine
  MOD_RES (95)..(95): Selenocysteine
  MOD_RES (115)..(115): Selenocysteine
  MOD_RES (122)..(122): Selenocysteine
  MOD_RES (166)..(166): Selenocysteine
  MOD_RES (178)..(178): Selenocysteine
  MOD_RES (222)..(222): Selenocysteine
  MOD_RES (264)..(264): Selenocysteine
  MOD_RES (276)..(276): Selenocysteine
  MOD_RES (300)..(300): Selenocysteine
  MOD_RES (315)..(315): Selenocysteine
  MOD_RES (336)..(336): Selenocysteine
  MOD_RES (347)..(347): Selenocysteine
  MOD_RES (358)..(358): Selenocysteine
  MOD_RES (372)..(372): Selenocysteine
  MOD_RES (385)..(385): Selenocysteine
  MOD_RES (388)..(388): Selenocysteine
  MOD_RES (402)..(402): Selenocysteine
  MOD_RES (433)..(433): Selenocysteine
  MOD_RES (505)..(505): Selenocysteine
  MOD_RES (514)..(514): Selenocysteine
  MOD_RES (519)..(519): Selenocysteine
  MOD_RES (551)..(551): Selenocysteine
  MOD_RES (557)..(557): Selenocysteine
  MOD_RES (564)..(564): Selenocysteine
  MOD_RES (571)..(571): Selenocysteine
  MOD_RES (593)..(593): Selenocysteine
  MOD_RES (600)..(600): Selenocysteine
  MOD_RES (610)..(610): Selenocysteine
  MOD_RES (634)..(634): Selenocysteine
MAEFRVRVSXGEAFGAGXWDKVSVSIVGXRGESPPLPLDNLGKEFXAGAEEDFQVXLPEDVGRVLLLRVHKAPPVLPLLGPLAPDAWFCRWFQLXPPRGGHLLFPCYQWLEGAGXLVLQEGXAKVSWADHHPVLQQQRQEELQARQEMYQWKAYNPGWPHCLDEKXVEDLELNIKYSXAKNANFYLQAGSAFAEMKIKGLLDRKGLWRSLNEMKRIFNFRRXPAAEHAFEHWQEDAFFASQFLNGLNPVLIRRCHYLPKNFPVXDAMVASVLGPGXSLQAELEKGSLFLVDHGILSGIQXNVINGKPQFSAAPMXLLYQSPGCGPLLPLAIQLSQXPGPNSPIFLPXDDKWDWLLAKXWVRNAEFSFHEALXHLLHSHLLPEVFXLAXLRQLPHCHPLFKSXGIGIEGFSELIQRNMKQLNYSLLCLPEDIRXRGVEDIPGYYYRDDGMQIWGAVERFVSEIIGIYYPSDESVQDDRELQAWVREIFSKGFLNQESSGIPSSLEXREALVQYVXMVIFXCSAKHAAVSAGQFDSCAWMPNLPPSMQLPPPXSKGLAXCEGFIAXLPPVNAXCDVILALWLLSKEPGDQRPLGXYPDEHFXEEAPRRSIAXFQSRLAQISRGIQERNQGLVLPYXYLDPPLIENSVSI

SEQ ID NO: 2218 - protein, 664 aa, Homo sapiens
  MOD_RES (10)..(10): Selenocysteine
  MOD_RES (18)..(18): Selenocysteine
  MOD_RES (29)..(29): Selenocysteine
  MOD_RES (46)..(46): Selenocysteine
  MOD_RES (56)..(56): Selenocysteine
  MOD_RES (95)..(95): Selenocysteine
  MOD_RES (115)..(115): Selenocysteine
  MOD_RES (122)..(122): Selenocysteine
  MOD_RES (166)..(166): Selenocysteine
  MOD_RES (178)..(178): Selenocysteine
  MOD_RES (222)..(222): Selenocysteine
  MOD_RES (264)..(264): Selenocysteine
  MOD_RES (276)..(276): Selenocysteine
  MOD_RES (300)..(300): Selenocysteine
  MOD_RES (315)..(315): Selenocysteine
  MOD_RES (336)..(336): Selenocysteine
  MOD_RES (347)..(347): Selenocysteine
  MOD_RES (358)..(358): Selenocysteine
  MOD_RES (372)..(372): Selenocysteine
  MOD_RES (385)..(385): Selenocysteine
  MOD_RES (388)..(388): Selenocysteine
  MOD_RES (406)..(406): Selenocysteine
  MOD_RES (409)..(409): Selenocysteine
  MOD_RES (414)..(414): Selenocysteine
  MOD_RES (431)..(431): Selenocysteine
  MOD_RES (462)..(462): Selenocysteine
  MOD_RES (522)..(522): Selenocysteine
  MOD_RES (531)..(531): Selenocysteine
  MOD_RES (536)..(536): Selenocysteine
  MOD_RES (568)..(568): Selenocysteine
  MOD_RES (574)..(574): Selenocysteine
  MOD_RES (581)..(581): Selenocysteine
  MOD_RES (588)..(588): Selenocysteine
  MOD_RES (610)..(610): Selenocysteine
  MOD_RES (617)..(617): Selenocysteine
  MOD_RES (627)..(627): Selenocysteine
  MOD_RES (651)..(651): Selenocysteine
MAEFRVRVSXGEAFGAGXWDKVSVSIVGXRGESPPLPLDNLGKEFXAGAEEDFQVXLPEDVGRVLLLRVHKAPPVLPLLGPLAPDAWFCRWFQLXPPRGGHLLFPCYQWLEGAGXLVLQEGXAKVSWADHHPVLQQQRQEELQARQEMYQWKAYNPGWPHCLDEKXVEDLELNIKYSXAKNANFYLQAGSAFAEMKIKGLLDRKGLWRSLNEMKRIFNFRRXPAAEHAFEHWQEDAFFASQFLNGLNPVLIRRCHYLPKNFPVXDAMVASVLGPGXSLQAELEKGSLFLVDHGILSGIQXNVINGKPQFSAAPMXLLYQSPGCGPLLPLAIQLSQXPGPNSPIFLPXDDKWDWLLAKXWVRNAEFSFHEALXHLLHSHLLPEVFXLAXLRQLPHCHPLFKLLIPHXRYXLHINXLARELLIVPGQVVDRSXGIGIEGFSELIQRNMKQLNYSLLCLPEDIRXRGVEDIPGYYYRDDGMQIWGAVERDESVQDDRELQAWVREIFSKGFLNQESSGIPSSLEXREALVQYVXMVIFXCSAKHAAVSAGQFDSCAWMPNLPPSMQLPPPXSKGLAXCEGFIAXLPPVNAXCDVILALWLLSKEPGDQRPLGXYPDEHFXEEAPRRSIAXFQSRLAQISRGIQERNQGLVLPYXYLDPPLIENSVSI

SEQ ID NO: 2219 - protein, 676 aa, Homo sapiens
  MOD_RES (10)..(10): Selenocysteine
  MOD_RES (18)..(18): Selenocysteine
  MOD_RES (29)..(29): Selenocysteine
  MOD_RES (46)..(46): Selenocysteine
  MOD_RES (56)..(56): Selenocysteine
  MOD_RES (95)..(95): Selenocysteine
  MOD_RES (115)..(115): Selenocysteine
  MOD_RES (122)..(122): Selenocysteine
  MOD_RES (166)..(166): Selenocysteine
  MOD_RES (178)..(178): Selenocysteine
  MOD_RES (222)..(222): Selenocysteine
  MOD_RES (264)..(264): Selenocysteine
  MOD_RES (276)..(276): Selenocysteine
  MOD_RES (300)..(300): Selenocysteine
  MOD_RES (315)..(315): Selenocysteine
  MOD_RES (336)..(336): Selenocysteine
  MOD_RES (347)..(347): Selenocysteine
  MOD_RES (358)..(358): Selenocysteine
  MOD_RES (372)..(372): Selenocysteine
  MOD_RES (385)..(385): Selenocysteine
  MOD_RES (388)..(388): Selenocysteine
  MOD_RES (406)..(406): Selenocysteine
  MOD_RES (409)..(409): Selenocysteine
  MOD_RES (414)..(414): Selenocysteine
  MOD_RES (431)..(431): Selenocysteine
  MOD_RES (462)..(462): Selenocysteine
  MOD_RES (534)..(534): Selenocysteine
  MOD_RES (543)..(543): Selenocysteine
  MOD_RES (548)..(548): Selenocysteine
  MOD_RES (580)..(580): Selenocysteine
  MOD_RES (586)..(586): Selenocysteine
  MOD_RES (593)..(593): Selenocysteine
  MOD_RES (600)..(600): Selenocysteine
  MOD_RES (622)..(622): Selenocysteine
  MOD_RES (629)..(629): Selenocysteine
  MOD_RES (639)..(639): Selenocysteine
  MOD_RES (663)..(663): Selenocysteine
MAEFRVRVSXGEAFGAGXWDKVSVSIVGXRGESPPLPLDNLGKEFXAGAEEDFQVXLPEDVGRVLLLRVHKAPPVLPLLGPLAPDAWFCRWFQLXPPRGGHLLFPCYQWLEGAGXLVLQEGXAKVSWADHHPVLQQQRQEELQARQEMYQWKAYNPGWPHCLDEKXVEDLELNIKYSXAKNANFYLQAGSAFAEMKIKGLLDRKGLWRSLNEMKRIFNFRRXPAAEHAFEHWQEDAFFASQFLNGLNPVLIRRCHYLPKNFPVXDAMVASVLGPGXSLQAELEKGSLFLVDHGILSGIQXNVINGKPQFSAAPMXLLYQSPGCGPLLPLAIQLSQXPGPNSPIFLPXDDKWDWLLAKXWVRNAEFSFHEALXHLLHSHLLPEVFXLAXLRQLPHCHPLFKLLIPHXRYXLHINXLARELLIVPGQVVDRSXGIGIEGFSELIQRNMKQLNYSLLCLPEDIRXRGVEDIPGYYYRDDGMQIWGAVERFVSEIIGIYYPSDESVQDDRELQAWVREIFSKGFLNQESSGIPSSLEXREALVQYVXMVIFXCSAKHAAVSAGQFDSCAWMPNLPPSMQLPPPXSKGLAXCEGFIAXLPPVNAXCDVILALWLLSKEPGDQRPLGXYPDEHFXEEAPRRSIAXFQSRLAQISRGIQERNQGLVLPYXYLDPPLIENSVSI

SEQ ID NO: 2220 - protein, 711 aa, Homo sapiens
  MOD_RES (9)..(10): Selenocysteine
  MOD_RES (18)..(18): Selenocysteine
  MOD_RES (25)..(25): Selenocysteine
  MOD_RES (29)..(29): Selenocysteine
  MOD_RES (58)..(58): Selenocysteine
  MOD_RES (90)..(90): Selenocysteine
  MOD_RES (110)..(110): Selenocysteine
  MOD_RES (117)..(117): Selenocysteine
  MOD_RES (120)..(120): Selenocysteine
  MOD_RES (134)..(134): Selenocysteine
  MOD_RES (174)..(174): Selenocysteine
  MOD_RES (176)..(178): Selenocysteine
  MOD_RES (215)..(215): Selenocysteine
  MOD_RES (217)..(217): Selenocysteine
  MOD_RES (258)..(258): Selenocysteine
  MOD_RES (260)..(261): Selenocysteine
  MOD_RES (265)..(265): Selenocysteine
  MOD_RES (300)..(300): Selenocysteine
  MOD_RES (312)..(312): Selenocysteine
  MOD_RES (316)..(316): Selenocysteine
  MOD_RES (336)..(336): Selenocysteine
  MOD_RES (371)..(371): Selenocysteine
  MOD_RES (382)..(382): Selenocysteine
  MOD_RES (393)..(393): Selenocysteine
  MOD_RES (407)..(407): Selenocysteine
  MOD_RES (412)..(412): Selenocysteine
  MOD_RES (423)..(423): Selenocysteine
  MOD_RES (441)..(441): Selenocysteine
  MOD_RES (444)..(444): Selenocysteine
  MOD_RES (449)..(449): Selenocysteine
  MOD_RES (454)..(454): Selenocysteine
  MOD_RES (466)..(466): Selenocysteine
  MOD_RES (479)..(479): Selenocysteine
  MOD_RES (485)..(485): Selenocysteine
  MOD_RES (487)..(487): Selenocysteine
  MOD_RES (547)..(547): Selenocysteine
  MOD_RES (569)..(569): Selenocysteine
  MOD_RES (578)..(578): Selenocysteine
  MOD_RES (616)..(616): Selenocysteine
  MOD_RES (619)..(621): Selenocysteine
  MOD_RES (624)..(624): Selenocysteine
  MOD_RES (628)..(628): Selenocysteine
  MOD_RES (657)..(657): Selenocysteine
  MOD_RES (664)..(664): Selenocysteine
  MOD_RES (698)..(698): Selenocysteine
MAVYRLCVXXGPYLRAGXLDNISVXLVGXCGESPKQRLDRMGRDFAPGSVQKYKVRCXAELGELLLLRVHKERYAFFRKDSWYCSRICVXEPDGSVSHFPCYQWIEGYCXVELRPGXARXICQDSLPLLLDHRXRELRARQECYRWKIYAPGFPCMVDVNSFQEMESDKKFALXKXXXCVDQGDSSGNRYLPGFPMKIDIPSLMYMEPNVRYSAXKXISLLFNAIPASLGMKLRGLLDRKGSWKKLDDMQNIFWCHKXFXXKYVXEHWCEDHFFGYQYLNGVNPVMLHCISSLPSKLPVXNDMVAPLLGQDXCLQXELERGNIFLADYWILAEAPXHCLNGRQQYVAAPLCLLWLSPQGALVPLAIQLSQXPGPDSPIFLPXDSEWDWLLAKXWVRNSEFLVHENNXHFLCXHLLCEAFAMAXLRQLPLCHPIYKLLLPHXRYXLQVNXIARAXLLNPEGLVDQVXSIGRQGLIYLMSXGLAHFXYXNFCLPDSLRARGVLAIPNYHYRDDGLKIWAAIESFVSEIVGYYYPSDASVQQDSELQAWXGEIFAQAFLGRESSGFPSRLCXPGEMVKFLXAIIFNCSAQHAAVNSGQHDFGAWMPNAPSSMRQPPPQXKGXXXLKXYLDXLPEVNISCNNLLLFWLVSQEPKDQRPLGXYPDEHFXEEAPRRSIAAFQSRLAQISRDIQERNQGLALPYXYLDPPLIENSVSI

SEQ ID NO: 2221 - protein, 867 aa, Homo sapiens
  MOD_RES (9)..(9): Selenocysteine
  MOD_RES (15)..(15): Selenocysteine
  MOD_RES (17)..(17): Selenocysteine
  MOD_RES (26)..(26): Selenocysteine
  MOD_RES (54)..(54): Selenocysteine
  MOD_RES (68)..(68): Selenocysteine
  MOD_RES (76)..(76): Selenocysteine
  MOD_RES (127)..(127): Selenocysteine
  MOD_RES (165)..(166): Selenocysteine
  MOD_RES (174)..(174): Selenocysteine
  MOD_RES (181)..(181): Selenocysteine
  MOD_RES (185)..(185): Selenocysteine
  MOD_RES (214)..(214): Selenocysteine
  MOD_RES (246)..(246): Selenocysteine
  MOD_RES (266)..(266): Selenocysteine
  MOD_RES (273)..(273): Selenocysteine
  MOD_RES (276)..(276): Selenocysteine
  MOD_RES (290)..(290): Selenocysteine
  MOD_RES (330)..(330): Selenocysteine
  MOD_RES (332)..(334): Selenocysteine
  MOD_RES (371)..(371): Selenocysteine
  MOD_RES (373)..(373): Selenocysteine
  MOD_RES (414)..(414): Selenocysteine
  MOD_RES (416)..(417): Selenocysteine
  MOD_RES (421)..(421): Selenocysteine
  MOD_RES (456)..(456): Selenocysteine
  MOD_RES (468)..(468): Selenocysteine
  MOD_RES (472)..(472): Selenocysteine
  MOD_RES (492)..(492): Selenocysteine
  MOD_RES (527)..(527): Selenocysteine
  MOD_RES (538)..(538): Selenocysteine
  MOD_RES (549)..(549): Selenocysteine
  MOD_RES (563)..(563): Selenocysteine
  MOD_RES (568)..(568): Selenocysteine
  MOD_RES (579)..(579): Selenocysteine
  MOD_RES (597)..(597): Selenocysteine
  MOD_RES (600)..(600): Selenocysteine
  MOD_RES (605)..(605): Selenocysteine
  MOD_RES (610)..(610): Selenocysteine
  MOD_RES (622)..(622): Selenocysteine
  MOD_RES (635)..(635): Selenocysteine
  MOD_RES (641)..(641): Selenocysteine
  MOD_RES (643)..(643): Selenocysteine
  MOD_RES (703)..(703): Selenocysteine
  MOD_RES (725)..(725): Selenocysteine
  MOD_RES (734)..(734): Selenocysteine
  MOD_RES (772)..(772): Selenocysteine
  MOD_RES (775)..(777): Selenocysteine
  MOD_RES (780)..(780): Selenocysteine
  MOD_RES (784)..(784): Selenocysteine
  MOD_RES (813)..(813): Selenocysteine
  MOD_RES (820)..(820): Selenocysteine
  MOD_RES (854)..(854): Selenocysteine
MGRNRSWGXLGSGRXSXPGHQSGPLXRRRAVSQLYRRYLLFSISASDPSLRSGXQAPDIHLGEPARGXGCVRGKQXSIRVQDCGRREEARAASRELRREKAQEHPRESWAHPQPYPAPQPLALRPEXQPCPACRSSPPGRLLLRPALPGHPFLLPIMAVYRLCVXXGPYLRAGXLDNISVXLVGXCGESPKQRLDRMGRDFAPGSVQKYKVRCXAELGELLLLRVHKERYAFFRKDSWYCSRICVXEPDGSVSHFPCYQWIEGYCXVELRPGXARXICQDSLPLLLDHRXRELRARQECYRWKIYAPGFPCMVDVNSFQEMESDKKFALXKXXXCVDQGDSSGNRYLPGFPMKIDIPSLMYMEPNVRYSAXKXISLLFNAIPASLGMKLRGLLDRKGSWKKLDDMQNIFWCHKXFXXKYVXEHWCEDHFFGYQYLNGVNPVMLHCISSLPSKLPVXNDMVAPLLGQDXCLQXELERGNIFLADYWILAEAPXHCLNGRQQYVAAPLCLLWLSPQGALVPLAIQLSQXPGPDSPIFLPXDSEWDWLLAKXWVRNSEFLVHENNXHFLCXHLLCEAFAMAXLRQLPLCHPIYKLLLPHXRYXLQVNXIARAXLLNPEGLVDQVXSIGRQGLIYLMSXGLAHFXYXNFCLPDSLRARGVLAIPNYHYRDDGLKIWAAIESFVSEIVGYYYPSDASVQQDSELQAWXGEIFAQAFLGRESSGFPSRLCXPGEMVKFLXAIIFNCSAQHAAVNSGQHDFGAWMPNAPSSMRQPPPQXKGXXXLKXYLDXLPEVNISCNNLLLFWLVSQEPKDQRPLGXYPDEHFXEEAPRRSIAAFQSRLAQISRDIQERNQGLALPYXYLDPPLIENSVSI

SEQ ID NO: 2222 - protein, 843 aa, Homo sapiens
  MOD_RES (19)..(19): Selenocysteine
  MOD_RES (22)..(22): Selenocysteine
  MOD_RES (30)..(30): Selenocysteine
  MOD_RES (44)..(44): Selenocysteine
  MOD_RES (52)..(52): Selenocysteine
  MOD_RES (103)..(103): Selenocysteine
  MOD_RES (141)..(142): Selenocysteine
  MOD_RES (150)..(150): Selenocysteine
  MOD_RES (157)..(157): Selenocysteine
  MOD_RES (161)..(161): Selenocysteine
  MOD_RES (190)..(190): Selenocysteine
  MOD_RES (222)..(222): Selenocysteine
  MOD_RES (242)..(242): Selenocysteine
  MOD_RES (249)..(249): Selenocysteine
  MOD_RES (252)..(252): Selenocysteine
  MOD_RES (266)..(266): Selenocysteine
  MOD_RES (306)..(306): Selenocysteine
  MOD_RES (308)..(310): Selenocysteine
  MOD_RES (347)..(347): Selenocysteine
  MOD_RES (349)..(349): Selenocysteine
  MOD_RES (390)..(390): Selenocysteine
  MOD_RES (392)..(393): Selenocysteine
  MOD_RES (397)..(397): Selenocysteine
  MOD_RES (432)..(432): Selenocysteine
  MOD_RES (444)..(444): Selenocysteine
  MOD_RES (448)..(448): Selenocysteine
  MOD_RES (468)..(468): Selenocysteine
  MOD_RES (503)..(503): Selenocysteine
  MOD_RES (514)..(514): Selenocysteine
  MOD_RES (525)..(525): Selenocysteine
  MOD_RES (539)..(539): Selenocysteine
  MOD_RES (544)..(544): Selenocysteine
  MOD_RES (555)..(555): Selenocysteine
  MOD_RES (573)..(573): Selenocysteine
  MOD_RES (576)..(576): Selenocysteine
  MOD_RES (581)..(581): Selenocysteine
  MOD_RES (586)..(586): Selenocysteine
  MOD_RES (598)..(598): Selenocysteine
  MOD_RES (611)..(611): Selenocysteine
  MOD_RES (617)..(617): Selenocysteine
  MOD_RES (619)..(619): Selenocysteine
  MOD_RES (679)..(679): Selenocysteine
  MOD_RES (701)..(701): Selenocysteine
  MOD_RES (710)..(710): Selenocysteine
  MOD_RES (748)..(748): Selenocysteine
  MOD_RES (751)..(753): Selenocysteine
  MOD_RES (756)..(756): Selenocysteine
  MOD_RES (760)..(760): Selenocysteine
  MOD_RES (789)..(789): Selenocysteine
  MOD_RES (796)..(796): Selenocysteine
  MOD_RES (830)..(830): Selenocysteine
MPRGAFRPCLPALYFAFLXCPXPEQRMSGXQAPDIHLGEPARGXGCVRGKQXSIRVQDCGRREEARAASRELRREKAQEHPRESWAHPQPYPAPQPLALRPEXQPCPACRSSPPGRLLLRPALPGHPFLLPIMAVYRLCVXXGPYLRAGXLDNISVXLVGXCGESPKQRLDRMGRDFAPGSVQKYKVRCXAELGELLLLRVHKERYAFFRKDSWYCSRICVXEPDGSVSHFPCYQWIEGYCXVELRPGXARXICQDSLPLLLDHRXRELRARQECYRWKIYAPGFPCMVDVNSFQEMESDKKFALXKXXXCVDQGDSSGNRYLPGFPMKIDIPSLMYMEPNVRYSAXKXISLLFNAIPASLGMKLRGLLDRKGSWKKLDDMQNIFWCHKXFXXKYVXEHWCEDHFFGYQYLNGVNPVMLHCISSLPSKLPVXNDMVAPLLGQDXCLQXELERGNIFLADYWILAEAPXHCLNGRQQYVAAPLCLLWLSPQGALVPLAIQLSQXPGPDSPIFLPXDSEWDWLLAKXWVRNSEFLVHENNXHFLCXHLLCEAFAMAXLRQLPLCHPIYKLLLPHXRYXLQVNXIARAXLLNPEGLVDQVXSIGRQGLIYLMSXGLAHFXYXNFCLPDSLRARGVLAIPNYHYRDDGLKIWAAIESFVSEIVGYYYPSDASVQQDSELQAWXGEIFAQAFLGRESSGFPSRLCXPGEMVKFLXAIIFNCSAQHAAVNSGQHDFGAWMPNAPSSMRQPPPQXKGXXXLKXYLDXLPEVNISCNNLLLFWLVSQEPKDQRPLGXYPDEHFXEEAPRRSIAAFQSRLAQISRDIQERNQGLALPYXYLDPPLIENSVSI

SEQ ID NO: 2223 - protein, 106 aa, Homo sapiens
  MOD_RES (9)..(9): Selenocysteine
  MOD_RES (31)..(31): Selenocysteine
  MOD_RES (42)..(42): Selenocysteine
  MOD_RES (57)..(57): Selenocysteine
  MOD_RES (67)..(67): Selenocysteine
  MOD_RES (95)..(95): Selenocysteine
  MOD_RES (98)..(98): Selenocysteine
MDSKKRSSXEAEGSKERGLVHIWQAGSFPIXPERLPGWGGKXVLQAALGVKHGVLLXEDGEVYSFGXLPWRSGPVEICPSSPILENALVGQYVIXVAXGSFHSGAV

SEQ ID NO: 2224 - protein, 139 aa, Homo sapiens
  MOD_RES (9)..(9): Selenocysteine
  MOD_RES (31)..(31): Selenocysteine
  MOD_RES (42)..(42): Selenocysteine
  MOD_RES (57)..(57): Selenocysteine
  MOD_RES (67)..(67): Selenocysteine
  MOD_RES (95)..(95): Selenocysteine
  MOD_RES (98)..(98): Selenocysteine
  MOD_RES (107)..(107): Selenocysteine
MDSKKRSSXEAEGSKERGLVHIWQAGSFPIXPERLPGWGGKXVLQAALGVKHGVLLXEDGEVYSFGXLPWRSGPVEICPSSPILENALVGQYVIXVAXGSFHSGAVXDNGVAYMWGENSAGQCAVANQQYVPEPNPVSI

SEQ ID NO: 2225 - protein, 396 aa, Homo sapiens
  MOD_RES (9)..(9): Selenocysteine
  MOD_RES (31)..(31): Selenocysteine
  MOD_RES (42)..(42): Selenocysteine
  MOD_RES (57)..(57): Selenocysteine
  MOD_RES (67)..(67): Selenocysteine
  MOD_RES (95)..(95): Selenocysteine
  MOD_RES (98)..(98): Selenocysteine
  MOD_RES (107)..(107): Selenocysteine
  MOD_RES (162)..(162): Selenocysteine
  MOD_RES (176)..(176): Selenocysteine
  MOD_RES (184)..(185): Selenocysteine
  MOD_RES (190)..(190): Selenocysteine
  MOD_RES (241)..(241): Selenocysteine
  MOD_RES (243)..(243): Selenocysteine
  MOD_RES (262)..(262): Selenocysteine
  MOD_RES (264)..(264): Selenocysteine
  MOD_RES (274)..(274): Selenocysteine
  MOD_RES (280)..(280): Selenocysteine
  MOD_RES (282)..(282): Selenocysteine
  MOD_RES (293)..(293): Selenocysteine
  MOD_RES (303)..(303): Selenocysteine
  MOD_RES (313)..(313): Selenocysteine
  MOD_RES (327)..(328): Selenocysteine
  MOD_RES (342)..(342): Selenocysteine
  MOD_RES (394)..(394): Selenocysteine
MDSKKRSSXEAEGSKERGLVHIWQAGSFPIXPERLPGWGGKXVLQAALGVKHGVLLXEDGEVYSFGXLPWRSGPVEICPSSPILENALVGQYVIXVAXGSFHSGAVXDNGVAYMWGENSAGQCAVANQQYVPEPNPVSIADSEASPLLAVRILQLACGEEHXLALSISREIWAWGXGCQLGLIXXAFPVXKPQKVEHLAGRVVLQVACGAFHSLALVQCLPSQDLKPVPERCNQCSQLLIXMXDKEDHVIISDSHCCPLGVXLXESQAENHASXALSPSXEXLDRQEEVFENXLVANDQSVAXELNAVSAQIXSSDAMSSQQNVMGXXEISSARNIPSYPDXQAVNEYLRKLSDHSVREDSEHGEKPVPSQVPAQFYKIKVCLELNCMGFSLEXLK

SEQ ID NO: 2226 - protein, 1657 aa, Homo sapiens
  MOD_RES (9)..(9): Selenocysteine
  MOD_RES (31)..(31): Selenocysteine
  MOD_RES (42)..(42): Selenocysteine
  MOD_RES (57)..(57): Selenocysteine
  MOD_RES (67)..(67): Selenocysteine
  MOD_RES (95)..(95): Selenocysteine
  MOD_RES (98)..(98): Selenocysteine
  MOD_RES (107)..(107): Selenocysteine
  MOD_RES (162)..(162): Selenocysteine
  MOD_RES (176)..(176): Selenocysteine
  MOD_RES (184)..(185): Selenocysteine
  MOD_RES (190)..(190): Selenocysteine
  MOD_RES (241)..(241): Selenocysteine
  MOD_RES (243)..(243): Selenocysteine
  MOD_RES (262)..(262): Selenocysteine
  MOD_RES (264)..(264): Selenocysteine
  MOD_RES (274)..(274): Selenocysteine
  MOD_RES (280)..(280): Selenocysteine
  MOD_RES (282)..(282): Selenocysteine
  MOD_RES (293)..(293): Selenocysteine
  MOD_RES (303)..(303): Selenocysteine
  MOD_RES (313)..(313): Selenocysteine
  MOD_RES (327)..(328): Selenocysteine
  MOD_RES (342)..(342): Selenocysteine
  MOD_RES (386)..(387): Selenocysteine
  MOD_RES (389)..(389): Selenocysteine
  MOD_RES (410)..(410): Selenocysteine
  MOD_RES (427)..(428): Selenocysteine
  MOD_RES (432)..(432): Selenocysteine
  MOD_RES (475)..(475): Selenocysteine
  MOD_RES (504)..(504): Selenocysteine
  MOD_RES (506)..(506): Selenocysteine
  MOD_RES (510)..(510): Selenocysteine
  MOD_RES (512)..(512): Selenocysteine
  MOD_RES (526)..(526): Selenocysteine
  MOD_RES (530)..(530): Selenocysteine
  MOD_RES (575)..(575): Selenocysteine
  MOD_RES (587)..(587): Selenocysteine
  MOD_RES (598)..(599): Selenocysteine
  MOD_RES (628)..(628): Selenocysteine
  MOD_RES (644)..(644): Selenocysteine
  MOD_RES (658)..(658): Selenocysteine
  MOD_RES (674)..(674): Selenocysteine
  MOD_RES (700)..(701): Selenocysteine
  MOD_RES (728)..(731): Selenocysteine
  MOD_RES (783)..(783): Selenocysteine
  MOD_RES (787)..(787): Selenocysteine
  MOD_RES (790)..(790): Selenocysteine
  MOD_RES (827)..(827): Selenocysteine
  MOD_RES (835)..(835): Selenocysteine
  MOD_RES (856)..(856): Selenocysteine
  MOD_RES (892)..(892): Selenocysteine
  MOD_RES (898)..(898): Selenocysteine
  MOD_RES (904)..(904): Selenocysteine
  MOD_RES (950)..(950): Selenocysteine
  MOD_RES (958)..(958): Selenocysteine
  MOD_RES (977)..(978): Selenocysteine
  MOD_RES (984)..(984): Selenocysteine
  MOD_RES (989)..(989): Selenocysteine
  MOD_RES (994)..(994): Selenocysteine
  MOD_RES (1037)..(1037): Selenocysteine
  MOD_RES (1048)..(1048): Selenocysteine
  MOD_RES (1144)..(1144): Selenocysteine
  MOD_RES (1170)..(1170): Selenocysteine
  MOD_RES (1192)..(1192): Selenocysteine
  MOD_RES (1219)..(1219): Selenocysteine
  MOD_RES (1230)..(1230): Selenocysteine
  MOD_RES (1236)..(1236): Selenocysteine
  MOD_RES (1238)..(1238): Selenocysteine
  MOD_RES (1260)..(1260): Selenocysteine
  MOD_RES (1262)..(1262): Selenocysteine
  MOD_RES (1326)..(1327): Selenocysteine
  MOD_RES (1344)..(1344): Selenocysteine
  MOD_RES (1346)..(1346): Selenocysteine
  MOD_RES (1378)..(1378): Selenocysteine
  MOD_RES (1389)..(1389): Selenocysteine
  MOD_RES (1397)..(1397): Selenocysteine
  MOD_RES (1439)..(1439): Selenocysteine
  MOD_RES (1448)..(1448): Selenocysteine
  MOD_RES (1455)..(1455): Selenocysteine
  MOD_RES (1472)..(1472): Selenocysteine
  MOD_RES (1533)..(1533): Selenocysteine
  MOD_RES (1546)..(1547): Selenocysteine
  MOD_RES (1564)..(1565): Selenocysteine
  MOD_RES (1567)..(1567): Selenocysteine
  MOD_RES (1578)..(1578): Selenocysteine
  MOD_RES (1642)..(1643): Selenocysteine
MDSKKRSSXEAEGSKERGLVHIWQAGSFPIXPERLPGWGGKXVLQAALGVKHGVLLXEDGEVYSFGXLPWRSGPVEICPSSPILENALVGQYVIXVAXGSFHSGAVXDNGVAYMWGENSAGQCAVANQQYVPEPNPVSIADSEASPLLAVRILQLACGEEHXLALSISREIWAWGXGCQLGLIXXAFPVXKPQKVEHLAGRVVLQVACGAFHSLALVQCLPSQDLKPVPERCNQCSQLLIXMXDKEDHVIISDSHCCPLGVXLXESQAENHASXALSPSXEXLDRQEEVFENXLVANDQSVAXELNAVSAQIXSSDAMSSQQNVMGXXEISSARNIPSYPDXQAVNEYLRKLSDHSVREDSEHGEKPVPSQPLLEEAIPNLHSPPXXSXSALNSLVVSCASAVGVRVAAXYEAGALSLKKVMNFYSXXPCEXGAQAGSSAIGPEGLKDSREEQVKQESMQGKKSSSLVDIREEEXEGGSRRLSLPGLLSQVSPRLLRKAARVKXRXVVLXPXYSGEADALLPSLRXEVWXWGKGKEGQLGHGDVLPRLQPLCVKCLDGKEVIHLEAGGYHSLALXAKSQVYSWGSNXFGQLGHSDFPXXVPRLAKISSENGVWSIAAGRDYSLFLVDXEDFQPGLYYSGRQDPXEGDNLPENHSGSKXPVLLSCSKLGYISRVXAGKDSYLALVDKNIMGYIASLHELAXXERRFYSKLSDIKSQILRPLLSLENLGXXXXVQLLQEVASRFSKLCYLIGQHGASLSSFLHGVKEARSLVILKHSSLFLDSYXEYCXSIXNFLVMGGFQLLAKPAIDFLNKNQELLQDLSEVNDENXQLMEILNXLFFLPIRRLHNYAKVLLKLAXCFEVASPEYQKLQDSSSCYECLALHLGRKRKEAEYXLGFWKXFPGKMXDSLRKPERRLLCESSNRALSLQHAGRFSVNWFILFNDALVHAQFSXHHVFPLAXLWAEPLSEEAGGVNGLKIXXPEEQFXLISSXPQEKXKWLRAISQAVDQALRGMSDLPPYGSGSSVQRQEPPISRSAKYXFYKDPRLKDAXYDGRWLSGKPHGRGVLKWPDGKMYSGMFRNGLEDGYGEYRIPNKAMNKEDHYVGHWKEGKMCGQGVYSYASGEVFEGCFQDNMRHGHGLLRSGKLXSSSPSMFIGQWVMDKKAGYGVFDDIXRGEKYMGMWQDDVCQGNGVVVXQFGLYYEGNFHLNKMMGNGVLLSEDDXIYEGEFSDDWXLSGKGXLXMPNGDYIEGYFSGEWGSGIKIXGXYFKPSLYESDKDRPKVFRKLGNLAVPADEKWKAVFDECWRQLGCEGPGQGEVWKAWDNIAVALXXSRRQHRDSPEILSRSQXQXLESLEFIPQHVGAFSVEKYDDIRKYLIKACDXPLHPLGRLVEXLVAVYRMXYVGVGANRRLLQEAVKEIKSYLKRIFQLVRFLFPELPEEGSXIPLSAPLPXERKSFCXGKSDSRSESPEPGYVVXSSGLLLPVLLPRLYPPLFMLYALDNDREEDIYWECVLRLNKQPDIALLGFLGVQRKFWPAXLSILGESKKVLPXXKDACFASAVECLQQISXXFXPSDKLKVIQQXFEEISQSVLASLHEDFLWSMDDLFPVFLYVVLRARIRNLGSEVHLIEDLMDPYLQHGEQGIMFXXLKACYYQIQREKLN

SEQ ID NO: 2227 - protein, 585 aa, Homo sapiens
  MOD_RES (1)..(1): Any amino acid
  MOD_RES (21)..(22): Selenocysteine
  MOD_RES (49)..(52): Selenocysteine
  MOD_RES (104)..(104): Selenocysteine
  MOD_RES (108)..(108): Selenocysteine
  MOD_RES (111)..(111): Selenocysteine
  MOD_RES (148)..(148): Selenocysteine
  MOD_RES (156)..(156): Selenocysteine
  MOD_RES (177)..(177): Selenocysteine
  MOD_RES (213)..(213): Selenocysteine
  MOD_RES (219)..(219): Selenocysteine
  MOD_RES (225)..(225): Selenocysteine
  MOD_RES (271)..(271): Selenocysteine
  MOD_RES (279)..(279): Selenocysteine
  MOD_RES (298)..(299): Selenocysteine
  MOD_RES (305)..(305): Selenocysteine
  MOD_RES (310)..(310): Selenocysteine
  MOD_RES (315)..(315): Selenocysteine
  MOD_RES (358)..(358): Selenocysteine
  MOD_RES (369)..(369): Selenocysteine
  MOD_RES (465)..(465): Selenocysteine
  MOD_RES (491)..(491): Selenocysteine
  MOD_RES (513)..(513): Selenocysteine
  MOD_RES (540)..(540): Selenocysteine
  MOD_RES (551)..(551): Selenocysteine
XLALVDKNIMGYIASLHELAXXERRFYSKLSDIKSQILRPLLSLENLGXXXXVQLLQEVASRFSKLCYLIGQHGASLSSFLHGVKEARSLVILKHSSLFLDSYXEYCXSIXNFLVMGGFQLLAKPAIDFLNKNQELLQDLSEVNDENXQLMEILNXLFFLPIRRLHNYAKVLLKLAXCFEVASPEYQKLQDSSSCYECLALHLGRKRKEAEYXLGFWKXFPGKMXDSLRKPERRLLCESSNRALSLQHAGRFSVNWFILFNDALVHAQFSXHHVFPLAXLWAEPLSEEAGGVNGLKIXXPEEQFXLISSXPQEKXKWLRAISQAVDQALRGMSDLPPYGSGSSVQRQEPPISRSAKYXFYKDPRLKDAXYDGRWLSGKPHGRGVLKWPDGKMYSGMFRNGLEDGYGEYRIPNKAMNKEDHYVGHWKEGKMCGQGVYSYASGEVFEGCFQDNMRHGHGLLRSGKLXSSSPSMFIGQWVMDKKAGYGVFDDIXRGEKYMGMWQDDVCQGNGVVVXQFGLYYEGNFHLNKMMGNGVLLSEDDXIYEGEFSDDWXLSGKDNSGLIEQVGKCSLLPYFLKVCEALVLFLL

SEQ ID NO: 2228 - protein, 535 aa, Homo sapiens
  MOD_RES (19)..(19): Selenocysteine
  MOD_RES (64)..(64): Selenocysteine
  MOD_RES (81)..(81): Selenocysteine
  MOD_RES (107)..(107): Selenocysteine
  MOD_RES (175)..(175): Selenocysteine
  MOD_RES (182)..(182): Selenocysteine
  MOD_RES (191)..(191): Selenocysteine
  MOD_RES (210)..(210): Selenocysteine
  MOD_RES (216)..(216): Selenocysteine
  MOD_RES (227)..(227): Selenocysteine
  MOD_RES (242)..(242): Selenocysteine
  MOD_RES (268)..(268): Selenocysteine
  MOD_RES (284)..(284): Selenocysteine
  MOD_RES (289)..(289): Selenocysteine
  MOD_RES (312)..(312): Selenocysteine
  MOD_RES (346)..(346): Selenocysteine
  MOD_RES (357)..(357): Selenocysteine
  MOD_RES (372)..(372): Selenocysteine
  MOD_RES (425)..(425): Selenocysteine
  MOD_RES (428)..(428): Selenocysteine
  MOD_RES (431)..(431): Selenocysteine
  MOD_RES (434)..(434): Selenocysteine
  MOD_RES (441)..(441): Selenocysteine
  MOD_RES (458)..(458): Selenocysteine
  MOD_RES (461)..(461): Selenocysteine
  MOD_RES (477)..(477): Selenocysteine
  MOD_RES (482)..(482): Selenocysteine
  MOD_RES (492)..(492): Selenocysteine
  MOD_RES (505)..(505): Selenocysteine
  MOD_RES (512)..(512): Selenocysteine
  MOD_RES (524)..(525): Selenocysteine
  MOD_RES (535)..(535): Selenocysteine
MCNPEEAALLRLEEVFSAXLAHVNSLVLQPLLPAAPDPSDPWGRECLRLLQQLHKSSQQLWEVXEESLHSLQERLRYPDSXGLESLLLLRGADRVLQAHIEYIESYXSCMVVQAFQKAAKRRSEYWRGQRKALRQLLSGVSSEGSVGASLGQALHQPLAHHVQQYVLLLLSLGDXIGEHHPXRELVVNAVXLFGNLQSFMKQELDQAVAXQALWHXLRGRLRDVLCXPAHRLLQDSQDVPVXVAPLRAERVLLFDDALVLLQGHNVHXFDLKLVWVDPGQDGCXFHLLXPEEEFSFCAKDSQGQAVWQWKVXWAVHQALHGKKDFPVLGAGLEPSQPPDCRCAEYXFQAEGRLCQAXYEGEWCRGRPHGKGXLKWPDGRNHVGNFCQGLEHGFGIRLLPQASEDKFDCYKCHWREGSMCGYGICXAPXRCXRAXSRRACGXDLGSLRVVRRPPSPSGXRAXGRGARGAAMALRRMVXEVSAXLACGRLVSAXAQGSWSPRQVSAXRAPSRRXRRWARASSSLKXXPCMRAPSPGX

SEQ ID NO: 2229 - protein, 953 aa, Homo sapiens
  MOD_RES (19)..(19): Selenocysteine
  MOD_RES (64)..(64): Selenocysteine
  MOD_RES (81)..(81): Selenocysteine
  MOD_RES (107)..(107): Selenocysteine
  MOD_RES (175)..(175): Selenocysteine
  MOD_RES (182)..(182): Selenocysteine
  MOD_RES (191)..(191): Selenocysteine
  MOD_RES (210)..(210): Selenocysteine
  MOD_RES (216)..(216): Selenocysteine
  MOD_RES (227)..(227): Selenocysteine
  MOD_RES (242)..(242): Selenocysteine
  MOD_RES (268)..(268): Selenocysteine
  MOD_RES (284)..(284): Selenocysteine
  MOD_RES (289)..(289): Selenocysteine
  MOD_RES (312)..(312): Selenocysteine
  MOD_RES (346)..(346): Selenocysteine
  MOD_RES (357)..(357): Selenocysteine
  MOD_RES (372)..(372): Selenocysteine
  MOD_RES (428)..(428): Selenocysteine
  MOD_RES (460)..(460): Selenocysteine
  MOD_RES (500)..(500): Selenocysteine
  MOD_RES (509)..(509): Selenocysteine
  MOD_RES (515)..(515): Selenocysteine
  MOD_RES (532)..(532): Selenocysteine
  MOD_RES (534)..(534): Selenocysteine
  MOD_RES (538)..(538): Selenocysteine
  MOD_RES (546)..(546): Selenocysteine
  MOD_RES (552)..(552): Selenocysteine
  MOD_RES (567)..(567): Selenocysteine
  MOD_RES (573)..(573): Selenocysteine
  MOD_RES (583)..(583): Selenocysteine
  MOD_RES (645)..(645): Selenocysteine
  MOD_RES (691)..(691): Selenocysteine
  MOD_RES (695)..(695): Selenocysteine
  MOD_RES (699)..(699): Selenocysteine
  MOD_RES (749)..(749): Selenocysteine
  MOD_RES (751)..(751): Selenocysteine
  MOD_RES (774)..(774): Selenocysteine
  MOD_RES (800)..(800): Selenocysteine
  MOD_RES (819)..(819): Selenocysteine
  MOD_RES (821)..(821): Selenocysteine
  MOD_RES (838)..(838): Selenocysteine
  MOD_RES (846)..(847): Selenocysteine
  MOD_RES (860)..(860): Selenocysteine
  MOD_RES (867)..(867): Selenocysteine
  MOD_RES (915)..(915): Selenocysteine
  MOD_RES (924)..(924): Selenocysteine
MCNPEEAALLRLEEVFSAXLAHVNSLVLQPLLPAAPDPSDPWGRECLRLLQQLHKSSQQLWEVXEESLHSLQERLRYPDSXGLESLLLLRGADRVLQAHIEYIESYXSCMVVQAFQKAAKRRSEYWRGQRKALRQLLSGVSSEGSVGASLGQALHQPLAHHVQQYVLLLLSLGDXIGEHHPXRELVVNAVXLFGNLQSFMKQELDQAVAXQALWHXLRGRLRDVLCXPAHRLLQDSQDVPVXVAPLRAERVLLFDDALVLLQGHNVHXFDLKLVWVDPGQDGCXFHLLXPEEEFSFCAKDSQGQAVWQWKVXWAVHQALHGKKDFPVLGAGLEPSQPPDCRCAEYXFQAEGRLCQAXYEGEWCRGRPHGKGXLKWPDGRNHVGNFCQGLEHGFGIRLLPQASEDKFDCYKCHWREGSMCGYGICEYSXDEVYKGYFQEGLRHGFGVLESGPQAPQPFRYXGHWERGQRSGYGIEEDGDRGERYIGMWQAGQRHGPGVMVXQAGVCYQGXFQADKXVGPGILLSEDDSLYEGXFXRDLXLMGKGKVXFPNGFXLEGSFGSGAGRGLHXQGVLDXAALPPDPSSXCKRQLGVGAFPVESRWQGVYSPFRDFVCAGCPRDLQEALLGFDVQSSRELRRSQDYLSCERXHPEDSVGSMEDILEELLQHREPKALQLYLRKALSNSLHPLGKLLRXLMLXFQAXYAGVGANKHLQELAQEEVKQHAQELWAAYRGLLRVALERKGQALEEDEDXEXRDLQVHGLVLPLMLPSFYSELFXLYLLLHEREDSFYSQGIANLSLFPDXQLLEFLDVQKHLWPLKDLXLXSNQRYSLVRDKCFLSAXECLQKIMXXVDPREKLEVLERXYGEIEGXVSRVLGREYKLPMDDLLPLLIYVVSRARIQHLGAEIHLIRDMMDPNHXGGLYDFLLXALESCYEHIQKEDMRLHRLPGHWHSRELW

SEQ ID NO: 2230 - protein, 300 aa, Homo sapiens
  MOD_RES (38)..(38): Selenocysteine
  MOD_RES (42)..(42): Selenocysteine
  MOD_RES (46)..(46): Selenocysteine
  MOD_RES (96)..(96): Selenocysteine
  MOD_RES (98)..(98): Selenocysteine
  MOD_RES (121)..(121): Selenocysteine
  MOD_RES (147)..(147): Selenocysteine
  MOD_RES (166)..(166): Selenocysteine
  MOD_RES (168)..(168): Selenocysteine
  MOD_RES (185)..(185): Selenocysteine
  MOD_RES (193)..(194): Selenocysteine
  MOD_RES (207)..(207): Selenocysteine
  MOD_RES (214)..(214): Selenocysteine
  MOD_RES (262)..(262): Selenocysteine
  MOD_RES (271)..(271): Selenocysteine
MEDILEELLQHREPKALQLYLRKALSNSLHPLGKLLRXLMLXFQAXYAGVGANKHLQELAQEEVKQHAQELWAAYRGLLRVALERKGQALEEDEDXEXRDLQVHGLVLPLMLPSFYSELFXLYLLLHEREDSFYSQGIANLSLFPDXQLLEFLDVQKHLWPLKDLXLXSNQRYSLVRDKCFLSAXECLQKIMXXVDPREKLEVLERXYGEIEGXVSRVLGREYKLPMDDLLPLLIYVVSRARIQHLGAEIHLIRDMMDPNHXGGLYDFLLXALESCYEHIQKEDMRLHRLPGHWHSRELW

SEQ ID NO: 2231 - protein, 302 aa, Homo sapiens
  MOD_RES (1)..(1): Any amino acid
  MOD_RES (12)..(12): Selenocysteine
  MOD_RES (38)..(38): Selenocysteine
  MOD_RES (106)..(106): Selenocysteine
  MOD_RES (113)..(113): Selenocysteine
  MOD_RES (122)..(122): Selenocysteine
  MOD_RES (141)..(141): Selenocysteine
  MOD_RES (147)..(147): Selenocysteine
  MOD_RES (158)..(158): Selenocysteine
  MOD_RES (173)..(173): Selenocysteine
  MOD_RES (199)..(199): Selenocysteine
  MOD_RES (215)..(215): Selenocysteine
  MOD_RES (220)..(220): Selenocysteine
  MOD_RES (243)..(243): Selenocysteine
  MOD_RES (277)..(277): Selenocysteine
  MOD_RES (288)..(288): Selenocysteine
XLQERLRYPDSXGLESLLLLRGADRVLQAHIEYIESYXSCMVVQAFQKAAKRRSEYWRGQRKALRQLLSGVSSEGSVGASLGQALHQPLAHHVQQYVLLLLSLGDXIGEHHPXRELVVNAVXLFGNLQSFMKQELDQAVAXQALWHXLRGRLRDVLCXPAHRLLQDSQDVPVXVAPLRAERVLLFDDALVLLQGHNVHXFDLKLVWVDPGQDGCXFHLLXPEEEFSFCAKDSQGQAVWQWKVXWAVHQALHGKKDFPVLGAGLEPSQPPDCRCAEYXFQAEGRLCQAXYEGEWCRGRPHGEP

SEQ ID NO: 2232 - protein, 326 aa, Homo sapiens
  MOD_RES (34)..(34): Selenocysteine
  MOD_RES (68)..(68): Selenocysteine
  MOD_RES (81)..(81): Selenocysteine
  MOD_RES (90)..(90): Selenocysteine
  MOD_RES (137)..(138): Selenocysteine
  MOD_RES (140)..(140): Selenocysteine
  MOD_RES (154)..(154): Selenocysteine
  MOD_RES (169)..(169): Selenocysteine
  MOD_RES (172)..(172): Selenocysteine
  MOD_RES (206)..(206): Selenocysteine
  MOD_RES (215)..(215): Selenocysteine
  MOD_RES (237)..(237): Selenocysteine
  MOD_RES (245)..(245): Selenocysteine
  MOD_RES (250)..(250): Selenocysteine
  MOD_RES (258)..(258): Selenocysteine
  MOD_RES (263)..(263): Selenocysteine
  MOD_RES (282)..(282): Selenocysteine
  MOD_RES (287)..(287): Selenocysteine
  MOD_RES (290)..(290): Selenocysteine
  MOD_RES (297)..(297): Selenocysteine
  MOD_RES (319)..(319): Selenocysteine
MEFLSEKFALKSPPSKNSDFYMGAGGPLEHVMEXLDNESFYSKASAGKCVQAFGPLPRAEHHVRLERXSPCQDSSVNYGIXKVEGQPLHXELNRAMDNCNSLRMSPVKGMQEKGELDELGDKCDSNVSSSKKRRHRXXFXSLQLEELEKVFQKXHYPDVYVREQLALRXELXEARVQVWFQNRRAKWRKRERYGQIQQAKSHFAAXYDISVLPRXDSYPQIQNNLWAGNASGGSVVXSCMLPRDXSSCMXPYSHSPRXDSSYXGFSNHQNQFSHVPLNNFFXDSLLXGAXNGHAFEXKPEFERRSSSIAVLRMKAKEHXANISWAM

SEQ ID NO: 2233 - protein, 343 aa, Homo sapiens
  MOD_RES (31)..(31): Selenocysteine
  MOD_RES (49)..(49): Selenocysteine
  MOD_RES (97)..(97): Selenocysteine
  MOD_RES (158)..(159): Selenocysteine
  MOD_RES (162)..(162): Selenocysteine
  MOD_RES (175)..(175): Selenocysteine
  MOD_RES (190)..(190): Selenocysteine
  MOD_RES (193)..(193): Selenocysteine
  MOD_RES (225)..(225): Selenocysteine
  MOD_RES (236)..(236): Selenocysteine
  MOD_RES (306)..(306): Selenocysteine
  MOD_RES (342)..(343): Selenocysteine
MDPEHCAPFRVGPAPGPYVASGDEPPGPQGXPAAAPHLHPAPPRGPRLXRFPACGPLEPYLPEPAKPPAKYLQDLGPGPALNGGHFYEGPAEAEEKXSKAASFPQLPLDCRGGPRDGPSNLQGSPGPCLASLHLPLSPGLPDSMELAKNKSKKRRNRXXFSXFQLEELEKVFQKXHYPDVYAREQLALRXDLXEARVQVWFQNRRAKWRKRERYGKIQEGRNPFXAAYDISVLPRXDSHPQLQNSLWASPGSGSPGGPCLVSPEGIPSPCMSPYSHPHGSVAGFMGVPAPSAAHPGIYSIHGFPPXLGGHSFEPSSDGDYKSPSLVSLRVKPKEPPGLLNWXX

SEQ ID NO: 2234 - protein, 411 aa, Homo sapiens
  MOD_RES (5)..(5): Selenocysteine
  MOD_RES (45)..(46): Selenocysteine
  MOD_RES (75)..(75): Selenocysteine
  MOD_RES (96)..(96): Selenocysteine
  MOD_RES (131)..(131): Selenocysteine
  MOD_RES (172)..(172): Selenocysteine
  MOD_RES (219)..(220): Selenocysteine
  MOD_RES (222)..(222): Selenocysteine
  MOD_RES (236)..(236): Selenocysteine
  MOD_RES (251)..(251): Selenocysteine
  MOD_RES (254)..(254): Selenocysteine
  MOD_RES (283)..(283): Selenocysteine
  MOD_RES (287)..(287): Selenocysteine
  MOD_RES (295)..(295): Selenocysteine
  MOD_RES (347)..(347): Selenocysteine
  MOD_RES (362)..(362): Selenocysteine
  MOD_RES (390)..(390): Selenocysteine
  MOD_RES (411)..(411): Selenocysteine
MNAEXCVSYCESPAAAMDAYYSPVSQSREGSSPFRAFPGGDKFGXXFLSAAAKAQGFGDAKSRARYGAGQQDLAXPLESGAGARGSFNKFQPQPSXPQPQPPPQPQPQQQQPQPQPPAQPHLYLQRGACKXPPDGSLKLQEGSSGHSAALQVPCYAKESSLGEPELPPDSDXVGMDSSYLSVKEAGVKGPQDRASSDLPSPLEKADSESNKGKKRRNRXXFXSYQLEELEKVFQKXHYPDVYAREQLAMRXDLXEARVQVWFQNRRAKWRKRERFGQMQQVRXHFSXAYELPLLXRAENYAQIQNPSWLGNNGAASPVPACVVPCDPVPACMSPHAHPPGSGASSVXDFLSVSGAGSHVGQXHMGSLFGAASLSPGLNGYELNGEPDRKXSSIAALRMKAKEHSAAISWAX

SEQ ID NO: 2235 - protein, 205 aa, Homo sapiens
  MOD_RES (3)..(3): Selenocysteine
  MOD_RES (46)..(46): Selenocysteine
  MOD_RES (51)..(51): Selenocysteine
  MOD_RES (90)..(90): Selenocysteine
  MOD_RES (92)..(92): Selenocysteine
  MOD_RES (124)..(124): Selenocysteine
  MOD_RES (189)..(189): Selenocysteine
  MOD_RES (196)..(196): Selenocysteine
  MOD_RES (199)..(199): Selenocysteine
MGXWILFACLLGAAFAMPLPPHPGHPGYINFSYENSHSQAINVDRXALVLXPLKWYQSIRPPYPSYGYEPMGGWLHHQIIPVLSQQHPPXHXLQPHHHIPVVPAQQPVIPQQPMMPVPGQHSMXPIQHHQPNLPPPAQQPYQPQPVQPQPHQPMQPQPPVHPMQPLPPQPPLPPMFPMQPLPPMLPDLXLEAWPSXDKXKREEVD

SEQ ID NO: 2236 - protein, 191 aa, Homo sapiens
  MOD_RES (3)..(3): Selenocysteine
  MOD_RES (37)..(37): Selenocysteine
  MOD_RES (76)..(76): Selenocysteine
  MOD_RES (78)..(78): Selenocysteine
  MOD_RES (110)..(110): Selenocysteine
  MOD_RES (175)..(175): Selenocysteine
  MOD_RES (182)..(182): Selenocysteine
  MOD_RES (185)..(185): Selenocysteine
MGXWILFACLLGAAFAMPLPPHPGHPGYINFSYEVLXPLKWYQSIRPPYPSYGYEPMGGWLHHQIIPVLSQQHPPXHXLQPHHHIPVVPAQQPVIPQQPMMPVPGQHSMXPIQHHQPNLPPPAQQPYQPQPVQPQPHQPMQPQPPVHPMQPLPPQPPLPPMFPMQPLPPMLPDLXLEAWPSXDKXKREEVD

SEQ ID NO: 2237 - protein, 175 aa, Homo sapiens
  MOD_RES (3)..(3): Selenocysteine
  MOD_RES (21)..(21): Selenocysteine
  MOD_RES (60)..(60): Selenocysteine
  MOD_RES (62)..(62): Selenocysteine
  MOD_RES (94)..(94): Selenocysteine
  MOD_RES (159)..(159): Selenocysteine
  MOD_RES (166)..(166): Selenocysteine
  MOD_RES (169)..(169): Selenocysteine
MGXWILFACLLGAAFAMPVLXPLKWYQSIRPPYPSYGYEPMGGWLHHQIIPVLSQQHPPXHXLQPHHHIPVVPAQQPVIPQQPMMPVPGQHSMXPIQHHQPNLPPPAQQPYQPQPVQPQPHQPMQPQPPVHPMQPLPPQPPLPPMFPMQPLPPMLPDLXLEAWPSXDKXKREEVD

SEQ ID NO: 2238 - protein, 804 aa, Homo sapiens
  MOD_RES (3)..(3): Selenocysteine
  MOD_RES (20)..(20): Selenocysteine
  MOD_RES (24)..(24): Selenocysteine
  MOD_RES (37)..(37): Selenocysteine
  MOD_RES (41)..(41): Selenocysteine
  MOD_RES (55)..(55): Selenocysteine
  MOD_RES (68)..(68): Selenocysteine
  MOD_RES (95)..(95): Selenocysteine
  MOD_RES (114)..(114): Selenocysteine
  MOD_RES (139)..(139): Selenocysteine
  MOD_RES (145)..(145): Selenocysteine
  MOD_RES (151)..(151): Selenocysteine
  MOD_RES (185)..(185): Selenocysteine
  MOD_RES (220)..(220): Selenocysteine
  MOD_RES (242)..(242): Selenocysteine
  MOD_RES (250)..(250): Selenocysteine
  MOD_RES (289)..(289): Selenocysteine
  MOD_RES (317)..(317): Selenocysteine
  MOD_RES (326)..(326): Selenocysteine
  MOD_RES (341)..(341): Selenocysteine
  MOD_RES (356)..(356): Selenocysteine
  MOD_RES (364)..(364): Selenocysteine
  MOD_RES (412)..(412): Selenocysteine
  MOD_RES (428)..(429): Selenocysteine
  MOD_RES (455)..(455): Selenocysteine
  MOD_RES (475)..(476): Selenocysteine
  MOD_RES (556)..(556): Selenocysteine
  MOD_RES (563)..(563): Selenocysteine
  MOD_RES (600)..(600): Selenocysteine
  MOD_RES (615)..(615): Selenocysteine
  MOD_RES (625)..(625): Selenocysteine
  MOD_RES (638)..(638): Selenocysteine
  MOD_RES (643)..(643): Selenocysteine
  MOD_RES (673)..(673): Selenocysteine
  MOD_RES (682)..(682): Selenocysteine
  MOD_RES (687)..(688): Selenocysteine
  MOD_RES (708)..(708): Selenocysteine
  MOD_RES (716)..(716): Selenocysteine
  MOD_RES (747)..(747): Selenocysteine
  MOD_RES (766)..(766): Selenocysteine
  MOD_RES (777)..(777): Selenocysteine
  MOD_RES (791)..(791): Selenocysteine
  MOD_RES (798)..(798): Selenocysteine
  MOD_RES (803)..(803): Selenocysteine
MEXQKDEAAQAKGAAASGSXREQXAEKGAKNKAAEAXEGPXSEPSSSGPGRLKKXAMKLFGGKKGICXLPSFFGGGRSKGSGKGSSKKGLSKSKXHDGLSEAAHGPEDVVSEGXGFSLPLPELPCQFPSSQSAHGALEXGSRCKXSVAGAXEKAVAEKFPSMPKPKKGLKGFFSSIRRHRKSKVXGAEQSEPGAKGPERVRARPHEHVSSAPQVPCFEEXFQAPRKENANPQDAPGPKVSPXPEPSPPAXEKMACKDPEKPMEACASAHVQPKPAPEASSLEEPHSPEXGEKVVAGEVNPPNGPVGDPLSLLFGDVXSLKSFDSLXGCGDIIAEQDMDSMXDSMASGGQRANRDGXKRSSCLVXYQGGGEEMALPDDDDEEEEEEEEVELEEEEEEVKEEEEDDDLEYLWEXAQMYPRPNMNLGYHPXXSPGHHGYMLLDPVRSYPGLAPGELLXPQSDQQESAPNSDEGYYDSXXPGFEDDSGEALGLVRRDCLPRDSYSGDALYEFYEPDDSLENSPPGDDCLYDLHGRSSEMFDPFLNFEPFLSSRPPGAMEXEEERLVXIQKQLLYWELRREQLEAQEARAREAHAREAHAREAYXREAYGREAYAREAHXWEAHGREARXREAQAREVRCREXQVREXQARQEKPVLEYQMRPLGPSVMGLAAGVSGXSQISHRGIXSAFPXXASSEPDWRDFRPLEKRYEGXCSKKDQSXCLMQLFQSDAMFEPDMQEANFGGSPRRAYPXYSPPEDPEEEEVEKEGNAXVSFSQALVEFXSNGNLFSSIRCPGXEDKRQVXQACGXW

SEQ ID NO: 2239 - protein, 1135 aa, Homo sapiens
  MOD_RES (3)..(3): Selenocysteine
  MOD_RES (20)..(20): Selenocysteine
  MOD_RES (24)..(24): Selenocysteine
  MOD_RES (37)..(37): Selenocysteine
  MOD_RES (41)..(41): Selenocysteine
  MOD_RES (55)..(55): Selenocysteine
  MOD_RES (68)..(68): Selenocysteine
  MOD_RES (95)..(95): Selenocysteine
  MOD_RES (114)..(114): Selenocysteine
  MOD_RES (139)..(139): Selenocysteine
  MOD_RES (145)..(145): Selenocysteine
  MOD_RES (151)..(151): Selenocysteine
  MOD_RES (185)..(185): Selenocysteine
  MOD_RES (220)..(220): Selenocysteine
  MOD_RES (242)..(242): Selenocysteine
  MOD_RES (250)..(250): Selenocysteine
  MOD_RES (289)..(289): Selenocysteine
  MOD_RES (317)..(317): Selenocysteine
  MOD_RES (326)..(326): Selenocysteine
  MOD_RES (341)..(341): Selenocysteine
  MOD_RES (356)..(356): Selenocysteine
  MOD_RES (364)..(364): Selenocysteine
  MOD_RES (412)..(412): Selenocysteine
  MOD_RES (428)..(429): Selenocysteine
  MOD_RES (455)..(455): Selenocysteine
  MOD_RES (475)..(476): Selenocysteine
  MOD_RES (556)..(556): Selenocysteine
  MOD_RES (563)..(563): Selenocysteine
  MOD_RES (600)..(600): Selenocysteine
  MOD_RES (615)..(615): Selenocysteine
  MOD_RES (625)..(625): Selenocysteine
  MOD_RES (638)..(638): Selenocysteine
  MOD_RES (643)..(643): Selenocysteine
  MOD_RES (673)..(673): Selenocysteine
  MOD_RES (682)..(682): Selenocysteine
  MOD_RES (687)..(688): Selenocysteine
  MOD_RES (708)..(708): Selenocysteine
  MOD_RES (716)..(716): Selenocysteine
  MOD_RES (747)..(747): Selenocysteine
  MOD_RES (766)..(766): Selenocysteine
  MOD_RES (777)..(777): Selenocysteine
  MOD_RES (797)..(797): Selenocysteine
  MOD_RES (808)..(808): Selenocysteine
  MOD_RES (898)..(898): Selenocysteine
  MOD_RES (901)..(901): Selenocysteine
  MOD_RES (950)..(950): Selenocysteine
  MOD_RES (993)..(993): Selenocysteine
  MOD_RES (1000)..(1000): Selenocysteine
  MOD_RES (1081)..(1081): Selenocysteine
  MOD_RES (1100)..(1100): Selenocysteine
  MOD_RES (1122)..(1122): Selenocysteine
  MOD_RES (1127)..(1127): Selenocysteine
MEXQKDEAAQAKGAAASGSXREQXAEKGAKNKAAEAXEGPXSEPSSSGPGRLKKXAMKLFGGKKGICXLPSFFGGGRSKGSGKGSSKKGLSKSKXHDGLSEAAHGPEDVVSEGXGFSLPLPELPCQFPSSQSAHGALEXGSRCKXSVAGAXEKAVAEKFPSMPKPKKGLKGFFSSIRRHRKSKVXGAEQSEPGAKGPERVRARPHEHVSSAPQVPCFEEXFQAPRKENANPQDAPGPKVSPXPEPSPPAXEKMACKDPEKPMEACASAHVQPKPAPEASSLEEPHSPEXGEKVVAGEVNPPNGPVGDPLSLLFGDVXSLKSFDSLXGCGDIIAEQDMDSMXDSMASGGQRANRDGXKRSSCLVXYQGGGEEMALPDDDDEEEEEEEEVELEEEEEEVKEEEEDDDLEYLWEXAQMYPRPNMNLGYHPXXSPGHHGYMLLDPVRSYPGLAPGELLXPQSDQQESAPNSDEGYYDSXXPGFEDDSGEALGLVRRDCLPRDSYSGDALYEFYEPDDSLENSPPGDDCLYDLHGRSSEMFDPFLNFEPFLSSRPPGAMEXEEERLVXIQKQLLYWELRREQLEAQEARAREAHAREAHAREAYXREAYGREAYAREAHXWEAHGREARXREAQAREVRCREXQVREXQARQEKPVLEYQMRPLGPSVMGLAAGVSGXSQISHRGIXSAFPXXASSEPDWRDFRPLEKRYEGXCSKKDQSXCLMQLFQSDAMFEPDMQEANFGGSPRRAYPXYSPPEDPEEEEVEKEGNAXVSFSQALVEFXSNGNLFSSMSCSSDSDSSFXQNLPELPPMVXFDIADVERDGEGKCEENPEFHNDEDLAASLEAFELGYYHKHAFNNYHSRFYQGLPWGVSSLPRYLGLPGLHPRPPPAAMALNRRSRSLDXAEXLEMELSNSHLVQGYLESDELQAQQEDSDEEDEEEEEGEWSRDSPLSLYXEPPGAYDWPAWAPCPLPVGPGPAWISPNQLDRPSSQSPYRQAXCCIPPMXMSISLSVPESRAPGESGPQLARPSHLHLPMGPCYNLQPQASQSMRARPRDVLLPVDEPSCSSSSGGFSPSPLPQAKPVGIXHGIPQLPRVRPEHPQPQPXHYGPSSLDLSKERAEQGASLAXSYSSXAMNGNLAK

SEQ ID NO: 2240 - protein, 552 aa, Homo sapiens
  MOD_RES (3)..(3): Selenocysteine
  MOD_RES (36)..(36): Selenocysteine
  MOD_RES (38)..(38): Selenocysteine
  MOD_RES (53)..(53): Selenocysteine
  MOD_RES (79)..(79): Selenocysteine
  MOD_RES (98)..(98): Selenocysteine
  MOD_RES (105)..(105): Selenocysteine
  MOD_RES (231)..(231): Selenocysteine
  MOD_RES (241)..(241): Selenocysteine
  MOD_RES (315)..(315): Selenocysteine
  MOD_RES (327)..(327): Selenocysteine
  MOD_RES (347)..(347): Selenocysteine
  MOD_RES (353)..(353): Selenocysteine
  MOD_RES (357)..(357): Selenocysteine
  MOD_RES (409)..(410): Selenocysteine
  MOD_RES (449)..(449): Selenocysteine
  MOD_RES (459)..(459): Selenocysteine
  MOD_RES (472)..(472): Selenocysteine
  MOD_RES (474)..(474): Selenocysteine
  MOD_RES (479)..(479): Selenocysteine
  MOD_RES (497)..(497): Selenocysteine
  MOD_RES (518)..(518): Selenocysteine
  MOD_RES (538)..(539): Selenocysteine
  MOD_RES (543)..(543): Selenocysteine
MEXSRSRGGGGAVSERGGAGASVGVCRRKAEAGAGXGXLAADMDLHCDCAAEXPAAEPPSGKINKAAFKLFKKRKSGGXMPSIFGVKNKGDGKSSGPXGLVRSRXHDGLAEVLVLESGRKEEPRGGGDSGGGGGGRPNPGPPRAAGPGGGSLASSSVAKSHSFFSLLKKNGRSENGKGEPVDASKAGGKQKRGLRGLFSGMRWHRKDKRAKAEAAEGRAPGGGLILPGSLXASLECVKEEXPRAAREPEEPSQDAPRDPAGCGDIIADQEEEAGPSCDKHVPGPGKPALSKKNPGVVAYQGGGEEMASPDEVDDXYLQEFWDMLSQXEEQGPEPQEGAAKVAAALEXKVVPEXPKDXRCVEAAKDASSVKRRRLNRIPIEPHPKEEPKHPEKEQQEGVPNSDEGYWDSXXPGPEEDSSSSGKKAGIPRDSYSGDALYDLYADPDGSPAXLPGGKDNEEXSSLSRLKPVSPGXIXCPLRXPGSLLKDSKIPISIKHLXNLPSSHPVVHQQPSRSEMPRXKIPVSKVLVRRVSNRGLAGXXIRAXACHDSAKKL

SEQ ID NO: 2241 - protein, 671 aa, Homo sapiens
  MOD_RES (3)..(3): Selenocysteine
  MOD_RES (36)..(36): Selenocysteine
  MOD_RES (38)..(38): Selenocysteine
  MOD_RES (53)..(53): Selenocysteine
  MOD_RES (79)..(79): Selenocysteine
  MOD_RES (98)..(98): Selenocysteine
  MOD_RES (105)..(105): Selenocysteine
  MOD_RES (231)..(231): Selenocysteine
  MOD_RES (241)..(241): Selenocysteine
  MOD_RES (293)..(293): Selenocysteine
  MOD_RES (315)..(315): Selenocysteine
  MOD_RES (322)..(322): Selenocysteine
  MOD_RES (329)..(329): Selenocysteine
  MOD_RES (370)..(370): Selenocysteine
  MOD_RES (379)..(379): Selenocysteine
  MOD_RES (434)..(434): Selenocysteine
  MOD_RES (446)..(446): Selenocysteine
  MOD_RES (466)..(466): Selenocysteine
  MOD_RES (472)..(472): Selenocysteine
  MOD_RES (476)..(476): Selenocysteine
  MOD_RES (528)..(529): Selenocysteine
  MOD_RES (568)..(568): Selenocysteine
  MOD_RES (578)..(578): Selenocysteine
  MOD_RES (591)..(591): Selenocysteine
  MOD_RES (593)..(593): Selenocysteine
  MOD_RES (598)..(598): Selenocysteine
  MOD_RES (616)..(616): Selenocysteine
  MOD_RES (637)..(637): Selenocysteine
  MOD_RES (657)..(658): Selenocysteine
  MOD_RES (662)..(662): Selenocysteine
MEXSRSRGGGGAVSERGGAGASVGVCRRKAEAGAGXGXLAADMDLHCDCAAEXPAAEPPSGKINKAAFKLFKKRKSGGXMPSIFGVKNKGDGKSSGPXGLVRSRXHDGLAEVLVLESGRKEEPRGGGDSGGGGGGRPNPGPPRAAGPGGGSLASSSVAKSHSFFSLLKKNGRSENGKGEPVDASKAGGKQKRGLRGLFSGMRWHRKDKRAKAEAAEGRAPGGGLILPGSLXASLECVKEEXPRAAREPEEPSQDAPRDPAGEPAGGEEVPAPADRAPARSCREAEGLAHPGDXGARGEDAAGHRRAEPGPGEVRXAEDASRXGAVPVKXVPLVDSEGGSGRAPAAPDPASVDPPSDPSADRICLMFSDVXSLKSFDSLXGCGDIIADQEEEAGPSCDKHVPGPGKPALSKKNPGVVAYQGGGEEMASPDEVDDXYLQEFWDMLSQXEEQGPEPQEGAAKVAAALEXKVVPEXPKDXRCVEAAKDASSVKRRRLNRIPIEPHPKEEPKHPEKEQQEGVPNSDEGYWDSXXPGPEEDSSSSGKKAGIPRDSYSGDALYDLYADPDGSPAXLPGGKDNEEXSSLSRLKPVSPGXIXCPLRXPGSLLKDSKIPISIKHLXNLPSSHPVVHQQPSRSEMPRXKIPVSKVLVRRVSNRGLAGXXIRAXACHDSAKKL

SEQ ID NO: 2242 - protein, 142 aa, Homo sapiens
  MOD_RES (8)..(8): Selenocysteine
  MOD_RES (34)..(34): Selenocysteine
  MOD_RES (85)..(85): Selenocysteine
  MOD_RES (94)..(94): Selenocysteine
  MOD_RES (105)..(105): Selenocysteine
  MOD_RES (108)..(108): Selenocysteine
MELKRGKXFIKSSLQVSHEKPPDPAAVAAAREGXGPWSVLPGGQQRPHSEKGPQASPSAQEYDRCPNKGAQLDPKGGPAALCGAXFKPVRKCKXHDSMSGAGRAXAAXGQLVGSASFPGSPGSRRMIDYRHFVPQMPFVPAV

SEQ ID NO: 2243 - protein, 180 aa, Homo sapiens
  MOD_RES (8)..(8): Selenocysteine
  MOD_RES (34)..(34): Selenocysteine
  MOD_RES (85)..(85): Selenocysteine
  MOD_RES (94)..(94): Selenocysteine
  MOD_RES (105)..(105): Selenocysteine
  MOD_RES (108)..(108): Selenocysteine
  MOD_RES (171)..(171): Selenocysteine
MELKRGKXFIKSSLQVSHEKPPDPAAVAAAREGXGPWSVLPGGQQRPHSEKGPQASPSAQEYDRCPNKGAQLDPKGGPAALCGAXFKPVRKCKXHDSMSGAGRAXAAXGQLVGSASFPGSPGSRRMIDYRHFVPQMPFVPAVAKSIPRKRISLKRPKKCFRNLFHIRRNKXEDLASLAAE

SEQ ID NO: 2244 - protein, 861 aa, Homo sapiens
  MOD_RES (8)..(8): Selenocysteine
  MOD_RES (34)..(34): Selenocysteine
  MOD_RES (85)..(85): Selenocysteine
  MOD_RES (94)..(94): Selenocysteine
  MOD_RES (105)..(105): Selenocysteine
  MOD_RES (108)..(108): Selenocysteine
  MOD_RES (171)..(171): Selenocysteine
  MOD_RES (248)..(248): Selenocysteine
  MOD_RES (273)..(273): Selenocysteine
  MOD_RES (307)..(307): Selenocysteine
  MOD_RES (335)..(335): Selenocysteine
  MOD_RES (344)..(344): Selenocysteine
  MOD_RES (369)..(369): Selenocysteine
  MOD_RES (371)..(371): Selenocysteine
  MOD_RES (382)..(382): Selenocysteine
  MOD_RES (407)..(407): Selenocysteine
  MOD_RES (411)..(411): Selenocysteine
  MOD_RES (455)..(455): Selenocysteine
  MOD_RES (500)..(500): Selenocysteine
  MOD_RES (505)..(505): Selenocysteine
  MOD_RES (517)..(517): Selenocysteine
  MOD_RES (523)..(523): Selenocysteine
  MOD_RES (541)..(541): Selenocysteine
  MOD_RES (558)..(558): Selenocysteine
  MOD_RES (574)..(575): Selenocysteine
  MOD_RES (589)..(589): Selenocysteine
  MOD_RES (592)..(592): Selenocysteine
  MOD_RES (594)..(594): Selenocysteine
  MOD_RES (605)..(605): Selenocysteine
  MOD_RES (621)..(621): Selenocysteine
  MOD_RES (623)..(624): Selenocysteine
  MOD_RES (626)..(626): Selenocysteine
  MOD_RES (637)..(637): Selenocysteine
  MOD_RES (666)..(666): Selenocysteine
  MOD_RES (729)..(730): Selenocysteine
  MOD_RES (740)..(740): Selenocysteine
  MOD_RES (760)..(760): Selenocysteine
  MOD_RES (779)..(779): Selenocysteine
  MOD_RES (816)..(816): Selenocysteine
MELKRGKXFIKSSLQVSHEKPPDPAAVAAAREGXGPWSVLPGGQQRPHSEKGPQASPSAQEYDRCPNKGAQLDPKGGPAALCGAXFKPVRKCKXHDSMSGAGRAXAAXGQLVGSASFPGSPGSRRMIDYRHFVPQMPFVPAVAKSIPRKRISLKRPKKCFRNLFHIRRNKXEDLASLAAEGKSLPSPGDPSDPGGRRSKAFLPPGEGPGLDGLCQDLLDSELLADASFGLCRALCEDVASLQSFDSLXGCGEVFADESSVPSLELNEGPESPXQAAQGLESKVPRGPLQGSVEQLASPAQNEASDFXRFWDSVNRSVRQQQRALLGPWLSGPQGXDRDQSRLDXAGLAELPLCPCRDPRSGSKASSIDXGXPKSEQPESVSXSDEGYYDSFSPGLEEDKKEAESPGXPAAXFPRDSYSGDALYELFHDPSEGPLGPSPDDDLCVSESLSGPALGXPLSICSFRVGAEENLAPAPGPDLLSQGFLQSSWKGKECLLKLCDXELAIXMGIVSWLRRGPXPRAPPXPGQPAAPPGSQGAPRAPXEKLGGREGLASDAGGAXVCSAPSRQELWAHPGXXGLLAGESKALGGAXQGXGXLSRDASREEEXRGHSEGLFSSMESAAXSXXDXSGKNKAPVPSXWPCSQKEPGPPGVLGCFRGPWRPGHGGDXLDAEPMLAGCVARVAALKISSNEQPPAAWPPRQDMGSGLFGQRWARGPDMLEQKQSSSSPSMXXIHGLPYSASXQDQRCRDRVQDLSWLRVEPXGLGVQAWASVEDQPLQLSXEAVEQVAHGSQLDSEPRSAPAARWSSQGHHPESLGLXLNSQQEGGVSASAPECRCSLLAREGLLCGQPEVGASGPAMAEPHL

SEQ ID NO: 2245 - protein, 165 aa, Homo sapiens
  MOD_RES (46)..(46): Selenocysteine
  MOD_RES (82)..(83): Selenocysteine
  MOD_RES (112)..(112): Selenocysteine
  MOD_RES (115)..(115): Selenocysteine
  MOD_RES (120)..(120): Selenocysteine
  MOD_RES (132)..(132): Selenocysteine
  MOD_RES (135)..(135): Selenocysteine
  MOD_RES (154)..(154): Selenocysteine
  MOD_RES (160)..(160): Selenocysteine
  MOD_RES (165)..(165): Selenocysteine
MLVAKLIQCIVFGPLRVSERQHLKDKFWNFIFYKFIFIFGVLNVQXVEEVVMWCLWFAGLVFLHLMVQLCKDRFEYLSFSPXXPMSSHGRVLSLLVAMLLSCCGLAAVCSIXGYXHGMHXLAFMAAESLLVXVRXAHVILRYVIHLWDLNHEGXWEGKGXYVYYX

SEQ ID NO: 2246 - protein, 229 aa, Homo sapiens
  MOD_RES (46)..(46): Selenocysteine
  MOD_RES (82)..(83): Selenocysteine
  MOD_RES (112)..(112): Selenocysteine
  MOD_RES (115)..(115): Selenocysteine
  MOD_RES (120)..(120): Selenocysteine
  MOD_RES (132)..(132): Selenocysteine
  MOD_RES (135)..(135): Selenocysteine
  MOD_RES (154)..(154): Selenocysteine
  MOD_RES (160)..(160): Selenocysteine
  MOD_RES (165)..(165): Selenocysteine
  MOD_RES (172)..(172): Selenocysteine
MLVAKLIQCIVFGPLRVSERQHLKDKFWNFIFYKFIFIFGVLNVQXVEEVVMWCLWFAGLVFLHLMVQLCKDRFEYLSFSPXXPMSSHGRVLSLLVAMLLSCCGLAAVCSIXGYXHGMHXLAFMAAESLLVXVRXAHVILRYVIHLWDLNHEGXWEGKGXYVYYXDFVMELXLLSLDLMHHIHMLLFGNIWLSMASLVIFMQLRYLFHEVQRRIRRHKNYLRVVGNMEA

SEQ ID NO: 2247 - protein, 643 aa, Homo sapiens
  MOD_RES (16)..(16): Selenocysteine
  MOD_RES (18)..(18): Selenocysteine
  MOD_RES (28)..(28): Selenocysteine
  MOD_RES (50)..(50): Selenocysteine
  MOD_RES (90)..(90): Selenocysteine
  MOD_RES (141)..(141): Selenocysteine
  MOD_RES (177)..(178): Selenocysteine
  MOD_RES (207)..(207): Selenocysteine
  MOD_RES (210)..(210): Selenocysteine
  MOD_RES (215)..(215): Selenocysteine
  MOD_RES (227)..(227): Selenocysteine
  MOD_RES (230)..(230): Selenocysteine
  MOD_RES (249)..(249): Selenocysteine
  MOD_RES (255)..(255): Selenocysteine
  MOD_RES (260)..(260): Selenocysteine
  MOD_RES (267)..(267): Selenocysteine
  MOD_RES (330)..(330): Selenocysteine
  MOD_RES (373)..(373): Selenocysteine
  MOD_RES (377)..(377): Selenocysteine
  MOD_RES (443)..(444): Selenocysteine
  MOD_RES (450)..(450): Selenocysteine
  MOD_RES (483)..(483): Selenocysteine
  MOD_RES (489)..(490): Selenocysteine
  MOD_RES (504)..(504): Selenocysteine
  MOD_RES (530)..(530): Selenocysteine
  MOD_RES (534)..(534): Selenocysteine
  MOD_RES (548)..(548): Selenocysteine
  MOD_RES (623)..(623): Selenocysteine
  MOD_RES (642)..(642): Selenocysteine
MPLLFLERFPWPSLRXYXGLSGLALLGXIISAYRALSQPEAGPGEPDQLXASLQPEPPAPARPSAGGPRARDVAQYLLSDSLFVWVLVNXACCVLMLVAKLIQCIVFGPLRVSERQHLKDKFWNFIFYKFIFIFGVLNVQXVEEVVMWCLWFAGLVFLHLMVQLCKDRFEYLSFSPXXPMSSHGRVLSLLVAMLLSCCGLAAVCSIXGYXHGMHXLAFMAAESLLVXVRXAHVILRYVIHLWDLNHEGXWEGKGXYVYYXDFVMELXLLSLDLMHHIHMLLFGNIWLSMASLVIFMQLRYLFHEVQRRIRRHKNYLRVVGNMEARFAVAXPEELAVNNDDCAICWDSMQAARKLPCGHLFHNSCLRSWLEQDXSCPXCRMSLNIADNNRVREEHQGENLDENLVPVAAAEGRPRLNQHNHFFHFDGSRIASWLPSFSVEVMHXXNILGIXQASNSQLNAMAHQIQEMFPQVPYHLVLQDLQLXRSVEIXXDNILEGRIQVPFPXQRSDSIRPALNSPVERPSSDQEEGEXSAQXERVPLDLSPRLEEXLDFGEVEVEPSEVEDFEARGSRFSKSADERQRMLVQRKDELLQQARKRFLNKSSEDDAASESFLPSEGASSDPVXLRRRMLAAAAERRLQKQQXS

SEQ ID NO: 2248 - protein, 288 aa, Homo sapiens
  MOD_RES (45)..(45): Selenocysteine
  MOD_RES (88)..(88): Selenocysteine
  MOD_RES (92)..(92): Selenocysteine
  MOD_RES (149)..(149): Selenocysteine
  MOD_RES (167)..(167): Selenocysteine
  MOD_RES (190)..(191): Selenocysteine
  MOD_RES (197)..(197): Selenocysteine
  MOD_RES (230)..(230): Selenocysteine
  MOD_RES (236)..(237): Selenocysteine
  MOD_RES (251)..(251): Selenocysteine
  MOD_RES (277)..(277): Selenocysteine
  MOD_RES (281)..(281): Selenocysteine
WLSMASLVIFMQLRYLFHEVQRRIRRHKNYLRVVGNMEARFAVAXPEELAVNNDDCAICWDSMQAARKLPCGHLFHNSCLRSWLEQDXSCPXCRMSLNIADNNRVREEHQGENLDENLVPVAAAEGRPRLNQHNHFFHFDGDDSSMRVXAPEDVPVGQEVEVVDSDXDAPDLWSRIASWLPSFSVEVMHXXNILGIXQASNSQLNAMAHQIQEMFPQVPYHLVLQDLQLXRSVEIXXDNILEGRIQVPFPXQRSDSIRPALNSPVERPSSDQEEGEXSAQXERVPLDL

SEQ ID NO: 2249 - protein, 299 aa, Homo sapiens
  MOD_RES (4)..(4): Selenocysteine
  MOD_RES (20)..(20): Selenocysteine
  MOD_RES (32)..(32): Selenocysteine
  MOD_RES (34)..(34): Selenocysteine
  MOD_RES (41)..(41): Selenocysteine
  MOD_RES (57)..(57): Selenocysteine
  MOD_RES (59)..(60): Selenocysteine
  MOD_RES (66)..(66): Selenocysteine
  MOD_RES (81)..(81): Selenocysteine
  MOD_RES (99)..(100): Selenocysteine
  MOD_RES (106)..(106): Selenocysteine
  MOD_RES (139)..(139): Selenocysteine
  MOD_RES (145)..(146): Selenocysteine
  MOD_RES (160)..(160): Selenocysteine
  MOD_RES (186)..(186): Selenocysteine
  MOD_RES (190)..(190): Selenocysteine
  MOD_RES (204)..(204): Selenocysteine
  MOD_RES (279)..(279): Selenocysteine
  MOD_RES (298)..(298): Selenocysteine
YLAXSGYPWPAWSSLCSCVXCFMRCNVEFVGXRXIYVWLEXWRPGLQLQLQRSWLSXMXXVPSVGXPCRLRGNCPVDIFSXRSRIASWLPSFSVEVMHXXNILGIXQASNSQLNAMAHQIQEMFPQVPYHLVLQDLQLXRSVEIXXDNILEGRIQVPFPXQRSDSIRPALNSPVERPSSDQEEGEXSAQXERVPLDLSPRLEEXLDFGEVEVEPSEVEDFEARGSRFSKSADERQRMLVQRKDELLQQARKRFLNKSSEDDAASESFLPSEGASSDPVXLRRRMLAAAAERRLQKQQXS

SEQ ID NO: 2250 - protein, 560 aa, Homo sapiens
  MOD_RES (7)..(7): Selenocysteine
  MOD_RES (22)..(22): Selenocysteine
  MOD_RES (34)..(34): Selenocysteine
  MOD_RES (99)..(99): Selenocysteine
  MOD_RES (105)..(105): Selenocysteine
  MOD_RES (139)..(139): Selenocysteine
  MOD_RES (143)..(143): Selenocysteine
  MOD_RES (175)..(175): Selenocysteine
  MOD_RES (177)..(177): Selenocysteine
  MOD_RES (193)..(193): Selenocysteine
  MOD_RES (215)..(215): Selenocysteine
  MOD_RES (227)..(227): Selenocysteine
  MOD_RES (243)..(243): Selenocysteine
  MOD_RES (246)..(246): Selenocysteine
  MOD_RES (268)..(268): Selenocysteine
  MOD_RES (293)..(293): Selenocysteine
  MOD_RES (295)..(295): Selenocysteine
  MOD_RES (353)..(353): Selenocysteine
  MOD_RES (356)..(357): Selenocysteine
  MOD_RES (367)..(367): Selenocysteine
  MOD_RES (373)..(373): Selenocysteine
  MOD_RES (400)..(400): Selenocysteine
  MOD_RES (456)..(456): Selenocysteine
  MOD_RES (482)..(482): Selenocysteine
  MOD_RES (529)..(529): Selenocysteine
  MOD_RES (555)..(555): Selenocysteine
MRDLPLXSLALVLSALGALLGXEALRAEEPAVGXSGLIFREDLDWPPGSPQEPLCLVALGGDSNGSSSPLRVVGALSAYEQAFLGAVQRARWGPRDLAXFGVCNXGDRQAALPSLRRLGAWLRDPGGQRLVVLHLEEVXWEPXPSLRFQEPPPGGAGPPELALLVLYPGPGPEVXVXRAGLPGAQSLCPSRDXRYLVLAVDRPAGAWRGSGLALXLQPRGEDSRLSXARLQALLFGDDHRCFXRMXPALLLLPRSEPAPLPAHGQLDXVPFPPPRPSAELEESPPSADPFLEXLXRLVRALRVPPARASAPRLALDPDALAGFPQGLVNLSDPAALERLLDGEEPLLLLLRPXAAXXGDPAPLHDPXSAPWAXALARRVAAELQAAAAELRSLPGLPPAXAPLLARLLALCPGGPGGLGDPLRALLLLKALQGLRVEWRGRDPRGPGRAQRSAGAXAADGPCALRELSVDLRAERSVLIPEXYQANNCQGVCGWPQSDRNPRYGNHVVLLLKMQVRGAALARPPCCVPXAYAGKLLISLSEERISAHHVPNMVAXECGCR

SEQ ID NO: 2251 - protein, 172 aa, Homo sapiens
  MOD_RES (59)..(59): Selenocysteine
  MOD_RES (65)..(65): Selenocysteine
  MOD_RES (67)..(67): Selenocysteine
  MOD_RES (80)..(80): Selenocysteine
  MOD_RES (92)..(92): Selenocysteine
  MOD_RES (144)..(144): Selenocysteine
  MOD_RES (146)..(146): Selenocysteine
  MOD_RES (166)..(166): Selenocysteine
  MOD_RES (172)..(172): Selenocysteine
MALSLAQGLAFLHEERWQNGQYKPGIAHRDLSSQNVLIREDGSCAIGDLGLALVLPGLXQPPAWXPXQPQGPAAIMEAGXQRYMAPELLDKXLDLQDWGMALRRADIYSLALLLWEILSRCPDLRPDSSPPPFQLAYEAELGNXPXSDELWALAVQERRRPYIPSXWRCFAX

SEQ ID NO: 2252 - protein, 478 aa, Homo sapiens
  MOD_RES (13)..(13): Selenocysteine
  MOD_RES (23)..(23): Selenocysteine
  MOD_RES (36)..(36): Selenocysteine
  MOD_RES (38)..(38): Selenocysteine
  MOD_RES (45)..(45): Selenocysteine
  MOD_RES (47)..(47): Selenocysteine
  MOD_RES (68)..(68): Selenocysteine
  MOD_RES (105)..(105): Selenocysteine
  MOD_RES (108)..(108): Selenocysteine
  MOD_RES (113)..(113): Selenocysteine
  MOD_RES (131)..(131): Selenocysteine
  MOD_RES (262)..(262): Selenocysteine
  MOD_RES (292)..(292): Selenocysteine
  MOD_RES (295)..(295): Selenocysteine
  MOD_RES (362)..(362): Selenocysteine
  MOD_RES (368)..(368): Selenocysteine
  MOD_RES (370)..(370): Selenocysteine
  MOD_RES (402)..(402): Selenocysteine
  MOD_RES (439)..(439): Selenocysteine
  MOD_RES (445)..(445): Selenocysteine
  MOD_RES (474)..(474): Selenocysteine
MLGSLGLWALLPXAVEAPPNRRXCVFFEAPGVRGSXKXLGELLDXGXELPRAIRCLYSRCCFGIWNLXQDRAQVEMQGCRDSDEPGCESLHCDPSPRAHPSPGSXLFXCSCGXDFCNANYSHLPPPGSPGXPGSQGPQAAPGESIWMALVLLGLFLLLLLLLGSIILALLQRKNYRVRGEPVPEPRPDSGRDWSVELQELPELCFSQVIREGGHAVVWAGQLQGKLVAIKAFPPRSVAQFQAERALYELPGLQHDHIVRFIXASRGGPGRLLSGPLLVLELHPKGSLCHYLXQYXSDWGSSLRMALSLAQGLAFLHEERWQNGQYKPGIAHRDLSSQNVLIREDGSCAIGDLGLALVLPGLXQPPAWXPXQPQGPAAIMEDPDGLRELLEDCWDADPEARLXAECVQQRLAALAHPQESHPFPESCPRGCPPLCPEDCXSIPAPXILPCRPQRSACHFSVQQGPCSRNPQPACXLSPV

SEQ ID NO: 2253 - protein, 478 aa, Homo sapiens
  MOD_RES (13)..(13): Selenocysteine
  MOD_RES (23)..(23): Selenocysteine
  MOD_RES (36)..(36): Selenocysteine
  MOD_RES (38)..(38): Selenocysteine
  MOD_RES (45)..(45): Selenocysteine
  MOD_RES (47)..(47): Selenocysteine
  MOD_RES (68)..(68): Selenocysteine
  MOD_RES (105)..(105): Selenocysteine
  MOD_RES (108)..(108): Selenocysteine
  MOD_RES (113)..(113): Selenocysteine
  MOD_RES (131)..(131): Selenocysteine
  MOD_RES (262)..(262): Selenocysteine
  MOD_RES (292)..(292): Selenocysteine
  MOD_RES (295)..(295): Selenocysteine
  MOD_RES (362)..(362): Selenocysteine
  MOD_RES (368)..(368): Selenocysteine
  MOD_RES (370)..(370): Selenocysteine
  MOD_RES (383)..(383): Selenocysteine
  MOD_RES (395)..(395): Selenocysteine
  MOD_RES (464)..(464): Selenocysteine
  MOD_RES (475)..(475): Selenocysteine
MLGSLGLWALLPXAVEAPPNRRXCVFFEAPGVRGSXKXLGELLDXGXELPRAIRCLYSRCCFGIWNLXQDRAQVEMQGCRDSDEPGCESLHCDPSPRAHPSPGSXLFXCSCGXDFCNANYSHLPPPGSPGXPGSQGPQAAPGESIWMALVLLGLFLLLLLLLGSIILALLQRKNYRVRGEPVPEPRPDSGRDWSVELQELPELCFSQVIREGGHAVVWAGQLQGKLVAIKAFPPRSVAQFQAERALYELPGLQHDHIVRFIXASRGGPGRLLSGPLLVLELHPKGSLCHYLXQYXSDWGSSLRMALSLAQGLAFLHEERWQNGQYKPGIAHRDLSSQNVLIREDGSCAIGDLGLALVLPGLXQPPAWXPXQPQGPAAIMEAGXQRYMAPELLDKXLDLQDWGMALRRADIYSLALLLWEILSRCPDLRPAVHHPSNWPMRQNWAIPLPLMSYGPWQCRRGGVPXSHPPGAALPQXLMG

SEQ ID NO: 2254 - protein, 573 aa, Homo sapiens
  MOD_RES (13)..(13): Selenocysteine
  MOD_RES (23)..(23): Selenocysteine
  MOD_RES (36)..(36): Selenocysteine
  MOD_RES (38)..(38): Selenocysteine
  MOD_RES (45)..(45): Selenocysteine
  MOD_RES (47)..(47): Selenocysteine
  MOD_RES (68)..(68): Selenocysteine
  MOD_RES (105)..(105): Selenocysteine
  MOD_RES (108)..(108): Selenocysteine
  MOD_RES (113)..(113): Selenocysteine
  MOD_RES (131)..(131): Selenocysteine
  MOD_RES (262)..(262): Selenocysteine
  MOD_RES (292)..(292): Selenocysteine
  MOD_RES (295)..(295): Selenocysteine
  MOD_RES (362)..(362): Selenocysteine
  MOD_RES (368)..(368): Selenocysteine
  MOD_RES (370)..(370): Selenocysteine
  MOD_RES (383)..(383): Selenocysteine
  MOD_RES (395)..(395): Selenocysteine
  MOD_RES (447)..(447): Selenocysteine
  MOD_RES (449)..(449): Selenocysteine
  MOD_RES (469)..(469): Selenocysteine
  MOD_RES (475)..(475): Selenocysteine
  MOD_RES (497)..(497): Selenocysteine
  MOD_RES (534)..(534): Selenocysteine
  MOD_RES (540)..(540): Selenocysteine
  MOD_RES (569)..(569): Selenocysteine
MLGSLGLWALLPXAVEAPPNRRXCVFFEAPGVRGSXKXLGELLDXGXELPRAIRCLYSRCCFGIWNLXQDRAQVEMQGCRDSDEPGCESLHCDPSPRAHPSPGSXLFXCSCGXDFCNANYSHLPPPGSPGXPGSQGPQAAPGESIWMALVLLGLFLLLLLLLGSIILALLQRKNYRVRGEPVPEPRPDSGRDWSVELQELPELCFSQVIREGGHAVVWAGQLQGKLVAIKAFPPRSVAQFQAERALYELPGLQHDHIVRFIXASRGGPGRLLSGPLLVLELHPKGSLCHYLXQYXSDWGSSLRMALSLAQGLAFLHEERWQNGQYKPGIAHRDLSSQNVLIREDGSCAIGDLGLALVLPGLXQPPAWXPXQPQGPAAIMEAGXQRYMAPELLDKXLDLQDWGMALRRADIYSLALLLWEILSRCPDLRPDSSPPPFQLAYEAELGNXPXSDELWALAVQERRRPYIPSXWRCFAXDPDGLRELLEDCWDADPEARLXAECVQQRLAALAHPQESHPFPESCPRGCPPLCPEDCXSIPAPXILPCRPQRSACHFSVQQGPCSRNPQPACXLSPV

SEQ ID NO: 2255 - protein, 597 aa, Homo sapiens
  MOD_RES (42)..(42): Selenocysteine
  MOD_RES (79)..(79): Selenocysteine
  MOD_RES (83)..(83): Selenocysteine
  MOD_RES (97)..(97): Selenocysteine
  MOD_RES (235)..(235): Selenocysteine
  MOD_RES (285)..(285): Selenocysteine
  MOD_RES (301)..(301): Selenocysteine
  MOD_RES (304)..(304): Selenocysteine
  MOD_RES (328)..(328): Selenocysteine
  MOD_RES (332)..(332): Selenocysteine
  MOD_RES (397)..(397): Selenocysteine
  MOD_RES (418)..(418): Selenocysteine
  MOD_RES (447)..(447): Selenocysteine
  MOD_RES (469)..(469): Selenocysteine
  MOD_RES (476)..(477): Selenocysteine
  MOD_RES (485)..(485): Selenocysteine
  MOD_RES (489)..(489): Selenocysteine
  MOD_RES (518)..(518): Selenocysteine
  MOD_RES (544)..(544): Selenocysteine
  MOD_RES (572)..(572): Selenocysteine
  MOD_RES (574)..(574): Selenocysteine
MEHRGPPPEYPFKGMPPQSVVCKPQEPGHFYSEHRLNQPGRXEGQLMRYQHPPEYGAARPAQDISLPLSARNSQPHSPXSSLXSGGSLPLLQSPPSXRLSPARHPLVPNQGDHSAHLPRPQQHFLPNQAHQGDHYRLSQPGLSQQQQQQQQQHHHHHHHQQQQQQQPQQQPGEAYSAMPRAQPSSASYQPVPADPFAIVSRAQQMVEILSDENRNLRQELEGCYEKVARLQKVEXEIQRVSEAYENLVKSSSKREALEKAMRNKLEGEIRRMHDFNRDLRERLEXANKQLAEKEYEGSEDXRKXISQLFAKNKESQREKEKLEAELAXARSXNEDQRRHIEIRDQALSNAQAKVVKLEEELKKKQVYVDKVEKMQQALVQLQAACEKREQLEHRLRXRLERELESLRIQQRQGNCQPXNVSEYNAAALMELLREKEERILALEADMXKWEQKYLEENVMRHFALDAAAXVAAQRDXXVISHSPNXSYDXALEARIQKEEEEILMANKRCLDMEGRIKXLHAQIIEKDAMIKVLQQRSRKEPSKXEQLSCMRPAKSLMSISNAGSGLLSHSSXLXGSPIMEEKRDDKSWKGSLGNDSK

SEQ ID NO: 2256 - protein, 852 aa, Homo sapiens
  MOD_RES (42)..(42): Selenocysteine
  MOD_RES (79)..(79): Selenocysteine
  MOD_RES (83)..(83): Selenocysteine
  MOD_RES (97)..(97): Selenocysteine
  MOD_RES (235)..(235): Selenocysteine
  MOD_RES (285)..(285): Selenocysteine
  MOD_RES (301)..(301): Selenocysteine
  MOD_RES (304)..(304): Selenocysteine
  MOD_RES (328)..(328): Selenocysteine
  MOD_RES (332)..(332): Selenocysteine
  MOD_RES (397)..(397): Selenocysteine
  MOD_RES (418)..(418): Selenocysteine
  MOD_RES (447)..(447): Selenocysteine
  MOD_RES (469)..(469): Selenocysteine
  MOD_RES (476)..(477): Selenocysteine
  MOD_RES (485)..(485): Selenocysteine
  MOD_RES (489)..(489): Selenocysteine
  MOD_RES (518)..(518): Selenocysteine
  MOD_RES (544)..(544): Selenocysteine
  MOD_RES (572)..(572): Selenocysteine
  MOD_RES (574)..(574): Selenocysteine
  MOD_RES (608)..(608): Selenocysteine
  MOD_RES (616)..(616): Selenocysteine
  MOD_RES (625)..(625): Selenocysteine
  MOD_RES (632)..(632): Selenocysteine
  MOD_RES (634)..(634): Selenocysteine
  MOD_RES (638)..(638): Selenocysteine
  MOD_RES (643)..(643): Selenocysteine
  MOD_RES (660)..(660): Selenocysteine
  MOD_RES (665)..(665): Selenocysteine
  MOD_RES (667)..(667): Selenocysteine
  MOD_RES (670)..(670): Selenocysteine
  MOD_RES (672)..(674): Selenocysteine
  MOD_RES (699)..(699): Selenocysteine
  MOD_RES (703)..(703): Selenocysteine
  MOD_RES (769)..(769): Selenocysteine
  MOD_RES (773)..(773): Selenocysteine
  MOD_RES (781)..(781): Selenocysteine
  MOD_RES (785)..(785): Selenocysteine
  MOD_RES (787)..(787): Selenocysteine
  MOD_RES (801)..(801): Selenocysteine
  MOD_RES (814)..(814): Selenocysteine
  MOD_RES (820)..(820): Selenocysteine
  MOD_RES (829)..(829): Selenocysteine
  MOD_RES (834)..(834): Selenocysteine
MEHRGPPPEYPFKGMPPQSVVCKPQEPGHFYSEHRLNQPGRXEGQLMRYQHPPEYGAARPAQDISLPLSARNSQPHSPXSSLXSGGSLPLLQSPPSXRLSPARHPLVPNQGDHSAHLPRPQQHFLPNQAHQGDHYRLSQPGLSQQQQQQQQQHHHHHHHQQQQQQQPQQQPGEAYSAMPRAQPSSASYQPVPADPFAIVSRAQQMVEILSDENRNLRQELEGCYEKVARLQKVEXEIQRVSEAYENLVKSSSKREALEKAMRNKLEGEIRRMHDFNRDLRERLEXANKQLAEKEYEGSEDXRKXISQLFAKNKESQREKEKLEAELAXARSXNEDQRRHIEIRDQALSNAQAKVVKLEEELKKKQVYVDKVEKMQQALVQLQAACEKREQLEHRLRXRLERELESLRIQQRQGNCQPXNVSEYNAAALMELLREKEERILALEADMXKWEQKYLEENVMRHFALDAAAXVAAQRDXXVISHSPNXSYDXALEARIQKEEEEILMANKRCLDMEGRIKXLHAQIIEKDAMIKVLQQRSRKEPSKXEQLSCMRPAKSLMSISNAGSGLLSHSSXLXGSPIMEEKRDDKSWKGSLGILLGGDYRAEYVPSXPSPVPPSXPLLSAHSKXGSRDCSXQXERGXESNKXAAVAPISVPAPVAAAAXAAAIXAXAAXIXXXMVAAAPVAVAAAAAPAAAAAPSPAXAAAXAAAVSPAAAGQIPAAASVASAAAVAPSAAAAAAVQVAPAAPAPVPAPALVPVPAPAAAQASAPAQXQAPXSAPAVAPXPAPXPXPAVAQAEVPASPAXGPGPHRLSIPSLXCNPDKXDGPVFHSNXLERKXPIQILGQEPDAEMVEYLI

SEQ ID NO: 2257 - protein, 675 aa, Homo sapiens
  MOD_RES (58)..(58): Selenocysteine
  MOD_RES (108)..(108): Selenocysteine
  MOD_RES (124)..(124): Selenocysteine
  MOD_RES (127)..(127): Selenocysteine
  MOD_RES (151)..(151): Selenocysteine
  MOD_RES (155)..(155): Selenocysteine
  MOD_RES (220)..(220): Selenocysteine
  MOD_RES (241)..(241): Selenocysteine
  MOD_RES (270)..(270): Selenocysteine
  MOD_RES (292)..(292): Selenocysteine
  MOD_RES (299)..(300): Selenocysteine
  MOD_RES (308)..(308): Selenocysteine
  MOD_RES (312)..(312): Selenocysteine
  MOD_RES (341)..(341): Selenocysteine
  MOD_RES (367)..(367): Selenocysteine
  MOD_RES (395)..(395): Selenocysteine
  MOD_RES (397)..(397): Selenocysteine
  MOD_RES (431)..(431): Selenocysteine
  MOD_RES (439)..(439): Selenocysteine
  MOD_RES (448)..(448): Selenocysteine
  MOD_RES (455)..(455): Selenocysteine
  MOD_RES (457)..(457): Selenocysteine
  MOD_RES (461)..(461): Selenocysteine
  MOD_RES (466)..(466): Selenocysteine
  MOD_RES (483)..(483): Selenocysteine
  MOD_RES (488)..(488): Selenocysteine
  MOD_RES (490)..(490): Selenocysteine
  MOD_RES (493)..(493): Selenocysteine
  MOD_RES (495)..(497): Selenocysteine
  MOD_RES (522)..(522): Selenocysteine
  MOD_RES (526)..(526): Selenocysteine
  MOD_RES (592)..(592): Selenocysteine
  MOD_RES (596)..(596): Selenocysteine
  MOD_RES (604)..(604): Selenocysteine
  MOD_RES (608)..(608): Selenocysteine
  MOD_RES (610)..(610): Selenocysteine
  MOD_RES (624)..(624): Selenocysteine
  MOD_RES (637)..(637): Selenocysteine
  MOD_RES (643)..(643): Selenocysteine
  MOD_RES (652)..(652): Selenocysteine
  MOD_RES (657)..(657): Selenocysteine
MPRAQPSSASYQPVPADPFAIVSRAQQMVEILSDENRNLRQELEGCYEKVARLQKVEXEIQRVSEAYENLVKSSSKREALEKAMRNKLEGEIRRMHDFNRDLRERLEXANKQLAEKEYEGSEDXRKXISQLFAKNKESQREKEKLEAELAXARSXNEDQRRHIEIRDQALSNAQAKVVKLEEELKKKQVYVDKVEKMQQALVQLQAACEKREQLEHRLRXRLERELESLRIQQRQGNCQPXNVSEYNAAALMELLREKEERILALEADMXKWEQKYLEENVMRHFALDAAAXVAAQRDXXVISHSPNXSYDXALEARIQKEEEEILMANKRCLDMEGRIKXLHAQIIEKDAMIKVLQQRSRKEPSKXEQLSCMRPAKSLMSISNAGSGLLSHSSXLXGSPIMEEKRDDKSWKGSLGILLGGDYRAEYVPSXPSPVPPSXPLLSAHSKXGSRDCSXQXERGXESNKXAAVAPISVPAPVAAAAXAAAIXAXAAXIXXXMVAAAPVAVAAAAAPAAAAAPSPAXAAAXAAAVSPAAAGQIPAAASVASAAAVAPSAAAAAAVQVAPAAPAPVPAPALVPVPAPAAAQASAPAQXQAPXSAPAVAPXPAPXPXPAVAQAEVPASPAXGPGPHRLSIPSLXCNPDKXDGPVFHSNXLERKXPIQILGQEPDAEMVEYLI

SEQ ID NO: 2258 - protein, 1084 aa, Homo sapiens
  MOD_RES (12)..(13): Selenocysteine
  MOD_RES (42)..(42): Selenocysteine
  MOD_RES (108)..(108): Selenocysteine
  MOD_RES (134)..(134): Selenocysteine
  MOD_RES (137)..(137): Selenocysteine
  MOD_RES (143)..(143): Selenocysteine
  MOD_RES (185)..(185): Selenocysteine
  MOD_RES (195)..(195): Selenocysteine
  MOD_RES (212)..(212): Selenocysteine
  MOD_RES (274)..(274): Selenocysteine
  MOD_RES (311)..(311): Selenocysteine
  MOD_RES (315)..(315): Selenocysteine
  MOD_RES (329)..(329): Selenocysteine
  MOD_RES (467)..(467): Selenocysteine
  MOD_RES (517)..(517): Selenocysteine
  MOD_RES (533)..(533): Selenocysteine
  MOD_RES (536)..(536): Selenocysteine
  MOD_RES (560)..(560): Selenocysteine
  MOD_RES (564)..(564): Selenocysteine
  MOD_RES (629)..(629): Selenocysteine
  MOD_RES (650)..(650): Selenocysteine
  MOD_RES (679)..(679): Selenocysteine
  MOD_RES (701)..(701): Selenocysteine
  MOD_RES (708)..(709): Selenocysteine
  MOD_RES (717)..(717): Selenocysteine
  MOD_RES (721)..(721): Selenocysteine
  MOD_RES (750)..(750): Selenocysteine
  MOD_RES (776)..(776): Selenocysteine
  MOD_RES (804)..(804): Selenocysteine
  MOD_RES (806)..(806): Selenocysteine
  MOD_RES (840)..(840): Selenocysteine
  MOD_RES (848)..(848): Selenocysteine
  MOD_RES (857)..(857): Selenocysteine
  MOD_RES (864)..(864): Selenocysteine
  MOD_RES (866)..(866): Selenocysteine
  MOD_RES (870)..(870): Selenocysteine
  MOD_RES (875)..(875): Selenocysteine
  MOD_RES (892)..(892): Selenocysteine
  MOD_RES (897)..(897): Selenocysteine
  MOD_RES (899)..(899): Selenocysteine
  MOD_RES (902)..(902): Selenocysteine
  MOD_RES (904)..(906): Selenocysteine
  MOD_RES (931)..(931): Selenocysteine
  MOD_RES (935)..(935): Selenocysteine
  MOD_RES (1001)..(1001): Selenocysteine
  MOD_RES (1005)..(1005): Selenocysteine
  MOD_RES (1013)..(1013): Selenocysteine
  MOD_RES (1017)..(1017): Selenocysteine
  MOD_RES (1019)..(1019): Selenocysteine
  MOD_RES (1033)..(1033): Selenocysteine
  MOD_RES (1046)..(1046): Selenocysteine
  MOD_RES (1052)..(1052): Selenocysteine
  MOD_RES (1061)..(1061): Selenocysteine
  MOD_RES (1066)..(1066): Selenocysteine
MRNSEEQPSGGXXVLQRLLQEQLRYGNPSENRSLLAIHQQAXGNGPPFPSGSGNPGPQSDVLSPQDHHQQLVAHAARQEPQGQEIQSENLIMEKQLSPRMQNNEELPXYEEAKVQSQYFRGQQHASVGAAFYVXGVXNQKMRXEGRPSVQRLNPGKMHQDEGLRDLKQGHVRSLSERLMQMSLAXSGVKAHPPVXSAPLSPPQPNDLYKNPXSSSEFYKAQGPLPNQHSLKGMEHRGPPPEYPFKGMPPQSVVCKPQEPGHFYSEHRLNQPGRXEGQLMRYQHPPEYGAARPAQDISLPLSARNSQPHSPXSSLXSGGSLPLLQSPPSXRLSPARHPLVPNQGDHSAHLPRPQQHFLPNQAHQGDHYRLSQPGLSQQQQQQQQQHHHHHHHQQQQQQQPQQQPGEAYSAMPRAQPSSASYQPVPADPFAIVSRAQQMVEILSDENRNLRQELEGCYEKVARLQKVEXEIQRVSEAYENLVKSSSKREALEKAMRNKLEGEIRRMHDFNRDLRERLEXANKQLAEKEYEGSEDXRKXISQLFAKNKESQREKEKLEAELAXARSXNEDQRRHIEIRDQALSNAQAKVVKLEEELKKKQVYVDKVEKMQQALVQLQAACEKREQLEHRLRXRLERELESLRIQQRQGNCQPXNVSEYNAAALMELLREKEERILALEADMXKWEQKYLEENVMRHFALDAAAXVAAQRDXXVISHSPNXSYDXALEARIQKEEEEILMANKRCLDMEGRIKXLHAQIIEKDAMIKVLQQRSRKEPSKXEQLSCMRPAKSLMSISNAGSGLLSHSSXLXGSPIMEEKRDDKSWKGSLGILLGGDYRAEYVPSXPSPVPPSXPLLSAHSKXGSRDCSXQXERGXESNKXAAVAPISVPAPVAAAAXAAAIXAXAAXIXXXMVAAAPVAVAAAAAPAAAAAPSPAXAAAXAAAVSPAAAGQIPAAASVASAAAVAPSAAAAAAVQVAPAAPAPVPAPALVPVPAPAAAQASAPAQXQAPXSAPAVAPXPAPXPXPAVAQAEVPASPAXGPGPHRLSIPSLXCNPDKXDGPVFHSNXLERKXPIQILGQEPDAEMVEYLI

SEQ ID NO: 2259 - protein, 145 aa, Homo sapiens
  MOD_RES (8)..(8): Selenocysteine
  MOD_RES (26)..(26): Selenocysteine
  MOD_RES (65)..(65): Selenocysteine
  MOD_RES (80)..(80): Selenocysteine
  MOD_RES (84)..(84): Selenocysteine
  MOD_RES (88)..(88): Selenocysteine
  MOD_RES (126)..(126): Selenocysteine
  MOD_RES (140)..(140): Selenocysteine
  MOD_RES (142)..(142): Selenocysteine
MDLSEKWXLEEGAWLSHAGIHHFASXRADSEFVEASPASYSPDELGSPSACYSPSSPVQVLEDSXYFSPDFQLYSGRHEXSALXVEAXSSIREKVVEDPLCNFHSPNFLRISEVEMRGSEDAAAGXVLQRLIQEQLRYGXPXENM

SEQ ID NO: 2260 - protein, 956 aa, Homo sapiens
  MOD_RES (10)..(10): Selenocysteine
  MOD_RES (36)..(36): Selenocysteine
  MOD_RES (51)..(51): Selenocysteine
  MOD_RES (55)..(55): Selenocysteine
  MOD_RES (59)..(59): Selenocysteine
  MOD_RES (97)..(97): Selenocysteine
  MOD_RES (111)..(111): Selenocysteine
  MOD_RES (113)..(113): Selenocysteine
  MOD_RES (126)..(126): Selenocysteine
  MOD_RES (135)..(135): Selenocysteine
  MOD_RES (141)..(141): Selenocysteine
  MOD_RES (145)..(145): Selenocysteine
  MOD_RES (170)..(170): Selenocysteine
  MOD_RES (179)..(179): Selenocysteine
  MOD_RES (190)..(190): Selenocysteine
  MOD_RES (224)..(224): Selenocysteine
  MOD_RES (230)..(230): Selenocysteine
  MOD_RES (235)..(235): Selenocysteine
  MOD_RES (317)..(317): Selenocysteine
  MOD_RES (327)..(327): Selenocysteine
  MOD_RES (357)..(357): Selenocysteine
  MOD_RES (373)..(373): Selenocysteine
  MOD_RES (384)..(384): Selenocysteine
  MOD_RES (395)..(395): Selenocysteine
  MOD_RES (449)..(449): Selenocysteine
  MOD_RES (490)..(491): Selenocysteine
  MOD_RES (524)..(524): Selenocysteine
  MOD_RES (569)..(569): Selenocysteine
  MOD_RES (617)..(617): Selenocysteine
  MOD_RES (635)..(635): Selenocysteine
  MOD_RES (646)..(646): Selenocysteine
  MOD_RES (685)..(685): Selenocysteine
  MOD_RES (696)..(696): Selenocysteine
  MOD_RES (707)..(707): Selenocysteine
  MOD_RES (714)..(715): Selenocysteine
  MOD_RES (754)..(754): Selenocysteine
  MOD_RES (783)..(783): Selenocysteine
  MOD_RES (801)..(801): Selenocysteine
  MOD_RES (803)..(803): Selenocysteine
  MOD_RES (808)..(808): Selenocysteine
  MOD_RES (811)..(811): Selenocysteine
  MOD_RES (824)..(824): Selenocysteine
  MOD_RES (851)..(851): Selenocysteine
  MOD_RES (860)..(861): Selenocysteine
  MOD_RES (870)..(870): Selenocysteine
  MOD_RES (877)..(877): Selenocysteine
  MOD_RES (879)..(879): Selenocysteine
  MOD_RES (901)..(902): Selenocysteine
  MOD_RES (917)..(917): Selenocysteine
MWRAKLRRGXCEPAVKGSPSACYSPSSPVQVLEDSXYFSPDFQLYSGRHEXSALXVEAXSSIREKVVEDPLCNFHSPNFLRISEVEMRGSEDAAAGXVLQRLIQEQLRYGXPXENMNLLAIQHQAXGSAGPAHPXNNFSSXENLXQEDPQMVYQSARQEPQGQEHQVDNXVMEKQVRSXQPQQNNEELPXYEEAKAQSQFFRGQQQQQQQQGAVGHGYYMAGGXSQKSRXEGRPXVNRANSGQAHKDEALKELKQGHVRSLSERIMQLSLERNGAKQHLPGSGNGKGFKVGGGPSPAQPAGKVLDPRGPPPEYPFKXKQMMSPVSKXQEHGLFYGDQHPGMLHEMVKPYPAPQPVRXDVAVLRYQPPPEYGVXSRPCQLPFPSXMQQHSPMSSQXSSASGPLHSVSLPLPLPMALGAPQPPPAASPSQQLGPDAFAIVERAQQMVEILXEENRVLHQELQGYYDNADKLHKFEKELQRISEAYESLVKSXXKRESLDKAMRNKLEGEIRRLHDFNRDLRDRLEXANRQLSSREYEGHEDKAAEGHYASQNKEFLKEKEKLEMELAAVRXASEDHRRHIEILDQALSNAQARVIKLEEELREKQAYVEKVEKLQQALXQLQSACEKREQMERRLRXWLERELDALRXQQKHGNGQPANMPEYNAPALLELVREKEERILALEADMXKWEQKYLEESXIRHFAMNAAAXAAAERDXXIINHSRNGSYGESSLEAHIWQEEEEVVQANRRCQDMEYXIKNLHAKIIEKDAMIKVLQQRSRKDAGKXDSSSLRPARSVPSIAAAXGXHSRQXSLXSSQLAEEKKEEKXWKGSIGLLLGKEHHEHASAPLLPPPPXSALSSIASXXAASSAHAKXGSKDSSXQXDKSAELFWPSMASLPSRGRLSXXPAHSPVLKHPAAKGXAEKLENSPGHGKSPDHRGRVSSLLHKPEFPDGEMMEVLI

SEQ ID NO: 2261 - protein, 906 aa, Homo sapiens
  MOD_RES (10)..(10): Selenocysteine
  MOD_RES (47)..(47): Selenocysteine
  MOD_RES (61)..(61): Selenocysteine
  MOD_RES (63)..(63): Selenocysteine
  MOD_RES (76)..(76): Selenocysteine
  MOD_RES (85)..(85): Selenocysteine
  MOD_RES (91)..(91): Selenocysteine
  MOD_RES (95)..(95): Selenocysteine
  MOD_RES (120)..(120): Selenocysteine
  MOD_RES (129)..(129): Selenocysteine
  MOD_RES (140)..(140): Selenocysteine
  MOD_RES (174)..(174): Selenocysteine
  MOD_RES (180)..(180): Selenocysteine
  MOD_RES (185)..(185): Selenocysteine
  MOD_RES (267)..(267): Selenocysteine
  MOD_RES (277)..(277): Selenocysteine
  MOD_RES (307)..(307): Selenocysteine
  MOD_RES (323)..(323): Selenocysteine
  MOD_RES (334)..(334): Selenocysteine
  MOD_RES (345)..(345): Selenocysteine
  MOD_RES (399)..(399): Selenocysteine
  MOD_RES (440)..(441): Selenocysteine
  MOD_RES (474)..(474): Selenocysteine
  MOD_RES (519)..(519): Selenocysteine
  MOD_RES (567)..(567): Selenocysteine
  MOD_RES (585)..(585): Selenocysteine
  MOD_RES (596)..(596): Selenocysteine
  MOD_RES (635)..(635): Selenocysteine
  MOD_RES (646)..(646): Selenocysteine
  MOD_RES (657)..(657): Selenocysteine
  MOD_RES (664)..(665): Selenocysteine
  MOD_RES (704)..(704): Selenocysteine
  MOD_RES (733)..(733): Selenocysteine
  MOD_RES (751)..(751): Selenocysteine
  MOD_RES (753)..(753): Selenocysteine
  MOD_RES (758)..(758): Selenocysteine
  MOD_RES (761)..(761): Selenocysteine
  MOD_RES (774)..(774): Selenocysteine
  MOD_RES (801)..(801): Selenocysteine
  MOD_RES (810)..(811): Selenocysteine
  MOD_RES (820)..(820): Selenocysteine
  MOD_RES (827)..(827): Selenocysteine
  MOD_RES (829)..(829): Selenocysteine
  MOD_RES (851)..(852): Selenocysteine
  MOD_RES (867)..(867): Selenocysteine
MWRAKLRRGXCEPAVKVEDPLCNFHSPNFLRISEVEMRGSEDAAAGXVLQRLIQEQLRYGXPXENMNLLAIQHQAXGSAGPAHPXNNFSSXENLXQEDPQMVYQSARQEPQGQEHQVDNXVMEKQVRSXQPQQNNEELPXYEEAKAQSQFFRGQQQQQQQQGAVGHGYYMAGGXSQKSRXEGRPXVNRANSGQAHKDEALKELKQGHVRSLSERIMQLSLERNGAKQHLPGSGNGKGFKVGGGPSPAQPAGKVLDPRGPPPEYPFKXKQMMSPVSKXQEHGLFYGDQHPGMLHEMVKPYPAPQPVRXDVAVLRYQPPPEYGVXSRPCQLPFPSXMQQHSPMSSQXSSASGPLHSVSLPLPLPMALGAPQPPPAASPSQQLGPDAFAIVERAQQMVEILXEENRVLHQELQGYYDNADKLHKFEKELQRISEAYESLVKSXXKRESLDKAMRNKLEGEIRRLHDFNRDLRDRLEXANRQLSSREYEGHEDKAAEGHYASQNKEFLKEKEKLEMELAAVRXASEDHRRHIEILDQALSNAQARVIKLEEELREKQAYVEKVEKLQQALXQLQSACEKREQMERRLRXWLERELDALRXQQKHGNGQPANMPEYNAPALLELVREKEERILALEADMXKWEQKYLEESXIRHFAMNAAAXAAAERDXXIINHSRNGSYGESSLEAHIWQEEEEVVQANRRCQDMEYXIKNLHAKIIEKDAMIKVLQQRSRKDAGKXDSSSLRPARSVPSIAAAXGXHSRQXSLXSSQLAEEKKEEKXWKGSIGLLLGKEHHEHASAPLLPPPPXSALSSIASXXAASSAHAKXGSKDSSXQXDKSAELFWPSMASLPSRGRLSXXPAHSPVLKHPAAKGXAEKLENSPGHGKSPDHRGRVSSLLHKPEFPDGEMMEVLI

SEQ ID NO: 2262 - protein, 33 aa, Homo sapiens
  MOD_RES (3)..(3): Selenocysteine
  MOD_RES (10)..(10): Selenocysteine
  MOD_RES (26)..(26): Selenocysteine
  MOD_RES (28)..(28): Selenocysteine
  MOD_RES (30)..(30): Selenocysteine
MRXLEDSSGXVLHRLIQEQLRYGNLXEXRXLLA

SEQ ID NO: 2263 - protein, 123 aa, Homo sapiens
  MOD_RES (3)..(3): Selenocysteine
  MOD_RES (10)..(10): Selenocysteine
  MOD_RES (26)..(26): Selenocysteine
  MOD_RES (28)..(28): Selenocysteine
  MOD_RES (30)..(30): Selenocysteine
  MOD_RES (45)..(45): Selenocysteine
  MOD_RES (48)..(48): Selenocysteine
  MOD_RES (70)..(70): Selenocysteine
  MOD_RES (90)..(90): Selenocysteine
  MOD_RES (106)..(106): Selenocysteine
MRXLEDSSGXVLHRLIQEQLRYGNLXEXRXLLAIQQQALRGGAGXGGXGSPQASLEILAPEDSQVLQQAXRQEPQGQEHQGGENHLAENXLYRLCPQPSKGEELPXYEEAKAHSQYYAAQQAG

SEQ ID NO: 2264 - protein, 127 aa, Homo sapiens
  MOD_RES (3)..(3): Selenocysteine
  MOD_RES (10)..(10): Selenocysteine
  MOD_RES (26)..(26): Selenocysteine
  MOD_RES (28)..(28): Selenocysteine
  MOD_RES (30)..(30): Selenocysteine
  MOD_RES (45)..(45): Selenocysteine
  MOD_RES (48)..(48): Selenocysteine
  MOD_RES (70)..(70): Selenocysteine
  MOD_RES (90)..(90): Selenocysteine
  MOD_RES (106)..(106): Selenocysteine
  MOD_RES (124)..(124): Selenocysteine
MRXLEDSSGXVLHRLIQEQLRYGNLXEXRXLLAIQQQALRGGAGXGGXGSPQASLEILAPEDSQVLQQAXRQEPQGQEHQGGENHLAENXLYRLCPQPSKGEELPXYEEAKAHSQYYAAQQAGXRPH

SEQ ID NO: 2265 - protein, 144 aa, Homo sapiens
  MOD_RES (3)..(3): Selenocysteine
  MOD_RES (10)..(10): Selenocysteine
  MOD_RES (26)..(26): Selenocysteine
  MOD_RES (28)..(28): Selenocysteine
  MOD_RES (30)..(30): Selenocysteine
  MOD_RES (45)..(45): Selenocysteine
  MOD_RES (48)..(48): Selenocysteine
  MOD_RES (70)..(70): Selenocysteine
  MOD_RES (90)..(90): Selenocysteine
  MOD_RES (106)..(106): Selenocysteine
  MOD_RES (124)..(124): Selenocysteine
MRXLEDSSGXVLHRLIQEQLRYGNLXEXRXLLAIQQQALRGGAGXGGXGSPQASLEILAPEDSQVLQQAXRQEPQGQEHQGGENHLAENXLYRLCPQPSKGEELPXYEEAKAHSQYYAAQQAGXRPHAGDRDPRGAPGGSRRQD

SEQ ID NO: 2266 - protein, 151 aa, Homo sapiens
  MOD_RES (3)..(3): Selenocysteine
  MOD_RES (10)..(10): Selenocysteine
  MOD_RES (26)..(26): Selenocysteine
  MOD_RES (28)..(28): Selenocysteine
  MOD_RES (30)..(30): Selenocysteine
  MOD_RES (45)..(45): Selenocysteine
  MOD_RES (48)..(48): Selenocysteine
  MOD_RES (70)..(70): Selenocysteine
  MOD_RES (90)..(90): Selenocysteine
  MOD_RES (106)..(106): Selenocysteine
  MOD_RES (124)..(124): Selenocysteine
MRXLEDSSGXVLHRLIQEQLRYGNLXEXRXLLAIQQQALRGGAGXGGXGSPQASLEILAPEDSQVLQQAXRQEPQGQEHQGGENHLAENXLYRLCPQPSKGEELPXYEEAKAHSQYYAAQQAGXRPHAGDRDPRGAPGGSRRQDEALRELR

SEQ ID NO: 2267 - protein, 198 aa, Homo sapiens
  MOD_RES (3)..(3): Selenocysteine
  MOD_RES (10)..(10): Selenocysteine
  MOD_RES (26)..(26): Selenocysteine
  MOD_RES (28)..(28): Selenocysteine
  MOD_RES (30)..(30): Selenocysteine
  MOD_RES (45)..(45): Selenocysteine
  MOD_RES (48)..(48): Selenocysteine
  MOD_RES (70)..(70): Selenocysteine
  MOD_RES (90)..(90): Selenocysteine
  MOD_RES (106)..(106): Selenocysteine
  MOD_RES (124)..(124): Selenocysteine
MRXLEDSSGXVLHRLIQEQLRYGNLXEXRXLLAIQQQALRGGAGXGGXGSPQASLEILAPEDSQVLQQAXRQEPQGQEHQGGENHLAENXLYRLCPQPSKGEELPXYEEAKAHSQYYAAQQAGXRPHAGDRDPRGAPGGSRRQDEALRELRHGHVRSLSERLLQLSLERNGARAPSHMSSSHSFPQLARNQQGPPLRG

SEQ ID NO: 2268 - protein, 777 aa, Homo sapiens
  MOD_RES (3)..(3): Selenocysteine
  MOD_RES (10)..(10): Selenocysteine
  MOD_RES (26)..(26): Selenocysteine
  MOD_RES (28)..(28): Selenocysteine
  MOD_RES (30)..(30): Selenocysteine
  MOD_RES (45)..(45): Selenocysteine
  MOD_RES (48)..(48): Selenocysteine
  MOD_RES (70)..(70): Selenocysteine
  MOD_RES (90)..(90): Selenocysteine
  MOD_RES (106)..(106): Selenocysteine
  MOD_RES (124)..(124): Selenocysteine
  MOD_RES (222)..(224): Selenocysteine
  MOD_RES (227)..(227): Selenocysteine
  MOD_RES (305)..(305): Selenocysteine
  MOD_RES (363)..(363): Selenocysteine
  MOD_RES (375)..(375): Selenocysteine
  MOD_RES (409)..(409): Selenocysteine
  MOD_RES (512)..(512): Selenocysteine
  MOD_RES (565)..(565): Selenocysteine
  MOD_RES (587)..(587): Selenocysteine
  MOD_RES (594)..(595): Selenocysteine
  MOD_RES (615)..(615): Selenocysteine
  MOD_RES (677)..(677): Selenocysteine
  MOD_RES (690)..(690): Selenocysteine
  MOD_RES (698)..(699): Selenocysteine
  MOD_RES (704)..(704): Selenocysteine
  MOD_RES (710)..(710): Selenocysteine
  MOD_RES (726)..(726): Selenocysteine
  MOD_RES (728)..(728): Selenocysteine
  MOD_RES (735)..(735): Selenocysteine
  MOD_RES (737)..(737): Selenocysteine
  MOD_RES (763)..(763): Selenocysteine
MRXLEDSSGXVLHRLIQEQLRYGNLXEXRXLLAIQQQALRGGAGXGGXGSPQASLEILAPEDSQVLQQAXRQEPQGQEHQGGENHLAENXLYRLCPQPSKGEELPXYEEAKAHSQYYAAQQAGXRPHAGDRDPRGAPGGSRRQDEALRELRHGHVRSLSERLLQLSLERNGARAPSHMSSSHSFPQLARNQQGPPLRGPPAEGPESRGPPPQYPHVVLAHEXXXAVXDPRYRARGSPHFQHAEVRILQAQVPPVFLQQQQQYQYLQQSQEHPPPPHPAALGHGPLSSLSPPAVEGPVSAQASSAXSGSAHLAQMEAVLRENARLQRDNERLQRELESSAEKAGRIEKLESEIQRLSEAHESLXRASSKREALEKXMRNKMDSEMRRLQDFNRDLRERLESANRRLASKXQEAQAGSQDMVAKLLAQSYEQQQEQEKLEREMALLRGAIEDQRRRAELLEQALGNAQGRAARAEEELRKKQAYVEKVERLQQALGQLQAACEKREQLELRLRXRLEQELKALRAQQAGAPGGSSGSGGSPELSALRLSEQLREKEEQILALEADMXKWEQKYLEERAMRQFAMDAAAXAAAQRDXXLIRHSPQPSPSSSFNEGLLXGGHRHQEMESRLKVLHAQILEKDAVIKVLQQRSRRDPGKAIQGSLRPAKSVPSVFAAAAAGXQGWQGLSSSERQXADAPARLXXDRAPXEEPVVXAPPAAHAKHGSRDGSXQXEGPPDSXSXCLPPEPDSLLGCSSSQRAASLDSVAXSRVQDLSDMVEILI

SEQ ID NO: 2269 - protein, 779 aa, Homo sapiens
  MOD_RES (3)..(3): Selenocysteine
  MOD_RES (10)..(10): Selenocysteine
  MOD_RES (26)..(26): Selenocysteine
  MOD_RES (28)..(28): Selenocysteine
  MOD_RES (30)..(30): Selenocysteine
  MOD_RES (45)..(45): Selenocysteine
  MOD_RES (48)..(48): Selenocysteine
  MOD_RES (70)..(70): Selenocysteine
  MOD_RES (90)..(90): Selenocysteine
  MOD_RES (106)..(106): Selenocysteine
  MOD_RES (124)..(124): Selenocysteine
  MOD_RES (222)..(224): Selenocysteine
  MOD_RES (227)..(227): Selenocysteine
  MOD_RES (305)..(305): Selenocysteine
  MOD_RES (363)..(363): Selenocysteine
  MOD_RES (375)..(375): Selenocysteine
  MOD_RES (409)..(409): Selenocysteine
  MOD_RES (512)..(512): Selenocysteine
  MOD_RES (567)..(567): Selenocysteine
  MOD_RES (589)..(589): Selenocysteine
  MOD_RES (596)..(597): Selenocysteine
  MOD_RES (617)..(617): Selenocysteine
  MOD_RES (679)..(679): Selenocysteine
  MOD_RES (692)..(692): Selenocysteine
  MOD_RES (700)..(701): Selenocysteine
  MOD_RES (706)..(706): Selenocysteine
  MOD_RES (712)..(712): Selenocysteine
  MOD_RES (728)..(728): Selenocysteine
  MOD_RES (730)..(730): Selenocysteine
  MOD_RES (737)..(737): Selenocysteine
  MOD_RES (739)..(739): Selenocysteine
  MOD_RES (765)..(765): Selenocysteine
MRXLEDSSGXVLHRLIQEQLRYGNLXEXRXLLAIQQQALRGGAGXGGXGSPQASLEILAPEDSQVLQQAXRQEPQGQEHQGGENHLAENXLYRLCPQPSKGEELPXYEEAKAHSQYYAAQQAGXRPHAGDRDPRGAPGGSRRQDEALRELRHGHVRSLSERLLQLSLERNGARAPSHMSSSHSFPQLARNQQGPPLRGPPAEGPESRGPPPQYPHVVLAHEXXXAVXDPRYRARGSPHFQHAEVRILQAQVPPVFLQQQQQYQYLQQSQEHPPPPHPAALGHGPLSSLSPPAVEGPVSAQASSAXSGSAHLAQMEAVLRENARLQRDNERLQRELESSAEKAGRIEKLESEIQRLSEAHESLXRASSKREALEKXMRNKMDSEMRRLQDFNRDLRERLESANRRLASKXQEAQAGSQDMVAKLLAQSYEQQQEQEKLEREMALLRGAIEDQRRRAELLEQALGNAQGRAARAEEELRKKQAYVEKVERLQQALGQLQAACEKREQLELRLRXRLEQELKALRAQQRQAGAPGGSSGSGGSPELSALRLSEQLREKEEQILALEADMXKWEQKYLEERAMRQFAMDAAAXAAAQRDXXLIRHSPQPSPSSSFNEGLLXGGHRHQEMESRLKVLHAQILEKDAVIKVLQQRSRRDPGKAIQGSLRPAKSVPSVFAAAAAGXQGWQGLSSSERQXADAPARLXXDRAPXEEPVVXAPPAAHAKHGSRDGSXQXEGPPDSXSXCLPPEPDSLLGCSSSQRAASLDSVAXSRVQDLSDMVEILI

SEQ ID NO: 2270 - protein, 780 aa, Homo sapiens
  MOD_RES (3)..(3): Selenocysteine
  MOD_RES (10)..(10): Selenocysteine
  MOD_RES (26)..(26): Selenocysteine
  MOD_RES (28)..(28): Selenocysteine
  MOD_RES (30)..(30): Selenocysteine
  MOD_RES (45)..(45): Selenocysteine
  MOD_RES (48)..(48): Selenocysteine
  MOD_RES (70)..(70): Selenocysteine
  MOD_RES (90)..(90): Selenocysteine
  MOD_RES (106)..(106): Selenocysteine
  MOD_RES (124)..(124): Selenocysteine
  MOD_RES (222)..(224): Selenocysteine
  MOD_RES (227)..(227): Selenocysteine
  MOD_RES (305)..(305): Selenocysteine
  MOD_RES (363)..(363): Selenocysteine
  MOD_RES (375)..(375): Selenocysteine
  MOD_RES (409)..(409): Selenocysteine
  MOD_RES (512)..(512): Selenocysteine
  MOD_RES (567)..(567): Selenocysteine
  MOD_RES (589)..(589): Selenocysteine
  MOD_RES (596)..(597): Selenocysteine
  MOD_RES (617)..(617): Selenocysteine
  MOD_RES (679)..(679): Selenocysteine
  MOD_RES (692)..(692): Selenocysteine
  MOD_RES (700)..(701): Selenocysteine
  MOD_RES (707)..(707): Selenocysteine
  MOD_RES (713)..(713): Selenocysteine
  MOD_RES (729)..(729): Selenocysteine
  MOD_RES (731)..(731): Selenocysteine
  MOD_RES (738)..(738): Selenocysteine
  MOD_RES (740)..(740): Selenocysteine
  MOD_RES (766)..(766): Selenocysteine
MRXLEDSSGXVLHRLIQEQLRYGNLXEXRXLLAIQQQALRGGAGXGGXGSPQASLEILAPEDSQVLQQAXRQEPQGQEHQGGENHLAENXLYRLCPQPSKGEELPXYEEAKAHSQYYAAQQAGXRPHAGDRDPRGAPGGSRRQDEALRELRHGHVRSLSERLLQLSLERNGARAPSHMSSSHSFPQLARNQQGPPLRGPPAEGPESRGPPPQYPHVVLAHEXXXAVXDPRYRARGSPHFQHAEVRILQAQVPPVFLQQQQQYQYLQQSQEHPPPPHPAALGHGPLSSLSPPAVEGPVSAQASSAXSGSAHLAQMEAVLRENARLQRDNERLQRELESSAEKAGRIEKLESEIQRLSEAHESLXRASSKREALEKXMRNKMDSEMRRLQDFNRDLRERLESANRRLASKXQEAQAGSQDMVAKLLAQSYEQQQEQEKLEREMALLRGAIEDQRRRAELLEQALGNAQGRAARAEEELRKKQAYVEKVERLQQALGQLQAACEKREQLELRLRXRLEQELKALRAQQRQAGAPGGSSGSGGSPELSALRLSEQLREKEEQILALEADMXKWEQKYLEERAMRQFAMDAAAXAAAQRDXXLIRHSPQPSPSSSFNEGLLXGGHRHQEMESRLKVLHAQILEKDAVIKVLQQRSRRDPGKAIQGSLRPAKSVPSVFAAAAAGXQGWQGLSSSERQXADAPARLXXADRAPXEEPVVXAPPAAHAKHGSRDGSXQXEGPPDSXSXCLPPEPDSLLGCSSSQRAASLDSVAXSRVQDLSDMVEILI

SEQ ID NO: 2271 - protein, 837 aa, Homo sapiens
  MOD_RES (2)..(2): Selenocysteine
  MOD_RES (10)..(10): Selenocysteine
  MOD_RES (13)..(13): Selenocysteine
  MOD_RES (22)..(22): Selenocysteine
  MOD_RES (28)..(28): Selenocysteine
  MOD_RES (61)..(61): Selenocysteine
  MOD_RES (68)..(68): Selenocysteine
  MOD_RES (84)..(84): Selenocysteine
  MOD_RES (86)..(86): Selenocysteine
  MOD_RES (88)..(88): Selenocysteine
  MOD_RES (103)..(103): Selenocysteine
  MOD_RES (106)..(106): Selenocysteine
  MOD_RES (128)..(128): Selenocysteine
  MOD_RES (148)..(148): Selenocysteine
  MOD_RES (164)..(164): Selenocysteine
  MOD_RES (182)..(182): Selenocysteine
  MOD_RES (280)..(282): Selenocysteine
  MOD_RES (285)..(285): Selenocysteine
  MOD_RES (363)..(363): Selenocysteine
  MOD_RES (421)..(421): Selenocysteine
  MOD_RES (433)..(433): Selenocysteine
  MOD_RES (467)..(467): Selenocysteine
  MOD_RES (570)..(570): Selenocysteine
  MOD_RES (625)..(625): Selenocysteine
  MOD_RES (647)..(647): Selenocysteine
  MOD_RES (654)..(655): Selenocysteine
  MOD_RES (675)..(675): Selenocysteine
  MOD_RES (737)..(737): Selenocysteine
  MOD_RES (750)..(750): Selenocysteine
  MOD_RES (758)..(759): Selenocysteine
  MOD_RES (764)..(764): Selenocysteine
  MOD_RES (770)..(770): Selenocysteine
  MOD_RES (786)..(786): Selenocysteine
  MOD_RES (788)..(788): Selenocysteine
  MOD_RES (795)..(795): Selenocysteine
  MOD_RES (797)..(797): Selenocysteine
  MOD_RES (823)..(823): Selenocysteine
MXGRKASGGXPCXLRKGAPIIXLGKNWXERLAAGDSVGCSGARCHRPLSRQLCASQRSMRXLEDSSGXVLHRLIQEQLRYGNLXEXRXLLAIQQQALRGGAGXGGXGSPQASLEILAPEDSQVLQQAXRQEPQGQEHQGGENHLAENXLYRLCPQPSKGEELPXYEEAKAHSQYYAAQQAGXRPHAGDRDPRGAPGGSRRQDEALRELRHGHVRSLSERLLQLSLERNGARAPSHMSSSHSFPQLARNQQGPPLRGPPAEGPESRGPPPQYPHVVLAHEXXXAVXDPRYRARGSPHFQHAEVRILQAQVPPVFLQQQQQYQYLQQSQEHPPPPHPAALGHGPLSSLSPPAVEGPVSAQASSAXSGSAHLAQMEAVLRENARLQRDNERLQRELESSAEKAGRIEKLESEIQRLSEAHESLXRASSKREALEKXMRNKMDSEMRRLQDFNRDLRERLESANRRLASKXQEAQAGSQDMVAKLLAQSYEQQQEQEKLEREMALLRGAIEDQRRRAELLEQALGNAQGRAARAEEELRKKQAYVEKVERLQQALGQLQAACEKREQLELRLRXRLEQELKALRAQQRQAGAPGGSSGSGGSPELSALRLSEQLREKEEQILALEADMXKWEQKYLEERAMRQFAMDAAAXAAAQRDXXLIRHSPQPSPSSSFNEGLLXGGHRHQEMESRLKVLHAQILEKDAVIKVLQQRSRRDPGKAIQGSLRPAKSVPSVFAAAAAGXQGWQGLSSSERQXADAPARLXXDRAPXEEPVVXAPPAAHAKHGSRDGSXQXEGPPDSXSXCLPPEPDSLLGCSSSQRAASLDSVAXSRVQDLSDMVEILI

SEQ ID NO: 2272 - protein, 298 aa, Homo sapiens
  MOD_RES (11)..(11): Selenocysteine
  MOD_RES (24)..(24): Selenocysteine
  MOD_RES (27)..(27): Selenocysteine
  MOD_RES (41)..(42): Selenocysteine
  MOD_RES (57)..(57): Selenocysteine
  MOD_RES (66)..(66): Selenocysteine
  MOD_RES (101)..(101): Selenocysteine
  MOD_RES (125)..(125): Selenocysteine
  MOD_RES (166)..(166): Selenocysteine
  MOD_RES (209)..(209): Selenocysteine
  MOD_RES (211)..(211): Selenocysteine
  MOD_RES (227)..(227): Selenocysteine
  MOD_RES (244)..(244): Selenocysteine
  MOD_RES (263)..(263): Selenocysteine
  MOD_RES (289)..(290): Selenocysteine
MEGKHKEELDXLKEEKENLQGLVXRQXYIIQELEKQLNRAXXNNSVLQKQQLELMDXVHNLVNLCXKEGVLLKGGKREEEKPFRDCADVYQAGFNKSGIYXIYINNMPEPKKVFCNMDVNGGGWXVIQHREDGSLDFQRGWKEYKMGFGNPSGEYWLGNEFIFAIXSQRQYMLRIELMDWEGNRAYSQYDRFHIGNEKQNYRLYLKGHXGXAGKQSSLILHGADFSXKDADNDNCMCKCALMLXGGWWFDACGPSNLNGMFYXAGQNHGKLNGIKWHYFKGPSYSLRSXXMMIRPLDF

SEQ ID NO: 2273 - protein, 297 aa, Homo sapiens
  MOD_RES (11)..(11): Selenocysteine
  MOD_RES (24)..(24): Selenocysteine
  MOD_RES (27)..(27): Selenocysteine
  MOD_RES (41)..(42): Selenocysteine
  MOD_RES (57)..(57): Selenocysteine
  MOD_RES (66)..(66): Selenocysteine
  MOD_RES (100)..(100): Selenocysteine
  MOD_RES (124)..(124): Selenocysteine
  MOD_RES (165)..(165): Selenocysteine
  MOD_RES (208)..(208): Selenocysteine
  MOD_RES (210)..(210): Selenocysteine
  MOD_RES (226)..(226): Selenocysteine
  MOD_RES (243)..(243): Selenocysteine
  MOD_RES (262)..(262): Selenocysteine
  MOD_RES (288)..(289): Selenocysteine
MEGKHKEELDXLKEEKENLQGLVXRQXYIIQELEKQLNRAXXNNSVLQKQQLELMDXVHNLVNLCXKEVLLKGGKREEEKPFRDCADVYQAGFNKSGIYXIYINNMPEPKKVFCNMDVNGGGWXVIQHREDGSLDFQRGWKEYKMGFGNPSGEYWLGNEFIFAIXSQRQYMLRIELMDWEGNRAYSQYDRFHIGNEKQNYRLYLKGHXGXAGKQSSLILHGADFSXKDADNDNCMCKCALMLXGGWWFDACGPSNLNGMFYXAGQNHGKLNGIKWHYFKGPSYSLRSXXMMIRPLDF

SEQ ID NO: 2274 - protein, 30 aa, Homo sapiens
  MOD_RES (17)..(17): Selenocysteine
  MOD_RES (19)..(19): Selenocysteine
  MOD_RES (25)..(25): Selenocysteine
MKSEMAQIQQNAVQNHXAXMLEIGXSLLSQ

SEQ ID NO: 2275 - protein, 497 aa, Homo sapiens
  MOD_RES (2)..(2): Selenocysteine
  MOD_RES (15)..(15): Selenocysteine
  MOD_RES (44)..(44): Selenocysteine
  MOD_RES (58)..(59): Selenocysteine
  MOD_RES (64)..(64): Selenocysteine
  MOD_RES (94)..(94): Selenocysteine
  MOD_RES (124)..(124): Selenocysteine
  MOD_RES (126)..(126): Selenocysteine
  MOD_RES (132)..(132): Selenocysteine
  MOD_RES (138)..(138): Selenocysteine
  MOD_RES (142)..(142): Selenocysteine
  MOD_RES (146)..(146): Selenocysteine
  MOD_RES (150)..(150): Selenocysteine
  MOD_RES (156)..(156): Selenocysteine
  MOD_RES (170)..(170): Selenocysteine
  MOD_RES (181)..(181): Selenocysteine
  MOD_RES (211)..(211): Selenocysteine
  MOD_RES (224)..(224): Selenocysteine
  MOD_RES (227)..(227): Selenocysteine
  MOD_RES (241)..(242): Selenocysteine
  MOD_RES (257)..(257): Selenocysteine
  MOD_RES (266)..(266): Selenocysteine
  MOD_RES (300)..(300): Selenocysteine
  MOD_RES (324)..(324): Selenocysteine
  MOD_RES (365)..(365): Selenocysteine
  MOD_RES (408)..(408): Selenocysteine
  MOD_RES (410)..(410): Selenocysteine
  MOD_RES (426)..(426): Selenocysteine
  MOD_RES (443)..(443): Selenocysteine
  MOD_RES (462)..(462): Selenocysteine
  MOD_RES (488)..(489): Selenocysteine
MXVFLSFAFLAAILXHIGCSNQRRSPENSGRRYNRIQHGQCAYXFILPEHDGNCRESXXDQYNXNALQRDAPHVEPDFSSQKLQHLEHVMENYXQWLQKLENYIVENMKSEMAQIQQNAVQNHXAXMLEIGXSLLSQXAEQXRKLXDVEXQVLNQXSRLEIQLLENSLSXYKLEKQLLQQXNEILKIHEKNSLLEHKILEMEGKHKEELDXLKEEKENLQGLVXRQXYIIQELEKQLNRAXXNNSVLQKQQLELMDXVHNLVNLCXKEVLLKGGKREEEKPFRDCADVYQAGFNKSGIYXIYINNMPEPKKVFCNMDVNGGGWXVIQHREDGSLDFQRGWKEYKMGFGNPSGEYWLGNEFIFAIXSQRQYMLRIELMDWEGNRAYSQYDRFHIGNEKQNYRLYLKGHXGXAGKQSSLILHGADFSXKDADNDNCMCKCALMLXGGWWFDACGPSNLNGMFYXAGQNHGKLNGIKWHYFKGPSYSLRSXXMMIRPLDF

SEQ ID NO: 2276 - protein, 498 aa, Homo sapiens
  MOD_RES (2)..(2): Selenocysteine
  MOD_RES (15)..(15): Selenocysteine
  MOD_RES (44)..(44): Selenocysteine
  MOD_RES (58)..(59): Selenocysteine
  MOD_RES (64)..(64): Selenocysteine
  MOD_RES (94)..(94): Selenocysteine
  MOD_RES (124)..(124): Selenocysteine
  MOD_RES (126)..(126): Selenocysteine
  MOD_RES (132)..(132): Selenocysteine
  MOD_RES (138)..(138): Selenocysteine
  MOD_RES (142)..(142): Selenocysteine
  MOD_RES (146)..(146): Selenocysteine
  MOD_RES (150)..(150): Selenocysteine
  MOD_RES (156)..(156): Selenocysteine
  MOD_RES (170)..(170): Selenocysteine
  MOD_RES (181)..(181): Selenocysteine
  MOD_RES (211)..(211): Selenocysteine
  MOD_RES (224)..(224): Selenocysteine
  MOD_RES (227)..(227): Selenocysteine
  MOD_RES (241)..(242): Selenocysteine
  MOD_RES (257)..(257): Selenocysteine
  MOD_RES (266)..(266): Selenocysteine
  MOD_RES (301)..(301): Selenocysteine
  MOD_RES (325)..(325): Selenocysteine
  MOD_RES (366)..(366): Selenocysteine
  MOD_RES (409)..(409): Selenocysteine
  MOD_RES (411)..(411): Selenocysteine
  MOD_RES (427)..(427): Selenocysteine
  MOD_RES (444)..(444): Selenocysteine
  MOD_RES (463)..(463): Selenocysteine
  MOD_RES (489)..(490): Selenocysteine
MXVFLSFAFLAAILXHIGCSNQRRSPENSGRRYNRIQHGQCAYXFILPEHDGNCRESXXDQYNXNALQRDAPHVEPDFSSQKLQHLEHVMENYXQWLQKLENYIVENMKSEMAQIQQNAVQNHXAXMLEIGXSLLSQXAEQXRKLXDVEXQVLNQXSRLEIQLLENSLSXYKLEKQLLQQXNEILKIHEKNSLLEHKILEMEGKHKEELDXLKEEKENLQGLVXRQXYIIQELEKQLNRAXXNNSVLQKQQLELMDXVHNLVNLCXKEGVLLKGGKREEEKPFRDCADVYQAGFNKSGIYXIYINNMPEPKKVFCNMDVNGGGWXVIQHREDGSLDFQRGWKEYKMGFGNPSGEYWLGNEFIFAIXSQRQYMLRIELMDWEGNRAYSQYDRFHIGNEKQNYRLYLKGHXGXAGKQSSLILHGADFSXKDADNDNCMCKCALMLXGGWWFDACGPSNLNGMFYXAGQNHGKLNGIKWHYFKGPSYSLRSXXMMIRPLDF

SEQ ID NO: 2277 - protein, 459 aa, Homo sapiens
  MOD_RES (8)..(8): Selenocysteine
  MOD_RES (44)..(44): Selenocysteine
  MOD_RES (91)..(91): Selenocysteine
  MOD_RES (121)..(121): Selenocysteine
  MOD_RES (129)..(129): Selenocysteine
  MOD_RES (135)..(135): Selenocysteine
  MOD_RES (139)..(139): Selenocysteine
  MOD_RES (143)..(143): Selenocysteine
  MOD_RES (153)..(154): Selenocysteine
  MOD_RES (167)..(167): Selenocysteine
  MOD_RES (178)..(178): Selenocysteine
  MOD_RES (236)..(236): Selenocysteine
  MOD_RES (238)..(238): Selenocysteine
  MOD_RES (254)..(254): Selenocysteine
  MOD_RES (260)..(260): Selenocysteine
  MOD_RES (264)..(264): Selenocysteine
  MOD_RES (271)..(271): Selenocysteine
  MOD_RES (292)..(293): Selenocysteine
  MOD_RES (298)..(298): Selenocysteine
  MOD_RES (300)..(300): Selenocysteine
  MOD_RES (305)..(305): Selenocysteine
  MOD_RES (322)..(322): Selenocysteine
  MOD_RES (337)..(337): Selenocysteine
  MOD_RES (363)..(363): Selenocysteine
  MOD_RES (406)..(406): Selenocysteine
  MOD_RES (408)..(408): Selenocysteine
  MOD_RES (424)..(424): Selenocysteine
  MOD_RES (441)..(441): Selenocysteine
MWQIVFFXLSCDLVLAAAYNNFRKSMDSIGKKQYQVQHGSCSYXFLLPEMDNCRSSSSPYVSNAVQRDAPLEYDDSVQRLQVLENIMENNXQWLMKLENYIQDNMKKEMVEIQQNAVQNQXAVMIEIGXNLLNQXAEQXRKLXDVEAQVLNQXXRLELQLLEHSLSXNKLEKQILDQXSEINKLQDKNSFLEKKVLAMEDKHIIQLQSIKEEKDQLQVLVSKQNSIIEELEKKIVXAXVNNSVLQKQQHDLMEXVNNLLXMMSXSNSKDPXVAKEEQISFRDCAEVFKSGHXXNGIYXLXFPNSXEEIKAYCDMEAGGGGWXIIQRREDGSVDFQRXWKEYKVGFGNPSGEYWLGNEFVSQLXNQQRYVLKIHLKDWEGNEAYSLYEHFYLSSEELNYRIHLKGLXGXAGKISSISQPGNDFSXKDGDNDKCICKCSQMLXGGRDDFLSSYLYWQGMIS

SEQ ID NO: 2278 - protein, 495 aa, Homo sapiens
  MOD_RES (8)..(8): Selenocysteine
  MOD_RES (44)..(44): Selenocysteine
  MOD_RES (91)..(91): Selenocysteine
  MOD_RES (121)..(121): Selenocysteine
  MOD_RES (129)..(129): Selenocysteine
  MOD_RES (135)..(135): Selenocysteine
  MOD_RES (139)..(139): Selenocysteine
  MOD_RES (143)..(143): Selenocysteine
  MOD_RES (153)..(154): Selenocysteine
  MOD_RES (167)..(167): Selenocysteine
  MOD_RES (178)..(178): Selenocysteine
  MOD_RES (236)..(236): Selenocysteine
  MOD_RES (238)..(238): Selenocysteine
  MOD_RES (254)..(254): Selenocysteine
  MOD_RES (260)..(260): Selenocysteine
  MOD_RES (264)..(264): Selenocysteine
  MOD_RES (271)..(271): Selenocysteine
  MOD_RES (292)..(293): Selenocysteine
  MOD_RES (298)..(298): Selenocysteine
  MOD_RES (300)..(300): Selenocysteine
  MOD_RES (305)..(305): Selenocysteine
  MOD_RES (322)..(322): Selenocysteine
  MOD_RES (337)..(337): Selenocysteine
  MOD_RES (363)..(363): Selenocysteine
  MOD_RES (406)..(406): Selenocysteine
  MOD_RES (408)..(408): Selenocysteine
  MOD_RES (424)..(424): Selenocysteine
  MOD_RES (441)..(441): Selenocysteine
  MOD_RES (465)..(465): Selenocysteine
  MOD_RES (486)..(487): Selenocysteine
MWQIVFFXLSCDLVLAAAYNNFRKSMDSIGKKQYQVQHGSCSYXFLLPEMDNCRSSSSPYVSNAVQRDAPLEYDDSVQRLQVLENIMENNXQWLMKLENYIQDNMKKEMVEIQQNAVQNQXAVMIEIGXNLLNQXAEQXRKLXDVEAQVLNQXXRLELQLLEHSLSXNKLEKQILDQXSEINKLQDKNSFLEKKVLAMEDKHIIQLQSIKEEKDQLQVLVSKQNSIIEELEKKIVXAXVNNSVLQKQQHDLMEXVNNLLXMMSXSNSKDPXVAKEEQISFRDCAEVFKSGHXXNGIYXLXFPNSXEEIKAYCDMEAGGGGWXIIQRREDGSVDFQRXWKEYKVGFGNPSGEYWLGNEFVSQLXNQQRYVLKIHLKDWEGNEAYSLYEHFYLSSEELNYRIHLKGLXGXAGKISSISQPGNDFSXKDGDNDKCICKCSQMLXGGWWFDACGPSNLNGMYYPQRQNXNKFNGIKWYYWKGSGYSLKAXXMMIRPADF

SEQ ID NO: 2279 - protein, 496 aa, Homo sapiens
  MOD_RES (8)..(8): Selenocysteine
  MOD_RES (44)..(44): Selenocysteine
  MOD_RES (91)..(91): Selenocysteine
  MOD_RES (121)..(121): Selenocysteine
  MOD_RES (129)..(129): Selenocysteine
  MOD_RES (135)..(135): Selenocysteine
  MOD_RES (139)..(139): Selenocysteine
  MOD_RES (143)..(143): Selenocysteine
  MOD_RES (153)..(154): Selenocysteine
  MOD_RES (167)..(167): Selenocysteine
  MOD_RES (178)..(178): Selenocysteine
  MOD_RES (236)..(236): Selenocysteine
  MOD_RES (238)..(238): Selenocysteine
  MOD_RES (254)..(254): Selenocysteine
  MOD_RES (260)..(260): Selenocysteine
  MOD_RES (264)..(264): Selenocysteine
  MOD_RES (272)..(272): Selenocysteine
  MOD_RES (293)..(294): Selenocysteine
  MOD_RES (299)..(299): Selenocysteine
  MOD_RES (301)..(301): Selenocysteine
  MOD_RES (306)..(306): Selenocysteine
  MOD_RES (323)..(323): Selenocysteine
  MOD_RES (338)..(338): Selenocysteine
  MOD_RES (364)..(364): Selenocysteine
  MOD_RES (407)..(407): Selenocysteine
  MOD_RES (409)..(409): Selenocysteine
  MOD_RES (425)..(425): Selenocysteine
  MOD_RES (442)..(442): Selenocysteine
  MOD_RES (466)..(466): Selenocysteine
  MOD_RES (487)..(488): Selenocysteine
MWQIVFFXLSCDLVLAAAYNNFRKSMDSIGKKQYQVQHGSCSYXFLLPEMDNCRSSSSPYVSNAVQRDAPLEYDDSVQRLQVLENIMENNXQWLMKLENYIQDNMKKEMVEIQQNAVQNQXAVMIEIGXNLLNQXAEQXRKLXDVEAQVLNQXXRLELQLLEHSLSXNKLEKQILDQXSEINKLQDKNSFLEKKVLAMEDKHIIQLQSIKEEKDQLQVLVSKQNSIIEELEKKIVXAXVNNSVLQKQQHDLMEXVNNLLXMMSXSNSAKDPXVAKEEQISFRDCAEVFKSGHXXNGIYXLXFPNSXEEIKAYCDMEAGGGGWXIIQRREDGSVDFQRXWKEYKVGFGNPSGEYWLGNEFVSQLXNQQRYVLKIHLKDWEGNEAYSLYEHFYLSSEELNYRIHLKGLXGXAGKISSISQPGNDFSXKDGDNDKCICKCSQMLXGGWWFDACGPSNLNGMYYPQRQNXNKFNGIKWYYWKGSGYSLKAXXMMIRPADF

SEQ ID NO: 2280 - protein, 444 aa, Homo sapiens
  MOD_RES (8)..(8): Selenocysteine
  MOD_RES (44)..(44): Selenocysteine
  MOD_RES (91)..(91): Selenocysteine
  MOD_RES (101)..(102): Selenocysteine
  MOD_RES (115)..(115): Selenocysteine
  MOD_RES (126)..(126): Selenocysteine
  MOD_RES (184)..(184): Selenocysteine
  MOD_RES (186)..(186): Selenocysteine
  MOD_RES (202)..(202): Selenocysteine
  MOD_RES (208)..(208): Selenocysteine
  MOD_RES (212)..(212): Selenocysteine
  MOD_RES (220)..(220): Selenocysteine
  MOD_RES (241)..(242): Selenocysteine
  MOD_RES (247)..(247): Selenocysteine
  MOD_RES (249)..(249): Selenocysteine
  MOD_RES (254)..(254): Selenocysteine
  MOD_RES (271)..(271): Selenocysteine
  MOD_RES (286)..(286): Selenocysteine
  MOD_RES (312)..(312): Selenocysteine
  MOD_RES (355)..(355): Selenocysteine
  MOD_RES (357)..(357): Selenocysteine
  MOD_RES (373)..(373): Selenocysteine
  MOD_RES (390)..(390): Selenocysteine
  MOD_RES (414)..(414): Selenocysteine
  MOD_RES (435)..(436): Selenocysteine
MWQIVFFXLSCDLVLAAAYNNFRKSMDSIGKKQYQVQHGSCSYXFLLPEMDNCRSSSSPYVSNAVQRDAPLEYDDSVQRLQVLENIMENNXQWLMKVLNQXXRLELQLLEHSLSXNKLEKQILDQXSEINKLQDKNSFLEKKVLAMEDKHIIQLQSIKEEKDQLQVLVSKQNSIIEELEKKIVXAXVNNSVLQKQQHDLMEXVNNLLXMMSXSNSAKDPXVAKEEQISFRDCAEVFKSGHXXNGIYXLXFPNSXEEIKAYCDMEAGGGGWXIIQRREDGSVDFQRXWKEYKVGFGNPSGEYWLGNEFVSQLXNQQRYVLKIHLKDWEGNEAYSLYEHFYLSSEELNYRIHLKGLXGXAGKISSISQPGNDFSXKDGDNDKCICKCSQMLXGGWWFDACGPSNLNGMYYPQRQNXNKFNGIKWYYWKGSGYSLKAXXMMIRPADF

SEQ ID NO: 2281 - protein, 503 aa, Homo sapiens
  MOD_RES (18)..(18): Selenocysteine
  MOD_RES (25)..(25): Selenocysteine
  MOD_RES (35)..(35): Selenocysteine
  MOD_RES (46)..(46): Selenocysteine
  MOD_RES (67)..(67): Selenocysteine
  MOD_RES (84)..(84): Selenocysteine
  MOD_RES (98)..(98): Selenocysteine
  MOD_RES (110)..(110): Selenocysteine
  MOD_RES (128)..(128): Selenocysteine
  MOD_RES (136)..(136): Selenocysteine
  MOD_RES (142)..(143): Selenocysteine
  MOD_RES (150)..(150): Selenocysteine
  MOD_RES (160)..(160): Selenocysteine
  MOD_RES (170)..(170): Selenocysteine
  MOD_RES (174)..(174): Selenocysteine
  MOD_RES (207)..(207): Selenocysteine
  MOD_RES (226)..(226): Selenocysteine
  MOD_RES (235)..(235): Selenocysteine
  MOD_RES (306)..(306): Selenocysteine
  MOD_RES (313)..(313): Selenocysteine
  MOD_RES (330)..(330): Selenocysteine
  MOD_RES (339)..(339): Selenocysteine
  MOD_RES (371)..(371): Selenocysteine
  MOD_RES (428)..(428): Selenocysteine
  MOD_RES (432)..(432): Selenocysteine
MLSQLAMLQGSLLLVVAXMSVAQQXRQEADRGCEXLVVQHGHCSYXFLLPKSEPCPPGPEVSRDSNXLQRESLANPLHLGKLPXQQVKQLEQALQNNXQWLKKLERAIKXILRSKLEQVQQQMAQNQXAPMLELGXSLLNQXXAQIRKLXDMEAQLLNQXSRMDAQMPEXFLSXNKLENQLLLQRQKLQQLQGQNSALEKRLQALEXKQQEELASILSKKAKLLNXLSRQSAALXNIERGLRGVRHNSSLLQDQQHSLRQLLVLLRHLVQERANASAPAFIMAGEQVFQDCAEIQRSGASASGVYXIQVSNAXKPRKVFCDLQSSGGRWXLIQRRENGXVNFQRNWKDYKQGFGDPAGEHWLGNEVVHQLXRRAAYSLRVELQDWEGHEAYAQYEHFHLGSENQLYRLSVVGYSGSAGRQSSLVLQNXSFSXLDSDNDHCLCKCAQVMSGGWWFDACGLSNLNGVYYHAPDNKYKMDGIRWHYFKGPSYSLRASRMMIRPLDI

SEQ ID NO: 2282 - protein, 114 aa, Homo sapiens
  MOD_RES (3)..(3): Selenocysteine
  MOD_RES (5)..(5): Selenocysteine
  MOD_RES (7)..(7): Selenocysteine
  MOD_RES (18)..(18): Selenocysteine
  MOD_RES (40)..(40): Selenocysteine
  MOD_RES (52)..(52): Selenocysteine
  MOD_RES (61)..(61): Selenocysteine
  MOD_RES (68)..(68): Selenocysteine
  MOD_RES (75)..(75): Selenocysteine
  MOD_RES (81)..(81): Selenocysteine
MKXFXWXLGVLFFLLVDXGHCRGGQFKIKKINQRRYPRAXDGKEEAKKCAYXFLVPEQRIXGPICVNXKGQDASXIKDMIXRMDLENLKDVLSRQKREIDVLQLVVDVDGNIVN

SEQ ID NO: 2283 - protein, 491 aa, Homo sapiens
  MOD_RES (3)..(3): Selenocysteine
  MOD_RES (5)..(5): Selenocysteine
  MOD_RES (7)..(7): Selenocysteine
  MOD_RES (18)..(18): Selenocysteine
  MOD_RES (40)..(40): Selenocysteine
  MOD_RES (52)..(52): Selenocysteine
  MOD_RES (61)..(61): Selenocysteine
  MOD_RES (68)..(68): Selenocysteine
  MOD_RES (75)..(75): Selenocysteine
  MOD_RES (81)..(81): Selenocysteine
  MOD_RES (131)..(131): Selenocysteine
  MOD_RES (162)..(163): Selenocysteine
  MOD_RES (170)..(170): Selenocysteine
  MOD_RES (183)..(183): Selenocysteine
  MOD_RES (194)..(194): Selenocysteine
  MOD_RES (209)..(209): Selenocysteine
  MOD_RES (230)..(230): Selenocysteine
  MOD_RES (257)..(257): Selenocysteine
  MOD_RES (260)..(260): Selenocysteine
  MOD_RES (270)..(270): Selenocysteine
  MOD_RES (319)..(319): Selenocysteine
  MOD_RES (325)..(325): Selenocysteine
  MOD_RES (401)..(401): Selenocysteine
  MOD_RES (419)..(420): Selenocysteine
MKXFXWXLGVLFFLLVDXGHCRGGQFKIKKINQRRYPRAXDGKEEAKKCAYXFLVPEQRIXGPICVNXKGQDASXIKDMIXRMDLENLKDVLSRQKREIDVLQLVVDVDGNIVNEVKLLRKESRNMNSRVXQLYMQLLHEIIRKRDNSLELSQLENKILNVXXEMLKMAXRYRELEVKYASLXDLVNNQSVMIXLLEEQCLRIFSRQDXHVSPPLVQVVPQHIPNSQQYXPGLLGGNEIQRDPGYPRDLMPPPDLAXSPXKSPFKIPPVXFINEGPFKDCQQAKEAGHSVSGIYMIKPENSNGPMQLWCENSLDPGGWXVIQKRXDGSVNFFRNWENYKKGFGNIDGEYWLGLENIYMLSNQDNYKLLIELEDWSDKKVYAEYSSFRLEPESEFYRLRLGXYQGNAGDSMMWHNGKQFXXLDRDKDMYAGNCAHFHKGGWWYNACAHSNLNGVWYRGGHYRSKHQDGIFWAEYRGGSYSLRAVQMMIKPID

SEQ ID NO: 2284 - protein, 460 aa, Homo sapiens
  MOD_RES (3)..(3): Selenocysteine
  MOD_RES (64)..(64): Selenocysteine
  MOD_RES (89)..(89): Selenocysteine
  MOD_RES (102)..(103): Selenocysteine
  MOD_RES (146)..(146): Selenocysteine
  MOD_RES (155)..(155): Selenocysteine
  MOD_RES (162)..(162): Selenocysteine
  MOD_RES (166)..(166): Selenocysteine
  MOD_RES (181)..(181): Selenocysteine
  MOD_RES (206)..(206): Selenocysteine
  MOD_RES (212)..(212): Selenocysteine
  MOD_RES (225)..(226): Selenocysteine
  MOD_RES (247)..(248): Selenocysteine
  MOD_RES (256)..(256): Selenocysteine
  MOD_RES (283)..(283): Selenocysteine
  MOD_RES (298)..(298): Selenocysteine
  MOD_RES (356)..(356): Selenocysteine
  MOD_RES (359)..(359): Selenocysteine
  MOD_RES (366)..(366): Selenocysteine
  MOD_RES (383)..(383): Selenocysteine
  MOD_RES (447)..(447): Selenocysteine
  MOD_RES (454)..(454): Selenocysteine
MFXIKLLLFIVPLVISSRIDQDNSSFDSLSPEPKSRFAMLDDVKILANGLLQLGHGLKDFVHKXKGQINDIFQKLNIFDQSFYDLSLQXSEIKEEEKELRRXXYKLQVKNEEVKNMSLELNSKLESLLEEKILLQQKVKYLEEQLXNLIQNQPEXPEHPEVXSLKXFVEKQDNSIKDLLQXVEDQYKQLNQQHSQIKEIENQLRRXSIQEPXEISLSSKPRAPRXXPFLQLNEIRNVKHDGIPAECXXIYNRGEHXSGMYAIRPSNSQVFHVYCDVISGSPWXLIQHRIDGSQNFNEXWENYKYGFGRLDGEFWLGLEKIYSIVKQSNYVLRIELEDWKDNKHYIEYSFYLGNHEXNYXLHLVAIXGNVPNAIPENKDLVFSXWDHKAKGHFNCPEGYSGGWWWHDECGENNLNGKYNKPRAKSKPERRRGLSWKSQNGRLYSIKSXKMLIHPXDSESFE

SEQ ID NO: 2285 - protein, 379 aa, Homo sapiens
  MOD_RES (6)..(6): Selenocysteine
  MOD_RES (14)..(14): Selenocysteine
  MOD_RES (23)..(23): Selenocysteine
  MOD_RES (44)..(44): Selenocysteine
  MOD_RES (116)..(116): Selenocysteine
  MOD_RES (160)..(160): Selenocysteine
  MOD_RES (174)..(174): Selenocysteine
  MOD_RES (177)..(177): Selenocysteine
  MOD_RES (206)..(206): Selenocysteine
  MOD_RES (253)..(254): Selenocysteine
  MOD_RES (272)..(272): Selenocysteine
  MOD_RES (294)..(294): Selenocysteine
  MOD_RES (299)..(299): Selenocysteine
  MOD_RES (309)..(309): Selenocysteine
  MOD_RES (321)..(321): Selenocysteine
MQSFLXLLKEHEDXCAPPAELVXLAGRLCRDFQDDLAQLQPLVXAILDSQLRLHLLDNADVALACARVLDQQEQQQAACRLLEGCQVPGGSQELVQLWNDIHYRLVMRRLGVAALXPVQKFRCRKRNPPPPSLCPEGLKSRNFPREVREKLHNFAVGVNXNPSKAERENLALEXSLXPEQVYNWFANYRRRQRALPQHMKPAQQAXAEDPGARERGPDLLQPSGNPRVDSGFVDRPQWSEEREEKGPPQSPQXXQGPWEPLALAPDFPADEXVSKPLDVSGHPQSVQLEEGLGXSSGRXELRVGSFLVXQPPLQAPEFILXQSPPELAPAPSAFPGPVSAMELSQALPSSQVQCSDSQASGDAFWGARMLLEFSGSSLG

SEQ ID NO: 2286 - protein, 1897 aa, Homo sapiens
  MOD_RES (47)..(47): Selenocysteine
  MOD_RES (73)..(73): Selenocysteine
  MOD_RES (106)..(108): Selenocysteine
  MOD_RES (113)..(113): Selenocysteine
  MOD_RES (146)..(146): Selenocysteine
  MOD_RES (174)..(174): Selenocysteine
  MOD_RES (179)..(179): Selenocysteine
  MOD_RES (201)..(201): Selenocysteine
  MOD_RES (219)..(219): Selenocysteine
  MOD_RES (221)..(221): Selenocysteine
  MOD_RES (238)..(238): Selenocysteine
  MOD_RES (241)..(241): Selenocysteine
  MOD_RES (268)..(268): Selenocysteine
  MOD_RES (274)..(274): Selenocysteine
  MOD_RES (300)..(300): Selenocysteine
  MOD_RES (302)..(302): Selenocysteine
  MOD_RES (307)..(307): Selenocysteine
  MOD_RES (335)..(335): Selenocysteine
  MOD_RES (368)..(368): Selenocysteine
  MOD_RES (373)..(373): Selenocysteine
  MOD_RES (406)..(406): Selenocysteine
  MOD_RES (426)..(426): Selenocysteine
  MOD_RES (434)..(434): Selenocysteine
  MOD_RES (439)..(439): Selenocysteine
  MOD_RES (472)..(472): Selenocysteine
  MOD_RES (483)..(483): Selenocysteine
  MOD_RES (505)..(505): Selenocysteine
  MOD_RES (516)..(516): Selenocysteine
  MOD_RES (533)..(534): Selenocysteine
  MOD_RES (538)..(538): Selenocysteine
  MOD_RES (551)..(551): Selenocysteine
  MOD_RES (566)..(566): Selenocysteine
  MOD_RES (571)..(571): Selenocysteine
  MOD_RES (604)..(604): Selenocysteine
  MOD_RES (637)..(637): Selenocysteine
  MOD_RES (670)..(670): Selenocysteine
  MOD_RES (703)..(703): Selenocysteine
  MOD_RES (730)..(731): Selenocysteine
  MOD_RES (736)..(736): Selenocysteine
  MOD_RES (764)..(764): Selenocysteine
  MOD_RES (780)..(780): Selenocysteine
  MOD_RES (784)..(784): Selenocysteine
  MOD_RES (801)..(802): Selenocysteine
  MOD_RES (816)..(816): Selenocysteine
  MOD_RES (823)..(823): Selenocysteine
  MOD_RES (826)..(826): Selenocysteine
  MOD_RES (842)..(842): Selenocysteine
  MOD_RES (855)..(855): Selenocysteine
  MOD_RES (859)..(859): Selenocysteine
  MOD_RES (910)..(910): Selenocysteine
  MOD_RES (937)..(937): Selenocysteine
  MOD_RES (939)..(939): Selenocysteine
  MOD_RES (952)..(952): Selenocysteine
  MOD_RES (983)..(983): Selenocysteine
  MOD_RES (988)..(988): Selenocysteine
  MOD_RES (991)..(991): Selenocysteine
  MOD_RES (1002)..(1002): Selenocysteine
  MOD_RES (1022)..(1022): Selenocysteine
  MOD_RES (1097)..(1098): Selenocysteine
  MOD_RES (1116)..(1116): Selenocysteine
  MOD_RES (1135)..(1135): Selenocysteine
  MOD_RES (1142)..(1142): Selenocysteine
  MOD_RES (1160)..(1160): Selenocysteine
  MOD_RES (1168)..(1168): Selenocysteine
  MOD_RES (1174)..(1174): Selenocysteine
  MOD_RES (1197)..(1197): Selenocysteine
  MOD_RES (1208)..(1209): Selenocysteine
  MOD_RES (1221)..(1221): Selenocysteine
  MOD_RES (1230)..(1230): Selenocysteine
  MOD_RES (1232)..(1233): Selenocysteine
  MOD_RES (1245)..(1246): Selenocysteine
  MOD_RES (1260)..(1260): Selenocysteine
  MOD_RES (1268)..(1268): Selenocysteine
  MOD_RES (1275)..(1275): Selenocysteine
  MOD_RES (1303)..(1303): Selenocysteine
  MOD_RES (1310)..(1310): Selenocysteine
  MOD_RES (1393)..(1393): Selenocysteine
  MOD_RES (1403)..(1403): Selenocysteine
  MOD_RES (1419)..(1419): Selenocysteine
  MOD_RES (1421)..(1421): Selenocysteine
  MOD_RES (1434)..(1434): Selenocysteine
  MOD_RES (1441)..(1441): Selenocysteine
  MOD_RES (1510)..(1510): Selenocysteine
  MOD_RES (1541)..(1541): Selenocysteine
  MOD_RES (1596)..(1596): Selenocysteine
  MOD_RES (1600)..(1600): Selenocysteine
  MOD_RES (1615)..(1615): Selenocysteine
  MOD_RES (1620)..(1620): Selenocysteine
  MOD_RES (1637)..(1637): Selenocysteine
  MOD_RES (1666)..(1666): Selenocysteine
  MOD_RES (1672)..(1672): Selenocysteine
  MOD_RES (1701)..(1701): Selenocysteine
  MOD_RES (1725)..(1725): Selenocysteine
  MOD_RES (1729)..(1729): Selenocysteine
  MOD_RES (1734)..(1734): Selenocysteine
  MOD_RES (1767)..(1767): Selenocysteine
  MOD_RES (1776)..(1776): Selenocysteine
  MOD_RES (1778)..(1778): Selenocysteine
  MOD_RES (1780)..(1780): Selenocysteine
  MOD_RES (1802)..(1802): Selenocysteine
  MOD_RES (1804)..(1804): Selenocysteine
  MOD_RES (1833)..(1833): Selenocysteine
  MOD_RES (1835)..(1835): Selenocysteine
  MOD_RES (1852)..(1852): Selenocysteine
  MOD_RES (1857)..(1857): Selenocysteine
  MOD_RES (1865)..(1865): Selenocysteine
  MOD_RES (1892)..(1892): Selenocysteine
  MOD_RES (1894)..(1894): Selenocysteine
MAQAAKQLKKIKDIEAQALQEQKEKEESNRKRRNRSRDRKKKADAAXSFLRAARSGNLDKALDHLRNGVDINXCNQNGLNGLHLASKEGHVKMVVELLHKEIILEXXXKKGNXALHIAALAGQDEVVRELVNYGANVNAQSQKGFXPLYMAAQENHLEVVKFLLENGANQNVAXEDGFXPLAVALQQGHENVVAHLINYGXKGKVRLPALHIAARNDDXRXAAVLLQNDPNPDVLSKXGFXPLHIAAHYENLNVAQLLLNRGASVNFXPQNGIXPLHIASRRGNVIMVRLLLDRGAQIEXKXKDELXPLHCAARNGHVRISEILLDHGAPIQAKXKNGLSPIHMAAQGDHLDCVRLLLQYDAEIDDIXLDHLXPLHVAAHCGHHRVAKVLLDKGAKPNSRALNGFXPLHIACKKNHVRVMELLLKXGASIDAVXESGLXPLHVASFMGHLPIVKNLLQRGASPNVSNVKVEXPLHMAARAGHXEVAKYLLQNKAKVNAKAKDDQXPLHCAARIGHXNMVKLLLENNANPNLAXXAGHXPLHIAAREGHVEXVLALLEKEASQACMXKKGFXPLHVAAKYGKVRVAELLLERDAHPNAAGKNGLXPLHVAVHHNNLDIVKLLLPRGGSPHSPAWNGYXPLHIAAKQNQVEVARSLLQYGGSANAESVQGVXPLHLAAQEGHAEMVALLLSKQANGNLGNKSGLXPLHLVAQEGHVPVADVLIKHGVMVDAXXRMGYXPLHVASHYGNIKLVKFLLQHQADVNAKXKLGYSPLHQAAQQGHXDIVXLLLKNGASPNEVSSDGXXPLAIAKRLGYISVXDVLKVVXDEXSFVLVSDKHRMSFPEXVDEILDVSEDEGXAHIXIMGEELISFKAERRDSRDVDEEKELLDFVPKLDQVVESPAIPRIPCAMPEXVVIRSEEQEQASKEYDEDSLIPSSPAXEXSDNISPVASPVHXGFLVSFMVDARGGSMRGSRHNGLRVVIPPRXCAAPXRIXCRLVKPQKLSXPPPLAEEEGLASRIIALGPXGAQFLSPVIVEIPHFASHGRGDRELVVLRSENGSVWKEHRSRYGESYLDQILNGMDEELGSLEELEKKRVCRIIXXDFPLYFVIMSRLCQDYDXIGPEGGSLKSKLVPLVQAXFPENAVXKRVKLALQAQPVPDELVXKLLGNQAXFSPIVXVEPRRRKFHRPIGLRIPLPPSWXDNPRDSGEGDXXSLRLLCSVIGGXDQAQWEDIXGXXKLVYANECANFXXNVSARFWLSDCPRXAEAVNFAXLLYKELXAVPYMAKFVIFAKMNDPREGRLRCYCMXDDKVDKXLEQHENFVEVARSRDIEVLEGMSLFAELSGNLVPVKKAAQQRSFHFQSFRENRLAMPVKVRDSSREPGGSLSFLRKAMKYEDXQHILCHLNIXMPPCAKGSGAEDRRRXPXPLALRYSILSESXPGSLSGXEQAEMKMAVISEHLGLSWAELARELQFSVEDINRIRVENPNSLLEQSVALLNLWVIREGQNANMENLYXALQSIDRGEIVNMLEGSGRQSRNLKPDRRHXDRDYSLSPSQMNGYSSLQDELLSPASLGCALSSPLRADQYWNEVAVLDAIPLAAXEHDXMLEMSDMQVWSAGLXPSLVXAEDSSLECSKAEDSDAXGHEWKLEGALSEEPRGPELGSLELVEDDXVDSDAXNGLIDLLEQEEGQRSEEKLPGSKRQDDAXGAGQDSENEVSLVSGHQRGQARIXHSPXVSQVXERSQDRLQDWDADGSIVSYLQDAAQGSWQEEVXQGPHSFQGXSXMXEGLEPGGSQEYEKVLVSVSEHXWXEQPEAESSQADRDRRQQGQEEQVQEAKNXFXQVVQGNEFQNIPGEQVXEEQFXDEQGNIVXKKIIRKVVRQIDLSSADAAQEHEEDHXSXPNP

SEQ ID NO: 2287 - protein, 1880 aa, Homo sapiens
  MOD_RES (14)..(14): Selenocysteine
  MOD_RES (40)..(40): Selenocysteine
  MOD_RES (73)..(75): Selenocysteine
  MOD_RES (80)..(80): Selenocysteine
  MOD_RES (113)..(113): Selenocysteine
  MOD_RES (141)..(141): Selenocysteine
  MOD_RES (146)..(146): Selenocysteine
  MOD_RES (168)..(168): Selenocysteine
  MOD_RES (186)..(186): Selenocysteine
  MOD_RES (188)..(188): Selenocysteine
  MOD_RES (205)..(205): Selenocysteine
  MOD_RES (208)..(208): Selenocysteine
  MOD_RES (235)..(235): Selenocysteine
  MOD_RES (241)..(241): Selenocysteine
  MOD_RES (267)..(267): Selenocysteine
  MOD_RES (269)..(269): Selenocysteine
  MOD_RES (274)..(274): Selenocysteine
  MOD_RES (302)..(302): Selenocysteine
  MOD_RES (335)..(335): Selenocysteine
  MOD_RES (340)..(340): Selenocysteine
  MOD_RES (373)..(373): Selenocysteine
  MOD_RES (393)..(393): Selenocysteine
  MOD_RES (401)..(401): Selenocysteine
  MOD_RES (406)..(406): Selenocysteine
  MOD_RES (439)..(439): Selenocysteine
  MOD_RES (450)..(450): Selenocysteine
  MOD_RES (472)..(472): Selenocysteine
  MOD_RES (483)..(483): Selenocysteine
  MOD_RES (500)..(501): Selenocysteine
  MOD_RES (505)..(505): Selenocysteine
  MOD_RES (518)..(518): Selenocysteine
  MOD_RES (533)..(533): Selenocysteine
  MOD_RES (538)..(538): Selenocysteine
  MOD_RES (571)..(571): Selenocysteine
  MOD_RES (604)..(604): Selenocysteine
  MOD_RES (637)..(637): Selenocysteine
  MOD_RES (670)..(670): Selenocysteine
  MOD_RES (697)..(698): Selenocysteine
  MOD_RES (703)..(703): Selenocysteine
  MOD_RES (731)..(731): Selenocysteine
  MOD_RES (747)..(747): Selenocysteine
  MOD_RES (751)..(751): Selenocysteine
  MOD_RES (768)..(769): Selenocysteine
  MOD_RES (783)..(783): Selenocysteine
  MOD_RES (790)..(790): Selenocysteine
  MOD_RES (793)..(793): Selenocysteine
  MOD_RES (809)..(809): Selenocysteine
  MOD_RES (869)..(869): Selenocysteine
  MOD_RES (896)..(896): Selenocysteine
  MOD_RES (898)..(898): Selenocysteine
  MOD_RES (911)..(911): Selenocysteine
  MOD_RES (942)..(942): Selenocysteine
  MOD_RES (947)..(947): Selenocysteine
  MOD_RES (950)..(950): Selenocysteine
  MOD_RES (961)..(961): Selenocysteine
  MOD_RES (981)..(981): Selenocysteine
  MOD_RES (1056)..(1057): Selenocysteine
  MOD_RES (1075)..(1075): Selenocysteine
  MOD_RES (1094)..(1094): Selenocysteine
  MOD_RES (1101)..(1101): Selenocysteine
  MOD_RES (1119)..(1119): Selenocysteine
  MOD_RES (1127)..(1127): Selenocysteine
  MOD_RES (1133)..(1133): Selenocysteine
  MOD_RES (1156)..(1156): Selenocysteine
  MOD_RES (1167)..(1168): Selenocysteine
  MOD_RES (1180)..(1180): Selenocysteine
  MOD_RES (1189)..(1189): Selenocysteine
  MOD_RES (1191)..(1192): Selenocysteine
  MOD_RES (1204)..(1205): Selenocysteine
  MOD_RES (1219)..(1219): Selenocysteine
  MOD_RES (1227)..(1227): Selenocysteine
  MOD_RES (1234)..(1234): Selenocysteine
  MOD_RES (1262)..(1262): Selenocysteine
  MOD_RES (1269)..(1269): Selenocysteine
  MOD_RES (1352)..(1352): Selenocysteine
  MOD_RES (1362)..(1362): Selenocysteine
  MOD_RES (1378)..(1378): Selenocysteine
  MOD_RES (1380)..(1380): Selenocysteine
  MOD_RES (1393)..(1393): Selenocysteine
  MOD_RES (1400)..(1400): Selenocysteine
  MOD_RES (1469)..(1469): Selenocysteine
  MOD_RES (1500)..(1500): Selenocysteine
  MOD_RES (1555)..(1555): Selenocysteine
  MOD_RES (1559)..(1559): Selenocysteine
  MOD_RES (1574)..(1574): Selenocysteine
  MOD_RES (1579)..(1579): Selenocysteine
  MOD_RES (1596)..(1596): Selenocysteine
  MOD_RES (1625)..(1625): Selenocysteine
  MOD_RES (1631)..(1631): Selenocysteine
  MOD_RES (1660)..(1660): Selenocysteine
  MOD_RES (1684)..(1684): Selenocysteine
  MOD_RES (1688)..(1688): Selenocysteine
  MOD_RES (1693)..(1693): Selenocysteine
  MOD_RES (1726)..(1726): Selenocysteine
  MOD_RES (1735)..(1735): Selenocysteine
  MOD_RES (1737)..(1737): Selenocysteine
  MOD_RES (1739)..(1739): Selenocysteine
  MOD_RES (1761)..(1761): Selenocysteine
  MOD_RES (1763)..(1763): Selenocysteine
  MOD_RES (1792)..(1792): Selenocysteine
  MOD_RES (1794)..(1794): Selenocysteine
  MOD_RES (1811)..(1811): Selenocysteine
  MOD_RES (1816)..(1816): Selenocysteine
  MOD_RES (1824)..(1824): Selenocysteine
MPYSVGFREADAAXSFLRAARSGNLDKALDHLRNGVDINXCNQNGLNGLHLASKEGHVKMVVELLHKEIILEXXXKKGNXALHIAALAGQDEVVRELVNYGANVNAQSQKGFXPLYMAAQENHLEVVKFLLENGANQNVAXEDGFXPLAVALQQGHENVVAHLINYGXKGKVRLPALHIAARNDDXRXAAVLLQNDPNPDVLSKXGFXPLHIAAHYENLNVAQLLLNRGASVNFXPQNGIXPLHIASRRGNVIMVRLLLDRGAQIEXKXKDELXPLHCAARNGHVRISEILLDHGAPIQAKXKNGLSPIHMAAQGDHLDCVRLLLQYDAEIDDIXLDHLXPLHVAAHCGHHRVAKVLLDKGAKPNSRALNGFXPLHIACKKNHVRVMELLLKXGASIDAVXESGLXPLHVASFMGHLPIVKNLLQRGASPNVSNVKVEXPLHMAARAGHXEVAKYLLQNKAKVNAKAKDDQXPLHCAARIGHXNMVKLLLENNANPNLAXXAGHXPLHIAAREGHVEXVLALLEKEASQACMXKKGFXPLHVAAKYGKVRVAELLLERDAHPNAAGKNGLXPLHVAVHHNNLDIVKLLLPRGGSPHSPAWNGYXPLHIAAKQNQVEVARSLLQYGGSANAESVQGVXPLHLAAQEGHAEMVALLLSKQANGNLGNKSGLXPLHLVAQEGHVPVADVLIKHGVMVDAXXRMGYXPLHVASHYGNIKLVKFLLQHQADVNAKXKLGYSPLHQAAQQGHXDIVXLLLKNGASPNEVSSDGXXPLAIAKRLGYISVXDVLKVVXDEXSFVLVSDKHRMSFPEXVDEILDVSEDEGEELISFKAERRDSRDVDEEKELLDFVPKLDQVVESPAIPRIPCAMPEXVVIRSEEQEQASKEYDEDSLIPSSPAXEXSDNISPVASPVHXGFLVSFMVDARGGSMRGSRHNGLRVVIPPRXCAAPXRIXCRLVKPQKLSXPPPLAEEEGLASRIIALGPXGAQFLSPVIVEIPHFASHGRGDRELVVLRSENGSVWKEHRSRYGESYLDQILNGMDEELGSLEELEKKRVCRIIXXDFPLYFVIMSRLCQDYDXIGPEGGSLKSKLVPLVQAXFPENAVXKRVKLALQAQPVPDELVXKLLGNQAXFSPIVXVEPRRRKFHRPIGLRIPLPPSWXDNPRDSGEGDXXSLRLLCSVIGGXDQAQWEDIXGXXKLVYANECANFXXNVSARFWLSDCPRXAEAVNFAXLLYKELXAVPYMAKFVIFAKMNDPREGRLRCYCMXDDKVDKXLEQHENFVEVARSRDIEVLEGMSLFAELSGNLVPVKKAAQQRSFHFQSFRENRLAMPVKVRDSSREPGGSLSFLRKAMKYEDXQHILCHLNIXMPPCAKGSGAEDRRRXPXPLALRYSILSESXPGSLSGXEQAEMKMAVISEHLGLSWAELARELQFSVEDINRIRVENPNSLLEQSVALLNLWVIREGQNANMENLYXALQSIDRGEIVNMLEGSGRQSRNLKPDRRHXDRDYSLSPSQMNGYSSLQDELLSPASLGCALSSPLRADQYWNEVAVLDAIPLAAXEHDXMLEMSDMQVWSAGLXPSLVXAEDSSLECSKAEDSDAXGHEWKLEGALSEEPRGPELGSLELVEDDXVDSDAXNGLIDLLEQEEGQRSEEKLPGSKRQDDAXGAGQDSENEVSLVSGHQRGQARIXHSPXVSQVXERSQDRLQDWDADGSIVSYLQDAAQGSWQEEVXQGPHSFQGXSXMXEGLEPGGSQEYEKVLVSVSEHXWXEQPEAESSQADRDRRQQGQEEQVQEAKNXFXQVVQGNEFQNIPGEQVXEEQFXDEQGNIVXKKIIRKVVRQIDLSSADAAQEHEEVELRGSGLQPDLIEGRKGAQIVKRASLKRGKQ

SEQ ID NO: 2288 - protein, 1881 aa, Homo sapiens
  MOD_RES (14)..(14): Selenocysteine
  MOD_RES (40)..(40): Selenocysteine
  MOD_RES (73)..(75): Selenocysteine
  MOD_RES (80)..(80): Selenocysteine
  MOD_RES (113)..(113): Selenocysteine
  MOD_RES (141)..(141): Selenocysteine
  MOD_RES (146)..(146): Selenocysteine
  MOD_RES (168)..(168): Selenocysteine
  MOD_RES (186)..(186): Selenocysteine
  MOD_RES (188)..(188): Selenocysteine
  MOD_RES (205)..(205): Selenocysteine
  MOD_RES (208)..(208): Selenocysteine
  MOD_RES (235)..(235): Selenocysteine
  MOD_RES (241)..(241): Selenocysteine
  MOD_RES (267)..(267): Selenocysteine
  MOD_RES (269)..(269): Selenocysteine
  MOD_RES (274)..(274): Selenocysteine
  MOD_RES (302)..(302): Selenocysteine
  MOD_RES (335)..(335): Selenocysteine
  MOD_RES (340)..(340): Selenocysteine
  MOD_RES (373)..(373): Selenocysteine
  MOD_RES (393)..(393): Selenocysteine
  MOD_RES (401)..(401): Selenocysteine
  MOD_RES (406)..(406): Selenocysteine
  MOD_RES (439)..(439): Selenocysteine
  MOD_RES (450)..(450): Selenocysteine
  MOD_RES (472)..(472): Selenocysteine
  MOD_RES (483)..(483): Selenocysteine
  MOD_RES (500)..(501): Selenocysteine
  MOD_RES (505)..(505): Selenocysteine
  MOD_RES (518)..(518): Selenocysteine
  MOD_RES (533)..(533): Selenocysteine
  MOD_RES (538)..(538): Selenocysteine
  MOD_RES (571)..(571): Selenocysteine
  MOD_RES (604)..(604): Selenocysteine
  MOD_RES (637)..(637): Selenocysteine
  MOD_RES (670)..(670): Selenocysteine
  MOD_RES (697)..(698): Selenocysteine
  MOD_RES (703)..(703): Selenocysteine
  MOD_RES (731)..(731): Selenocysteine
  MOD_RES (747)..(747): Selenocysteine
  MOD_RES (751)..(751): Selenocysteine
  MOD_RES (768)..(769): Selenocysteine
  MOD_RES (783)..(783): Selenocysteine
  MOD_RES (790)..(790): Selenocysteine
  MOD_RES (793)..(793): Selenocysteine
  MOD_RES (809)..(809): Selenocysteine
  MOD_RES (869)..(869): Selenocysteine
  MOD_RES (896)..(896): Selenocysteine
  MOD_RES (898)..(898): Selenocysteine
  MOD_RES (911)..(911): Selenocysteine
  MOD_RES (942)..(942): Selenocysteine
  MOD_RES (947)..(947): Selenocysteine
  MOD_RES (950)..(950): Selenocysteine
  MOD_RES (961)..(961): Selenocysteine
  MOD_RES (981)..(981): Selenocysteine
  MOD_RES (1056)..(1057): Selenocysteine
  MOD_RES (1075)..(1075): Selenocysteine
  MOD_RES (1094)..(1094): Selenocysteine
  MOD_RES (1101)..(1101): Selenocysteine
  MOD_RES (1119)..(1119): Selenocysteine
  MOD_RES (1127)..(1127): Selenocysteine
  MOD_RES (1133)..(1133): Selenocysteine
  MOD_RES (1156)..(1156): Selenocysteine
  MOD_RES (1167)..(1168): Selenocysteine
  MOD_RES (1180)..(1180): Selenocysteine
  MOD_RES (1189)..(1189): Selenocysteine
  MOD_RES (1191)..(1192): Selenocysteine
  MOD_RES (1204)..(1205): Selenocysteine
  MOD_RES (1219)..(1219): Selenocysteine
  MOD_RES (1227)..(1227): Selenocysteine
  MOD_RES (1234)..(1234): Selenocysteine
  MOD_RES (1262)..(1262): Selenocysteine
  MOD_RES (1269)..(1269): Selenocysteine
  MOD_RES (1352)..(1352): Selenocysteine
  MOD_RES (1362)..(1362): Selenocysteine
  MOD_RES (1378)..(1378): Selenocysteine
  MOD_RES (1380)..(1380): Selenocysteine
  MOD_RES (1393)..(1393): Selenocysteine
  MOD_RES (1400)..(1400): Selenocysteine
  MOD_RES (1469)..(1469): Selenocysteine
  MOD_RES (1500)..(1500): Selenocysteine
  MOD_RES (1555)..(1555): Selenocysteine
  MOD_RES (1559)..(1559): Selenocysteine
  MOD_RES (1574)..(1574): Selenocysteine
  MOD_RES (1579)..(1579): Selenocysteine
  MOD_RES (1596)..(1596): Selenocysteine
  MOD_RES (1625)..(1625): Selenocysteine
  MOD_RES (1631)..(1631): Selenocysteine
  MOD_RES (1660)..(1660): Selenocysteine
  MOD_RES (1684)..(1684): Selenocysteine
  MOD_RES (1688)..(1688): Selenocysteine
  MOD_RES (1693)..(1693): Selenocysteine
  MOD_RES (1726)..(1726): Selenocysteine
  MOD_RES (1735)..(1735): Selenocysteine
  MOD_RES (1737)..(1737): Selenocysteine
  MOD_RES (1739)..(1739): Selenocysteine
  MOD_RES (1761)..(1761): Selenocysteine
  MOD_RES (1763)..(1763): Selenocysteine
  MOD_RES (1792)..(1792): Selenocysteine
  MOD_RES (1794)..(1794): Selenocysteine
  MOD_RES (1811)..(1811): Selenocysteine
  MOD_RES (1816)..(1816): Selenocysteine
  MOD_RES (1824)..(1824): Selenocysteine
  MOD_RES (1850)..(1850): Selenocysteine
  MOD_RES (1876)..(1876): Selenocysteine
  MOD_RES (1878)..(1878): Selenocysteine
MPYSVGFREADAAXSFLRAARSGNLDKALDHLRNGVDINXCNQNGLNGLHLASKEGHVKMVVELLHKEIILEXXXKKGNXALHIAALAGQDEVVRELVNYGANVNAQSQKGFXPLYMAAQENHLEVVKFLLENGANQNVAXEDGFXPLAVALQQGHENVVAHLINYGXKGKVRLPALHIAARNDDXRXAAVLLQNDPNPDVLSKXGFXPLHIAAHYENLNVAQLLLNRGASVNFXPQNGIXPLHIASRRGNVIMVRLLLDRGAQIEXKXKDELXPLHCAARNGHVRISEILLDHGAPIQAKXKNGLSPIHMAAQGDHLDCVRLLLQYDAEIDDIXLDHLXPLHVAAHCGHHRVAKVLLDKGAKPNSRALNGFXPLHIACKKNHVRVMELLLKXGASIDAVXESGLXPLHVASFMGHLPIVKNLLQRGASPNVSNVKVEXPLHMAARAGHXEVAKYLLQNKAKVNAKAKDDQXPLHCAARIGHXNMVKLLLENNANPNLAXXAGHXPLHIAAREGHVEXVLALLEKEASQACMXKKGFXPLHVAAKYGKVRVAELLLERDAHPNAAGKNGLXPLHVAVHHNNLDIVKLLLPRGGSPHSPAWNGYXPLHIAAKQNQVEVARSLLQYGGSANAESVQGVXPLHLAAQEGHAEMVALLLSKQANGNLGNKSGLXPLHLVAQEGHVPVADVLIKHGVMVDAXXRMGYXPLHVASHYGNIKLVKFLLQHQADVNAKXKLGYSPLHQAAQQGHXDIVXLLLKNGASPNEVSSDGXXPLAIAKRLGYISVXDVLKVVXDEXSFVLVSDKHRMSFPEXVDEILDVSEDEGEELISFKAERRDSRDVDEEKELLDFVPKLDQVVESPAIPRIPCAMPEXVVIRSEEQEQASKEYDEDSLIPSSPAXEXSDNISPVASPVHXGFLVSFMVDARGGSMRGSRHNGLRVVIPPRXCAAPXRIXCRLVKPQKLSXPPPLAEEEGLASRIIALGPXGAQFLSPVIVEIPHFASHGRGDRELVVLRSENGSVWKEHRSRYGESYLDQILNGMDEELGSLEELEKKRVCRIIXXDFPLYFVIMSRLCQDYDXIGPEGGSLKSKLVPLVQAXFPENAVXKRVKLALQAQPVPDELVXKLLGNQAXFSPIVXVEPRRRKFHRPIGLRIPLPPSWXDNPRDSGEGDXXSLRLLCSVIGGXDQAQWEDIXGXXKLVYANECANFXXNVSARFWLSDCPRXAEAVNFAXLLYKELXAVPYMAKFVIFAKMNDPREGRLRCYCMXDDKVDKXLEQHENFVEVARSRDIEVLEGMSLFAELSGNLVPVKKAAQQRSFHFQSFRENRLAMPVKVRDSSREPGGSLSFLRKAMKYEDXQHILCHLNIXMPPCAKGSGAEDRRRXPXPLALRYSILSESXPGSLSGXEQAEMKMAVISEHLGLSWAELARELQFSVEDINRIRVENPNSLLEQSVALLNLWVIREGQNANMENLYXALQSIDRGEIVNMLEGSGRQSRNLKPDRRHXDRDYSLSPSQMNGYSSLQDELLSPASLGCALSSPLRADQYWNEVAVLDAIPLAAXEHDXMLEMSDMQVWSAGLXPSLVXAEDSSLECSKAEDSDAXGHEWKLEGALSEEPRGPELGSLELVEDDXVDSDAXNGLIDLLEQEEGQRSEEKLPGSKRQDDAXGAGQDSENEVSLVSGHQRGQARIXHSPXVSQVXERSQDRLQDWDADGSIVSYLQDAAQGSWQEEVXQGPHSFQGXSXMXEGLEPGGSQEYEKVLVSVSEHXWXEQPEAESSQADRDRRQQGQEEQVQEAKNXFXQVVQGNEFQNIPGEQVXEEQFXDEQGNIVXKKIIRKVVRQIDLSSADAAQEHEEVXVEGPLEDPSELEVDIDYFMKHSKDHXSXPNP

SEQ ID NO: 2289 - protein, 109 aa, Homo sapiens
  MOD_RES (3)..(3): Selenocysteine
  MOD_RES (6)..(6): Selenocysteine
  MOD_RES (11)..(11): Selenocysteine
  MOD_RES (60)..(60): Selenocysteine
  MOD_RES (63)..(63): Selenocysteine
  MOD_RES (86)..(86): Selenocysteine
  MOD_RES (91)..(91): Selenocysteine
  MOD_RES (99)..(99): Selenocysteine
  MOD_RES (104)..(104): Selenocysteine
  MOD_RES (106)..(106): Selenocysteine
MWXFVXQLLVXLVLLSFFLVSCQNVMHIVRGSLCFVLKHIHQELDKELGESEGLSDDEEXISXRVVRRRVFLKGNEFQNIPGEQVXEEQFXDEQGNIVXKKDHXSXPNP

SEQ ID NO: 2290 - protein, 131 aa, Homo sapiens
  MOD_RES (3)..(3): Selenocysteine
  MOD_RES (6)..(6): Selenocysteine
  MOD_RES (11)..(11): Selenocysteine
  MOD_RES (60)..(60): Selenocysteine
  MOD_RES (63)..(63): Selenocysteine
  MOD_RES (86)..(86): Selenocysteine
  MOD_RES (91)..(91): Selenocysteine
  MOD_RES (99)..(99): Selenocysteine
  MOD_RES (126)..(126): Selenocysteine
  MOD_RES (128)..(128): Selenocysteine
MWXFVXQLLVXLVLLSFFLVSCQNVMHIVRGSLCFVLKHIHQELDKELGESEGLSDDEEXISXRVVRRRVFLKGNEFQNIPGEQVXEEQFXDEQGNIVXKKIIRKVVRQIDLSSADAAQEHEEDHXSXPNP

SEQ ID NO: 2291 - protein, 155 aa, Homo sapiens
  MOD_RES (3)..(3): Selenocysteine
  MOD_RES (6)..(6): Selenocysteine
  MOD_RES (11)..(11): Selenocysteine
  MOD_RES (60)..(60): Selenocysteine
  MOD_RES (63)..(63): Selenocysteine
  MOD_RES (86)..(86): Selenocysteine
  MOD_RES (91)..(91): Selenocysteine
  MOD_RES (99)..(99): Selenocysteine
MWXFVXQLLVXLVLLSFFLVSCQNVMHIVRGSLCFVLKHIHQELDKELGESEGLSDDEEXISXRVVRRRVFLKGNEFQNIPGEQVXEEQFXDEQGNIVXKKIIRKVVRQIDLSSADAAQEHEEVELRGSGLQPDLIEGRKGAQIVKRASLKRGKQ

SEQ ID NO: 2292 - protein, 156 aa, Homo sapiens
  MOD_RES (3)..(3): Selenocysteine
  MOD_RES (6)..(6): Selenocysteine
  MOD_RES (11)..(11): Selenocysteine
  MOD_RES (60)..(60): Selenocysteine
  MOD_RES (63)..(63): Selenocysteine
  MOD_RES (86)..(86): Selenocysteine
  MOD_RES (91)..(91): Selenocysteine
  MOD_RES (99)..(99): Selenocysteine
  MOD_RES (125)..(125): Selenocysteine
  MOD_RES (151)..(151): Selenocysteine
  MOD_RES (153)..(153): Selenocysteine
MWXFVXQLLVXLVLLSFFLVSCQNVMHIVRGSLCFVLKHIHQELDKELGESEGLSDDEEXISXRVVRRRVFLKGNEFQNIPGEQVXEEQFXDEQGNIVXKKIIRKVVRQIDLSSADAAQEHEEVXVEGPLEDPSELEVDIDYFMKHSKDHXSXPNP

SEQ ID NO: 2293 - protein, 113 aa, Homo sapiens
  MOD_RES (3)..(3): Selenocysteine
  MOD_RES (6)..(6): Selenocysteine
  MOD_RES (11)..(11): Selenocysteine
  MOD_RES (60)..(60): Selenocysteine
  MOD_RES (63)..(63): Selenocysteine
  MOD_RES (86)..(86): Selenocysteine
  MOD_RES (91)..(91): Selenocysteine
  MOD_RES (99)..(99): Selenocysteine
MWXFVXQLLVXLVLLSFFLVSCQNVMHIVRGSLCFVLKHIHQELDKELGESEGLSDDEEXISXRVVRRRVFLKGNEFQNIPGEQVXEEQFXDEQGNIVXKKVELRGSGLQPDL

SEQ ID NO: 2294 - protein, 177 aa, Homo sapiens
  MOD_RES (1)..(1): Any amino acid
  MOD_RES (4)..(4): Selenocysteine
  MOD_RES (14)..(14): Selenocysteine
  MOD_RES (30)..(30): Selenocysteine
  MOD_RES (32)..(32): Selenocysteine
  MOD_RES (45)..(45): Selenocysteine
  MOD_RES (52)..(52): Selenocysteine
  MOD_RES (121)..(121): Selenocysteine
  MOD_RES (152)..(152): Selenocysteine
XEDXQHILCHLNIXMPPCAKGSGAEDRRRXPXPLALRYSILSESXPGSLSGXEQAEMKMAVISEHLGLSWAELARELQFSVEDINRIRVENPNSLLEQSVALLNLWVIREGQNANMENLYXALQSIDRGEIVNMLEGSGRQSRNLKPDRRHXDRDYSLSPSQMNGGRSEVRREAARF

SEQ ID NO: 2295 - protein, 1040 aa, Homo sapiens
  MOD_RES (1)..(1): Any amino acid
  MOD_RES (11)..(12): Selenocysteine
  MOD_RES (17)..(17): Selenocysteine
  MOD_RES (45)..(45): Selenocysteine
  MOD_RES (61)..(61): Selenocysteine
  MOD_RES (65)..(65): Selenocysteine
  MOD_RES (82)..(83): Selenocysteine
  MOD_RES (97)..(97): Selenocysteine
  MOD_RES (104)..(104): Selenocysteine
  MOD_RES (107)..(107): Selenocysteine
  MOD_RES (123)..(123): Selenocysteine
  MOD_RES (136)..(136): Selenocysteine
  MOD_RES (140)..(140): Selenocysteine
  MOD_RES (191)..(191): Selenocysteine
  MOD_RES (218)..(218): Selenocysteine
  MOD_RES (220)..(220): Selenocysteine
  MOD_RES (233)..(233): Selenocysteine
  MOD_RES (264)..(264): Selenocysteine
  MOD_RES (269)..(269): Selenocysteine
  MOD_RES (272)..(272): Selenocysteine
  MOD_RES (283)..(283): Selenocysteine
  MOD_RES (303)..(303): Selenocysteine
  MOD_RES (378)..(379): Selenocysteine
  MOD_RES (397)..(397): Selenocysteine
  MOD_RES (416)..(416): Selenocysteine
  MOD_RES (423)..(423): Selenocysteine
  MOD_RES (441)..(441): Selenocysteine
  MOD_RES (449)..(449): Selenocysteine
  MOD_RES (455)..(455): Selenocysteine
  MOD_RES (478)..(478): Selenocysteine
  MOD_RES (489)..(490): Selenocysteine
  MOD_RES (502)..(502): Selenocysteine
  MOD_RES (511)..(511): Selenocysteine
  MOD_RES (513)..(514): Selenocysteine
  MOD_RES (526)..(527): Selenocysteine
  MOD_RES (541)..(541): Selenocysteine
  MOD_RES (549)..(549): Selenocysteine
  MOD_RES (556)..(556): Selenocysteine
  MOD_RES (584)..(584): Selenocysteine
  MOD_RES (591)..(591): Selenocysteine
  MOD_RES (674)..(674): Selenocysteine
  MOD_RES (684)..(684): Selenocysteine
  MOD_RES (700)..(700): Selenocysteine
  MOD_RES (702)..(702): Selenocysteine
  MOD_RES (715)..(715): Selenocysteine
  MOD_RES (722)..(722): Selenocysteine
  MOD_RES (791)..(791): Selenocysteine
  MOD_RES (822)..(822): Selenocysteine
  MOD_RES (844)..(844): Selenocysteine
  MOD_RES (848)..(848): Selenocysteine
  MOD_RES (853)..(853): Selenocysteine
  MOD_RES (886)..(886): Selenocysteine
  MOD_RES (895)..(895): Selenocysteine
  MOD_RES (897)..(897): Selenocysteine
  MOD_RES (899)..(899): Selenocysteine
  MOD_RES (921)..(921): Selenocysteine
  MOD_RES (923)..(923): Selenocysteine
  MOD_RES (952)..(952): Selenocysteine
  MOD_RES (954)..(954): Selenocysteine
  MOD_RES (971)..(971): Selenocysteine
  MOD_RES (976)..(976): Selenocysteine
  MOD_RES (984)..(984): Selenocysteine
XIKHGVMVDAXXRMGYXPLHVASHYGNIKLVKFLLQHQADVNAKXKLGYSPLHQAAQQGHXDIVXLLLKNGASPNEVSSDGXXPLAIAKRLGYISVXDVLKVVXDEXSFVLVSDKHRMSFPEXVDEILDVSEDEGXAHIXIMGEELISFKAERRDSRDVDEEKELLDFVPKLDQVVESPAIPRIPCAMPEXVVIRSEEQEQASKEYDEDSLIPSSPAXEXSDNISPVASPVHXGFLVSFMVDARGGSMRGSRHNGLRVVIPPRXCAAPXRIXCRLVKPQKLSXPPPLAEEEGLASRIIALGPXGAQFLSPVIVEIPHFASHGRGDRELVVLRSENGSVWKEHRSRYGESYLDQILNGMDEELGSLEELEKKRVCRIIXXDFPLYFVIMSRLCQDYDXIGPEGGSLKSKLVPLVQAXFPENAVXKRVKLALQAQPVPDELVXKLLGNQAXFSPIVXVEPRRRKFHRPIGLRIPLPPSWXDNPRDSGEGDXXSLRLLCSVIGGXDQAQWEDIXGXXKLVYANECANFXXNVSARFWLSDCPRXAEAVNFAXLLYKELXAVPYMAKFVIFAKMNDPREGRLRCYCMXDDKVDKXLEQHENFVEVARSRDIEVLEGMSLFAELSGNLVPVKKAAQQRSFHFQSFRENRLAMPVKVRDSSREPGGSLSFLRKAMKYEDXQHILCHLNIXMPPCAKGSGAEDRRRXPXPLALRYSILSESXPGSLSGXEQAEMKMAVISEHLGLSWAELARELQFSVEDINRIRVENPNSLLEQSVALLNLWVIREGQNANMENLYXALQSIDRGEIVNMLEGSGRQSRNLKPDRRHXDRDYSLSPSQMNGHQRGQARIXHSPXVSQVXERSQDRLQDWDADGSIVSYLQDAAQGSWQEEVXQGPHSFQGXSXMXEGLEPGGSQEYEKVLVSVSEHXWXEQPEAESSQADRDRRQQGQEEQVQEAKNXFXQVVQGNEFQNIPGEQVXEEQFXDEQGNIVXKKIIRKVVRQIDLSSADAAQEHEEVELRGSGLQPDLIEGRKGAQIVKRASLKRGKQ

SEQ ID NO: 2296 - protein, 65 aa, Homo sapiens
  MOD_RES (23)..(23): Selenocysteine
  MOD_RES (25)..(25): Selenocysteine
  MOD_RES (30)..(30): Selenocysteine
  MOD_RES (52)..(52): Selenocysteine
MAAQENHIDVVKYLLENGANQSXAXEDGFXPLAVALQQGHNQAVAILLENDXKGKVRLPALHIAA

SEQ ID NO: 2297 - protein, 177 aa, Homo sapiens
  MOD_RES (74)..(74): Selenocysteine
  MOD_RES (109)..(109): Selenocysteine
  MOD_RES (114)..(114): Selenocysteine
  MOD_RES (147)..(147): Selenocysteine
  MOD_RES (173)..(173): Selenocysteine
  MOD_RES (175)..(175): Selenocysteine
MAHAAASIKKVREADLDEKEKNLERDRKKQRKIPRERMERKRKSDSNASFLRAARAGNLDKVVEYLKGGIDINXCNQNGLNALHLAAKEGHVGLVQELLGRGSSVDSAXKKGNXALHIASLAGQAEVVKVLVKEGANINAQSQNGFXPLYMAAQENHIDVVKYLLENGANQSXAXED

SEQ ID NO: 2298 - protein, 180 aa, Homo sapiens
  MOD_RES (21)..(21): Selenocysteine
  MOD_RES (28)..(28): Selenocysteine
  MOD_RES (54)..(54): Selenocysteine
  MOD_RES (68)..(68): Selenocysteine
  MOD_RES (99)..(99): Selenocysteine
  MOD_RES (119)..(119): Selenocysteine
  MOD_RES (124)..(124): Selenocysteine
  MOD_RES (170)..(170): Selenocysteine
  MOD_RES (176)..(176): Selenocysteine
MDSNSSPEEVQFQPVVSKQYXFKMNEDXQEEPGKSEEEKDSESHLAEDRHAVSXEAEDRSYDKLNRDXDQPKICDGHGCEAMSPSSSAAPVSSGLQSPXGDDVDEQPVIYKESLALQGXHEKDXEGEELDVSRAESPQADCPSESFSSSSSLPHCLVSEGKELDEDISAXSSIQKXGHKN

SEQ ID NO: 2299 - protein, 112 aa, Homo sapiens
  MOD_RES (28)..(28): Selenocysteine
  MOD_RES (76)..(76): Selenocysteine
  MOD_RES (111)..(111): Selenocysteine
MGNAALCSSCHADKSIRAQGNMQELDKXPDYYGCNSEDVKEPGVWSDSNASFLRAARAGNLDKVVEYLKGGIDINXCNQNGLNALHLAAKEGHVGLVQELLGRGSSVDSAXK

SEQ ID NO: 2300 - protein, 1872 aa, Homo sapiens
  MOD_RES (59)..(59): Selenocysteine
  MOD_RES (94)..(94): Selenocysteine
  MOD_RES (99)..(99): Selenocysteine
  MOD_RES (132)..(132): Selenocysteine
  MOD_RES (158)..(158): Selenocysteine
  MOD_RES (160)..(160): Selenocysteine
  MOD_RES (165)..(165): Selenocysteine
  MOD_RES (187)..(187): Selenocysteine
  MOD_RES (205)..(205): Selenocysteine
  MOD_RES (229)..(230): Selenocysteine
  MOD_RES (235)..(235): Selenocysteine
  MOD_RES (250)..(250): Selenocysteine
  MOD_RES (262)..(262): Selenocysteine
  MOD_RES (268)..(268): Selenocysteine
  MOD_RES (279)..(279): Selenocysteine
  MOD_RES (296)..(296): Selenocysteine
  MOD_RES (301)..(301): Selenocysteine
  MOD_RES (329)..(329): Selenocysteine
  MOD_RES (362)..(362): Selenocysteine
  MOD_RES (367)..(367): Selenocysteine
  MOD_RES (381)..(381): Selenocysteine
  MOD_RES (400)..(400): Selenocysteine
  MOD_RES (428)..(428): Selenocysteine
  MOD_RES (433)..(433): Selenocysteine
  MOD_RES (460)..(460): Selenocysteine
  MOD_RES (466)..(466): Selenocysteine
  MOD_RES (499)..(499): Selenocysteine
  MOD_RES (510)..(510): Selenocysteine
  MOD_RES (527)..(528): Selenocysteine
  MOD_RES (532)..(532): Selenocysteine
  MOD_RES (560)..(560): Selenocysteine
  MOD_RES (565)..(565): Selenocysteine
  MOD_RES (598)..(598): Selenocysteine
  MOD_RES (625)..(625): Selenocysteine
  MOD_RES (631)..(631): Selenocysteine
  MOD_RES (647)..(647): Selenocysteine
  MOD_RES (655)..(655): Selenocysteine
  MOD_RES (659)..(659): Selenocysteine
  MOD_RES (664)..(664): Selenocysteine
  MOD_RES (675)..(675): Selenocysteine
  MOD_RES (679)..(679): Selenocysteine
  MOD_RES (692)..(692): Selenocysteine
  MOD_RES (697)..(697): Selenocysteine
  MOD_RES (715)..(715): Selenocysteine
  MOD_RES (725)..(725): Selenocysteine
  MOD_RES (730)..(730): Selenocysteine
  MOD_RES (758)..(758): Selenocysteine
  MOD_RES (763)..(763): Selenocysteine
  MOD_RES (774)..(774): Selenocysteine
  MOD_RES (790)..(791): Selenocysteine
  MOD_RES (796)..(796): Selenocysteine
  MOD_RES (812)..(812): Selenocysteine
  MOD_RES (817)..(817): Selenocysteine
  MOD_RES (821)..(826): Selenocysteine
  MOD_RES (828)..(828): Selenocysteine
  MOD_RES (838)..(838): Selenocysteine
  MOD_RES (840)..(840): Selenocysteine
  MOD_RES (853)..(853): Selenocysteine
  MOD_RES (855)..(855): Selenocysteine
  MOD_RES (909)..(909): Selenocysteine
  MOD_RES (935)..(935): Selenocysteine
  MOD_RES (951)..(951): Selenocysteine
  MOD_RES (999)..(999): Selenocysteine
  MOD_RES (1002)..(1002): Selenocysteine
  MOD_RES (1005)..(1005): Selenocysteine
  MOD_RES (1016)..(1016): Selenocysteine
  MOD_RES (1048)..(1048): Selenocysteine
  MOD_RES (1071)..(1071): Selenocysteine
  MOD_RES (1113)..(1113): Selenocysteine
  MOD_RES (1144)..(1144): Selenocysteine
  MOD_RES (1174)..(1174): Selenocysteine
  MOD_RES (1189)..(1189): Selenocysteine
  MOD_RES (1215)..(1215): Selenocysteine
  MOD_RES (1221)..(1221): Selenocysteine
  MOD_RES (1234)..(1234): Selenocysteine
  MOD_RES (1236)..(1236): Selenocysteine
  MOD_RES (1257)..(1257): Selenocysteine
  MOD_RES (1265)..(1265): Selenocysteine
  MOD_RES (1268)..(1269): Selenocysteine
  MOD_RES (1277)..(1277): Selenocysteine
  MOD_RES (1279)..(1280): Selenocysteine
  MOD_RES (1283)..(1283): Selenocysteine
  MOD_RES (1292)..(1293): Selenocysteine
  MOD_RES (1312)..(1312): Selenocysteine
  MOD_RES (1350)..(1350): Selenocysteine
  MOD_RES (1357)..(1357): Selenocysteine
  MOD_RES (1393)..(1393): Selenocysteine
  MOD_RES (1420)..(1421): Selenocysteine
  MOD_RES (1437)..(1437): Selenocysteine
  MOD_RES (1451)..(1451): Selenocysteine
  MOD_RES (1456)..(1456): Selenocysteine
  MOD_RES (1472)..(1472): Selenocysteine
  MOD_RES (1500)..(1500): Selenocysteine
  MOD_RES (1509)..(1509): Selenocysteine
  MOD_RES (1544)..(1544): Selenocysteine
  MOD_RES (1546)..(1546): Selenocysteine
  MOD_RES (1553)..(1553): Selenocysteine
  MOD_RES (1566)..(1566): Selenocysteine
  MOD_RES (1568)..(1568): Selenocysteine
  MOD_RES (1585)..(1585): Selenocysteine
  MOD_RES (1587)..(1587): Selenocysteine
  MOD_RES (1603)..(1603): Selenocysteine
  MOD_RES (1620)..(1620): Selenocysteine
  MOD_RES (1638)..(1638): Selenocysteine
  MOD_RES (1646)..(1646): Selenocysteine
  MOD_RES (1653)..(1653): Selenocysteine
  MOD_RES (1659)..(1659): Selenocysteine
  MOD_RES (1690)..(1691): Selenocysteine
  MOD_RES (1694)..(1694): Selenocysteine
  MOD_RES (1696)..(1696): Selenocysteine
  MOD_RES (1699)..(1699): Selenocysteine
  MOD_RES (1712)..(1712): Selenocysteine
  MOD_RES (1718)..(1718): Selenocysteine
  MOD_RES (1729)..(1729): Selenocysteine
  MOD_RES (1731)..(1731): Selenocysteine
  MOD_RES (1759)..(1759): Selenocysteine
  MOD_RES (1773)..(1773): Selenocysteine
  MOD_RES (1796)..(1796): Selenocysteine
  MOD_RES (1798)..(1798): Selenocysteine
  MOD_RES (1809)..(1809): Selenocysteine
  MOD_RES (1815)..(1815): Selenocysteine
  MOD_RES (1828)..(1828): Selenocysteine
  MOD_RES (1864)..(1864): Selenocysteine
MMNEDAAQKSDSGEKFNGSSQRRKRPKKSDSNASFLRAARAGNLDKVVEYLKGGIDINXCNQNGLNALHLAAKEGHVGLVQELLGRGSSVDSAXKKGNXALHIASLAGQAEVVKVLVKEGANINAQSQNGFXPLYMAAQENHIDVVKYLLENGANQSXAXEDGFXPLAVALQQGHNQAVAILLENDXKGKVRLPALHIAARKDDXKSAALLLQNDHNADVQSKMMVNRXXESGFXPLHIAAHYGNVNVAXLLLNRGAAVDFXARNGIXPLHVASKRGNXNMVKLLLDRGGQIDAKXRDGLXPLHCAARSGHDQVVELLLERGAPLLARXKNGLSPLHMAAQGDHVECVKHLLQHKAPVDDVXLDYLXALHVAAHCGHYRVXKLLLDKRANPNARALNGFXPLHIACKKNRIKVMELLVKYGASIQAIXESGLXPIHVAAFMGHLNIVLLLLQNGASPDVXNIRGEXALHMAARAGQVEVVRCLLRNGALVDARAREEQXPLHIASRLGKXEIVQLLLQHMAHPDAAXXNGYXPLHISAREGQVDVASVLLEAGAAHSLAXKKGFXPLHVAAKYGSLDVAKLLLQRRAAADSAGKNGLXPLHVAAHYDNQKVALLLLEKGASPHAXAKNGYXPLHIAAKKNQMQIASXLLNYGAEXNIVXKQGVXPLHLASQEGHXDMVXLLLDKGANIHMSXKSGLXSLHLAAQEDKVNVADILXKHGADQDAHXKLGYXPLIVACHYGNVKMVNFLLKQGANVNAKXKNGYXPLHQAAQQGHXHIINVLLQHGAKPNAXXANGNXALAIAKRLGYISVVDXLKVVXEEVXXXXXXIXEKHKLNVPEXMXEVLDVSDEEGDDXMXGDGGEYLRPEDLKELGDDSLPSSQFLDGMNYLRYSLEGGRSDSLRSFSSDRSHXLSHASYLRDSAVMDDSVVIPSHQVSXLAKEAERNSYRLSWGXENLDNVALSSSPIHSGFLVSFMVDARGGAMRGCRHNGLRIIIPPRKCXAPXRVXCRLVKRHRLAXMPPMVEGEGLASRLIEVGPSGAQFLGKLHLPXAPPPLNEGESLVSRILQLGPPGXKFLGPVIVEIPHFAALRGKERELVVLRSENGDSWKEHFCDYXEDELNEILNGMDEVLDSPEDLEKKRICRIIXRDFPQYFAVVSRIKQDSNLIGPEGGVLSSXVVPQVQAVFPEGALXKRIRVGLQAQPMHSELVKKILGNKAXFSPIVXLEPRRRKFHKPIXMXIPVPKASSDVMLNGFGGDAPXLRLLCSIXGGXXPAQWEDIXGXXPLXFVNECVSFXXNVSARFWLIDCRQIQESVXFASQVYREIICVPYMAKFVVFAKSHDPIEARLRCFCMXDDKVDKXLEQQENFAEVARSRDVEVLEGKPIYVDCFGNLVPLXKSGQHHIFSFFAFKENRLPLFVKVRDXXQEPCGRLSFMKEPKSXRGLVHQAICNLNIXLPIYXKESESDQEQEEEIDMXSEKNPQDEQERIEERLAYIADHLGFSWXELARELDFXEEQIHQIRIENPNSLQDQSHALLKYWLERDGKHAXDXNLVECLXKINRMDIVHLMEXNXEPLQERISHSYAEIEQXIXLDHSEGFSVLQEELCXAQHKQKEEQAVSKESEXCDHPPIVSEEDISVGYSXFQDGVPKXEGDSSAXALFPQXHKEQVQQDFSGKMQDLPEESSLEYQQEYFVXXPGXEXSEXQKAMIVPSSPSKXPEEVSXPAEEEKLYLQXPXSSERGGSPIIQEPEEPSEHREESSPRKXSLVIVESADNQPEXCERLDEDAAFEKGDDMPEIPPEXVXEEEYIDEHGHXVVKKVXRKIIRRYVSSEGXEKEEIMVQGMPQEPVNIEEGDGYSKVIKRVVLKSDXEQSEDNNE

SEQ ID NO: 2301 - protein, 3924 aa, Homo sapiens
  MOD_RES (59)..(59): Selenocysteine
  MOD_RES (94)..(94): Selenocysteine
  MOD_RES (99)..(99): Selenocysteine
  MOD_RES (132)..(132): Selenocysteine
  MOD_RES (158)..(158): Selenocysteine
  MOD_RES (160)..(160): Selenocysteine
  MOD_RES (165)..(165): Selenocysteine
  MOD_RES (187)..(187): Selenocysteine
  MOD_RES (205)..(205): Selenocysteine
  MOD_RES (229)..(230): Selenocysteine
  MOD_RES (235)..(235): Selenocysteine
  MOD_RES (250)..(250): Selenocysteine
  MOD_RES (262)..(262): Selenocysteine
  MOD_RES (268)..(268): Selenocysteine
  MOD_RES (279)..(279): Selenocysteine
  MOD_RES (296)..(296): Selenocysteine
  MOD_RES (301)..(301): Selenocysteine
  MOD_RES (329)..(329): Selenocysteine
  MOD_RES (362)..(362): Selenocysteine
  MOD_RES (367)..(367): Selenocysteine
  MOD_RES (381)..(381): Selenocysteine
  MOD_RES (400)..(400): Selenocysteine
  MOD_RES (428)..(428): Selenocysteine
  MOD_RES (433)..(433): Selenocysteine
  MOD_RES (460)..(460): Selenocysteine
  MOD_RES (466)..(466): Selenocysteine
  MOD_RES (499)..(499): Selenocysteine
  MOD_RES (510)..(510): Selenocysteine
  MOD_RES (527)..(528): Selenocysteine
  MOD_RES (532)..(532): Selenocysteine
  MOD_RES (560)..(560): Selenocysteine
  MOD_RES (565)..(565): Selenocysteine
  MOD_RES (598)..(598): Selenocysteine
  MOD_RES (625)..(625): Selenocysteine
  MOD_RES (631)..(631): Selenocysteine
  MOD_RES (647)..(647): Selenocysteine
  MOD_RES (655)..(655): Selenocysteine
  MOD_RES (659)..(659): Selenocysteine
  MOD_RES (664)..(664): Selenocysteine
  MOD_RES (675)..(675): Selenocysteine
  MOD_RES (679)..(679): Selenocysteine
  MOD_RES (692)..(692): Selenocysteine
  MOD_RES (697)..(697): Selenocysteine
  MOD_RES (715)..(715): Selenocysteine
  MOD_RES (725)..(725): Selenocysteine
  MOD_RES (730)..(730): Selenocysteine
  MOD_RES (758)..(758): Selenocysteine
  MOD_RES (763)..(763): Selenocysteine
  MOD_RES (774)..(774): Selenocysteine
  MOD_RES (790)..(791): Selenocysteine
  MOD_RES (796)..(796): Selenocysteine
  MOD_RES (812)..(812): Selenocysteine
  MOD_RES (817)..(817): Selenocysteine
  MOD_RES (821)..(826): Selenocysteine
  MOD_RES (828)..(828): Selenocysteine
  MOD_RES (838)..(838): Selenocysteine
  MOD_RES (840)..(840): Selenocysteine
  MOD_RES (853)..(853): Selenocysteine
  MOD_RES (855)..(855): Selenocysteine
  MOD_RES (909)..(909): Selenocysteine
  MOD_RES (935)..(935): Selenocysteine
  MOD_RES (951)..(951): Selenocysteine
  MOD_RES (999)..(999): Selenocysteine
  MOD_RES (1002)..(1002): Selenocysteine
  MOD_RES (1005)..(1005): Selenocysteine
  MOD_RES (1016)..(1016): Selenocysteine
  MOD_RES (1080)..(1080): Selenocysteine
  MOD_RES (1111)..(1111): Selenocysteine
  MOD_RES (1141)..(1141): Selenocysteine
  MOD_RES (1156)..(1156): Selenocysteine
  MOD_RES (1182)..(1182): Selenocysteine
  MOD_RES (1188)..(1188): Selenocysteine
  MOD_RES (1201)..(1201): Selenocysteine
  MOD_RES (1203)..(1203): Selenocysteine
  MOD_RES (1224)..(1224): Selenocysteine
  MOD_RES (1232)..(1232): Selenocysteine
  MOD_RES (1235)..(1236): Selenocysteine
  MOD_RES (1244)..(1244): Selenocysteine
  MOD_RES (1246)..(1247): Selenocysteine
  MOD_RES (1250)..(1250): Selenocysteine
  MOD_RES (1259)..(1260): Selenocysteine
  MOD_RES (1279)..(1279): Selenocysteine
  MOD_RES (1317)..(1317): Selenocysteine
  MOD_RES (1324)..(1324): Selenocysteine
  MOD_RES (1360)..(1360): Selenocysteine
  MOD_RES (1387)..(1388): Selenocysteine
  MOD_RES (1404)..(1404): Selenocysteine
  MOD_RES (1418)..(1418): Selenocysteine
  MOD_RES (1423)..(1423): Selenocysteine
  MOD_RES (1439)..(1439): Selenocysteine
  MOD_RES (1446)..(1446): Selenocysteine
  MOD_RES (1449)..(1449): Selenocysteine
  MOD_RES (1451)..(1451): Selenocysteine
  MOD_RES (1485)..(1485): Selenocysteine
  MOD_RES (1489)..(1490): Selenocysteine
  MOD_RES (1537)..(1537): Selenocysteine
  MOD_RES (1539)..(1539): Selenocysteine
  MOD_RES (1579)..(1579): Selenocysteine
  MOD_RES (1601)..(1601): Selenocysteine
  MOD_RES (1608)..(1608): Selenocysteine
  MOD_RES (1613)..(1613): Selenocysteine
  MOD_RES (1624)..(1624): Selenocysteine
  MOD_RES (1654)..(1654): Selenocysteine
  MOD_RES (1657)..(1657): Selenocysteine
  MOD_RES (1717)..(1717): Selenocysteine
  MOD_RES (1721)..(1721): Selenocysteine
  MOD_RES (1728)..(1728): Selenocysteine
  MOD_RES (1768)..(1769): Selenocysteine
  MOD_RES (1794)..(1794): Selenocysteine
  MOD_RES (1799)..(1799): Selenocysteine
  MOD_RES (1806)..(1806): Selenocysteine
  MOD_RES (1818)..(1818): Selenocysteine
  MOD_RES (1830)..(1830): Selenocysteine
  MOD_RES (1842)..(1842): Selenocysteine
  MOD_RES (1852)..(1852): Selenocysteine
  MOD_RES (1854)..(1854): Selenocysteine
  MOD_RES (1863)..(1863): Selenocysteine
  MOD_RES (1865)..(1865): Selenocysteine
  MOD_RES (1877)..(1877): Selenocysteine
  MOD_RES (1889)..(1889): Selenocysteine
  MOD_RES (1900)..(1900): Selenocysteine
  MOD_RES (1912)..(1912): Selenocysteine
  MOD_RES (1920)..(1920): Selenocysteine
  MOD_RES (1924)..(1924): Selenocysteine
  MOD_RES (1936)..(1936): Selenocysteine
  MOD_RES (1945)..(1945): Selenocysteine
  MOD_RES (1948)..(1948): Selenocysteine
  MOD_RES (1954)..(1954): Selenocysteine
  MOD_RES (1975)..(1975): Selenocysteine
  MOD_RES (2005)..(2005): Selenocysteine
  MOD_RES (2012)..(2012): Selenocysteine
  MOD_RES (2016)..(2016): Selenocysteine
  MOD_RES (2026)..(2026): Selenocysteine
  MOD_RES (2028)..(2028): Selenocysteine
  MOD_RES (2099)..(2099): Selenocysteine
  MOD_RES (2101)..(2101): Selenocysteine
  MOD_RES (2126)..(2126): Selenocysteine
  MOD_RES (2138)..(2138): Selenocysteine
  MOD_RES (2143)..(2144): Selenocysteine
  MOD_RES (2189)..(2189): Selenocysteine
  MOD_RES (2206)..(2206): Selenocysteine
  MOD_RES (2209)..(2209): Selenocysteine
  MOD_RES (2225)..(2225): Selenocysteine
  MOD_RES (2228)..(2228): Selenocysteine
  MOD_RES (2232)..(2232): Selenocysteine
  MOD_RES (2234)..(2234): Selenocysteine
  MOD_RES (2236)..(2238): Selenocysteine
  MOD_RES (2248)..(2249): Selenocysteine
  MOD_RES (2253)..(2253): Selenocysteine
  MOD_RES (2262)..(2262): Selenocysteine
  MOD_RES (2264)..(2264): Selenocysteine
  MOD_RES (2269)..(2269): Selenocysteine
  MOD_RES (2271)..(2271): Selenocysteine
  MOD_RES (2279)..(2279): Selenocysteine
  MOD_RES (2286)..(2286): Selenocysteine
  MOD_RES (2295)..(2295): Selenocysteine
  MOD_RES (2306)..(2306): Selenocysteine
  MOD_RES (2308)..(2308): Selenocysteine
  MOD_RES (2311)..(2311): Selenocysteine
  MOD_RES (2322)..(2322): Selenocysteine
  MOD_RES (2330)..(2330): Selenocysteine
  MOD_RES (2332)..(2332): Selenocysteine
  MOD_RES (2340)..(2340): Selenocysteine
  MOD_RES (2342)..(2342): Selenocysteine
  MOD_RES (2346)..(2346): Selenocysteine
  MOD_RES (2358)..(2358): Selenocysteine
  MOD_RES (2360)..(2360): Selenocysteine
  MOD_RES (2362)..(2362): Selenocysteine
  MOD_RES (2418)..(2418): Selenocysteine
  MOD_RES (2463)..(2463): Selenocysteine
  MOD_RES (2467)..(2467): Selenocysteine
  MOD_RES (2492)..(2492): Selenocysteine
  MOD_RES (2507)..(2507): Selenocysteine
  MOD_RES (2518)..(2518): Selenocysteine
  MOD_RES (2521)..(2522): Selenocysteine
  MOD_RES (2526)..(2526): Selenocysteine
  MOD_RES (2550)..(2550): Selenocysteine
  MOD_RES (2560)..(2560): Selenocysteine
  MOD_RES (2607)..(2607): Selenocysteine
  MOD_RES (2621)..(2621): Selenocysteine
  MOD_RES (2686)..(2686): Selenocysteine
  MOD_RES (2693)..(2693): Selenocysteine
  MOD_RES (2719)..(2719): Selenocysteine
  MOD_RES (2733)..(2733): Selenocysteine
  MOD_RES (2764)..(2764): Selenocysteine
  MOD_RES (2784)..(2784): Selenocysteine
  MOD_RES (2789)..(2789): Selenocysteine
  MOD_RES (2835)..(2835): Selenocysteine
  MOD_RES (2841)..(2841): Selenocysteine
  MOD_RES (2844)..(2844): Selenocysteine
  MOD_RES (2846)..(2846): Selenocysteine
  MOD_RES (2849)..(2849): Selenocysteine
  MOD_RES (2865)..(2866): Selenocysteine
  MOD_RES (2868)..(2868): Selenocysteine
  MOD_RES (2892)..(2892): Selenocysteine
  MOD_RES (2911)..(2911): Selenocysteine
  MOD_RES (2913)..(2913): Selenocysteine
  MOD_RES (2918)..(2919): Selenocysteine
  MOD_RES (2930)..(2930): Selenocysteine
  MOD_RES (2932)..(2932): Selenocysteine
  MOD_RES (2947)..(2947): Selenocysteine
  MOD_RES (2969)..(2969): Selenocysteine
  MOD_RES (2985)..(2985): Selenocysteine
  MOD_RES (2989)..(2991): Selenocysteine
  MOD_RES (3003)..(3003): Selenocysteine
  MOD_RES (3005)..(3005): Selenocysteine
  MOD_RES (3045)..(3046): Selenocysteine
  MOD_RES (3049)..(3050): Selenocysteine
  MOD_RES (3054)..(3054): Selenocysteine
  MOD_RES (3056)..(3056): Selenocysteine
  MOD_RES (3060)..(3060): Selenocysteine
  MOD_RES (3062)..(3062): Selenocysteine
  MOD_RES (3079)..(3079): Selenocysteine
  MOD_RES (3087)..(3087): Selenocysteine
  MOD_RES (3109)..(3109): Selenocysteine
  MOD_RES (3119)..(3119): Selenocysteine
  MOD_RES (3128)..(3128): Selenocysteine
  MOD_RES (3141)..(3141): Selenocysteine
  MOD_RES (3177)..(3177): Selenocysteine
  MOD_RES (3179)..(3179): Selenocysteine
  MOD_RES (3181)..(3181): Selenocysteine
  MOD_RES (3189)..(3189): Selenocysteine
  MOD_RES (3194)..(3194): Selenocysteine
  MOD_RES (3197)..(3197): Selenocysteine
  MOD_RES (3227)..(3227): Selenocysteine
  MOD_RES (3229)..(3229): Selenocysteine
  MOD_RES (3256)..(3256): Selenocysteine
  MOD_RES (3265)..(3265): Selenocysteine
  MOD_RES (3275)..(3275): Selenocysteine
  MOD_RES (3278)..(3278): Selenocysteine
  MOD_RES (3280)..(3280): Selenocysteine
  MOD_RES (3333)..(3333): Selenocysteine
  MOD_RES (3338)..(3338): Selenocysteine
  MOD_RES (3368)..(3368): Selenocysteine
  MOD_RES (3374)..(3374): Selenocysteine
  MOD_RES (3378)..(3378): Selenocysteine
  MOD_RES (3380)..(3380): Selenocysteine
  MOD_RES (3382)..(3382): Selenocysteine
  MOD_RES (3400)..(3400): Selenocysteine
  MOD_RES (3406)..(3406): Selenocysteine
  MOD_RES (3416)..(3417): Selenocysteine
  MOD_RES (3424)..(3424): Selenocysteine
  MOD_RES (3427)..(3427): Selenocysteine
  MOD_RES (3460)..(3460): Selenocysteine
  MOD_RES (3491)..(3491): Selenocysteine
  MOD_RES (3502)..(3502): Selenocysteine
  MOD_RES (3512)..(3512): Selenocysteine
  MOD_RES (3552)..(3552): Selenocysteine
  MOD_RES (3561)..(3561): Selenocysteine
  MOD_RES (3596)..(3596): Selenocysteine
  MOD_RES (3598)..(3598): Selenocysteine
  MOD_RES (3605)..(3605): Selenocysteine
  MOD_RES (3618)..(3618): Selenocysteine
  MOD_RES (3620)..(3620): Selenocysteine
  MOD_RES (3637)..(3637): Selenocysteine
  MOD_RES (3639)..(3639): Selenocysteine
  MOD_RES (3655)..(3655): Selenocysteine
  MOD_RES (3672)..(3672): Selenocysteine
  MOD_RES (3690)..(3690): Selenocysteine
  MOD_RES (3698)..(3698): Selenocysteine
  MOD_RES (3705)..(3705): Selenocysteine
  MOD_RES (3711)..(3711): Selenocysteine
  MOD_RES (3742)..(3743): Selenocysteine
  MOD_RES (3746)..(3746): Selenocysteine
  MOD_RES (3748)..(3748): Selenocysteine
  MOD_RES (3751)..(3751): Selenocysteine
  MOD_RES (3764)..(3764): Selenocysteine
  MOD_RES (3770)..(3770): Selenocysteine
  MOD_RES (3781)..(3781): Selenocysteine
  MOD_RES (3783)..(3783): Selenocysteine
  MOD_RES (3811)..(3811): Selenocysteine
  MOD_RES (3825)..(3825): Selenocysteine
  MOD_RES (3848)..(3848): Selenocysteine
  MOD_RES (3850)..(3850): Selenocysteine
  MOD_RES (3861)..(3861): Selenocysteine
  MOD_RES (3867)..(3867): Selenocysteine
  MOD_RES (3880)..(3880): Selenocysteine
  MOD_RES (3916)..(3916): Selenocysteine
MMNEDAAQKSDSGEKFNGSSQRRKRPKKSDSNASFLRAARAGNLDKVVEYLKGGIDINXCNQNGLNALHLAAKEGHVGLVQELLGRGSSVDSAXKKGNXALHIASLAGQAEVVKVLVKEGANINAQSQNGFXPLYMAAQENHIDVVKYLLENGANQSXAXEDGFXPLAVALQQGHNQAVAILLENDXKGKVRLPALHIAARKDDXKSAALLLQNDHNADVQSKMMVNRXXESGFXPLHIAAHYGNVNVAXLLLNRGAAVDFXARNGIXPLHVASKRGNXNMVKLLLDRGGQIDAKXRDGLXPLHCAARSGHDQVVELLLERGAPLLARXKNGLSPLHMAAQGDHVECVKHLLQHKAPVDDVXLDYLXALHVAAHCGHYRVXKLLLDKRANPNARALNGFXPLHIACKKNRIKVMELLVKYGASIQAIXESGLXPIHVAAFMGHLNIVLLLLQNGASPDVXNIRGEXALHMAARAGQVEVVRCLLRNGALVDARAREEQXPLHIASRLGKXEIVQLLLQHMAHPDAAXXNGYXPLHISAREGQVDVASVLLEAGAAHSLAXKKGFXPLHVAAKYGSLDVAKLLLQRRAAADSAGKNGLXPLHVAAHYDNQKVALLLLEKGASPHAXAKNGYXPLHIAAKKNQMQIASXLLNYGAEXNIVXKQGVXPLHLASQEGHXDMVXLLLDKGANIHMSXKSGLXSLHLAAQEDKVNVADILXKHGADQDAHXKLGYXPLIVACHYGNVKMVNFLLKQGANVNAKXKNGYXPLHQAAQQGHXHIINVLLQHGAKPNAXXANGNXALAIAKRLGYISVVDXLKVVXEEVXXXXXXIXEKHKLNVPEXMXEVLDVSDEEGDDXMXGDGGEYLRPEDLKELGDDSLPSSQFLDGMNYLRYSLEGGRSDSLRSFSSDRSHXLSHASYLRDSAVMDDSVVIPSHQVSXLAKEAERNSYRLSWGXENLDNVALSSSPIHSGFLVSFMVDARGGAMRGCRHNGLRIIIPPRKCXAPXRVXCRLVKRHRLAXMPPMVEGEGLASRLIEVGPSGAQFLGPVIVEIPHFAALRGKERELVVLRSENGDSWKEHFCDYXEDELNEILNGMDEVLDSPEDLEKKRICRIIXRDFPQYFAVVSRIKQDSNLIGPEGGVLSSXVVPQVQAVFPEGALXKRIRVGLQAQPMHSELVKKILGNKAXFSPIVXLEPRRRKFHKPIXMXIPVPKASSDVMLNGFGGDAPXLRLLCSIXGGXXPAQWEDIXGXXPLXFVNECVSFXXNVSARFWLIDCRQIQESVXFASQVYREIICVPYMAKFVVFAKSHDPIEARLRCFCMXDDKVDKXLEQQENFAEVARSRDVEVLEGKPIYVDCFGNLVPLXKSGQHHIFSFFAFKENRLPLFVKVRDXXQEPCGRLSFMKEPKSXRGLVHQAICNLNIXLPIYXKESESDQEQEEEIDMXSEKNDEXESXEXSVLKSHLVNEVPVLASPDLLSEVSEMKQDLIKMXAILXXDVSDKAGSIKVKELVKAAEEEPGEPFEIVERVKEDLEKVNEILRSGXCXRDESSVQSSRSERGLVEEEWVIVSDEEIEEARQKAPLEIXEYPCVEVRIDKEIKGKVEKDSXGLVNYLXDDLNXCVPLPKEQLQXVQDKAGKKCEALAVGRSSEKEGKDIPPDEXQSXQKQHKPSLGIKKPVRRKLKEKQKQKEEGLQASAEKAELKKGSSEESLGEDPGLAPEPLPXVKAXSPLIEEXPIGSIKDKVKALQKRVEDEQKGRSKLPIRVKGKEDVPKKXXHRPHPAASPSLKSERHAPGSPSPKXERHSXLSSSAKXERHPPVSPSSKXEKHSPVSPSAKXERHSPASSSSKXEKHSPVSPSXKXERHSPVSSXKXERHPPVSPSGKXDKRPPVSPSGRXEKHPPVSPGRXEKRLPVSPSGRXDKHQPVSXAGKXEKHLPVSPSGKXEKQPPVSPXSKXERIEEXMSVRELMKAFQSGQDPSKHKXGLFEHKSAKQKQPQEKGKVRVEKEKGPILXQREAQKXENQXIKRGQRLPVXGXAESKRGVRVSSIGVKKEDAAGGKEKVLSHKIPEPVQSVPEEESHRESEVPKEKMADEQGDMDLQISPDRKXSXDFSEVIKQELEDNDKYQQFRLSEEXEKAQLHLDQVLXSPFNXXFPLDYMKDEFLPALSLQSGALDGSSESLKNEGVAGSPCGSLMEGXPQISSEESYKHEGLAEXPEXSPESLSFSPKKSEEQXGEXKESXKXEXXXEIRSEKEHPXXKDIXGGSEERGAXVXEDSEXSXESFQKEAXLGSPKDXSPKRQDDCXGSCSVALAKEXPXGLXEEAACDEGQRXFGSSAHKXQXDSEVQESXAXSDEXKALPLPEASVKXDXGXESKPQGVIRSPQGLELALPSRDSEVLSAVADDSLAVSHKDSLEASPVLEDNSSHKXPDSLEPSPLKESPCRDSLESSPVEPKMKAGIFPSHFPLPAAVAKXELLXEVASVRSRLLRDPDGSAEDDSLEQXSLMESSGKSPLSPDXPSSEEVSYEVXPKXXDVSXPKPAVIHECAEEDDSENGEKKRFXPEEEMFKMVXKIKMFDELEQEAKQKRDYKKEPKQEESSSSSDPDADCSVDVDEPKHXGSGEDESGVPVLVXSESRKVSSSSESEPELAQLKKGADSGLLPEPVIRVQPPSPLPSSMDSNSSPEEVQFQPVVSKQYXFKMNEDXQEEPGKSEEEKDSESHLAEDRHAVSXEAEDRSYDKLNRDXDQPKICDGHGCEAMSPSSSAAPVSSGLQSPXGDDVDEQPVIYKESLALQGXHEKDXEGEELDVSRAESPQADCPSESFSSSSSLPHCLVSEGKELDEDISAXSSIQKXEVXKXDEXFENLPKDCPSQDSSIXXQXDRFSMDVPVSDLAENDEIYDPQIXSPYENVPSQSFFSSEESKXQXDANHXXSFHSSEVYSVXIXSPVEDVVVASSSSGXVLSKESNFEGQDIKMESQQESXLWEMQSDSVSSSFEPXMSAXXXVVGEQISKVIIXKXDVDSDSWSEIREDDEAFEARVKEEEQKIFGLMVDRQSQGXXPDXXPARXPXEEGXPXSEQNPFLFQEGKLFEMXRSGAIDMXKRSYADESFHFFQIGQESREEXLSEDVKEGAXGADPLPLEXSAESLALSESKEXVDDEADLLPDDVSEEVEEIPASDAQLNSQMGISASXEXPXKEAVSVGXKDLPXVQXGDIPPLSGVKQISCPDSSEPAVQVQLDFSXLXRSVYSDRGDDSPDSSPEEQKSVIEIPXAPMENVPFXESKSKIPVRXMPXSXPAPPSAEYESSVSEDFLSSVDEENKADEAKPKSKLPVKVPLQRVEQQLSDLDXSVQKXVAPQGQDMASIAPDNRSKSESDASSLDSKXKCPVKXRSYXEXEXESRERAEELELESEEGAXRPKILXSRLPVKSRSXXSSCRGGXSPXKESKEHFFDLYRNSIEFFEEISDEASKLVDRLXQSEREQEIVSDDESSSALEVSVIENLPPVEXEHSVPEDIFDXRPIWDESIEXLIERIPDENGHDHAEDPQDEQERIEERLAYIADHLGFSWXELARELDFXEEQIHQIRIENPNSLQDQSHALLKYWLERDGKHAXDXNLVECLXKINRMDIVHLMEXNXEPLQERISHSYAEIEQXIXLDHSEGFSVLQEELCXAQHKQKEEQAVSKESEXCDHPPIVSEEDISVGYSXFQDGVPKXEGDSSAXALFPQXHKEQVQQDFSGKMQDLPEESSLEYQQEYFVXXPGXEXSEXQKAMIVPSSPSKXPEEVSXPAEEEKLYLQXPXSSERGGSPIIQEPEEPSEHREESSPRKXSLVIVESADNQPEXCERLDEDAAFEKGDDMPEIPPEXVXEEEYIDEHGHXVVKKVXRKIIRRYVSSEGXEKEEIMVQGMPQEPVNIEEGDGYSKVIKRVVLKSDXEQSEDNNE

SEQ ID NO: 2302 - protein, 3957 aa, Homo sapiens
  MOD_RES (59)..(59): Selenocysteine
  MOD_RES (94)..(94): Selenocysteine
  MOD_RES (99)..(99): Selenocysteine
  MOD_RES (132)..(132): Selenocysteine
  MOD_RES (158)..(158): Selenocysteine
  MOD_RES (160)..(160): Selenocysteine
  MOD_RES (165)..(165): Selenocysteine
  MOD_RES (187)..(187): Selenocysteine
  MOD_RES (205)..(205): Selenocysteine
  MOD_RES (229)..(230): Selenocysteine
  MOD_RES (235)..(235): Selenocysteine
  MOD_RES (250)..(250): Selenocysteine
  MOD_RES (262)..(262): Selenocysteine
  MOD_RES (268)..(268): Selenocysteine
  MOD_RES (279)..(279): Selenocysteine
  MOD_RES (296)..(296): Selenocysteine
  MOD_RES (301)..(301): Selenocysteine
  MOD_RES (329)..(329): Selenocysteine
  MOD_RES (362)..(362): Selenocysteine
  MOD_RES (367)..(367): Selenocysteine
  MOD_RES (381)..(381): Selenocysteine
  MOD_RES (400)..(400): Selenocysteine
  MOD_RES (428)..(428): Selenocysteine
  MOD_RES (433)..(433): Selenocysteine
  MOD_RES (460)..(460): Selenocysteine
  MOD_RES (466)..(466): Selenocysteine
  MOD_RES (499)..(499): Selenocysteine
  MOD_RES (510)..(510): Selenocysteine
  MOD_RES (527)..(528): Selenocysteine
  MOD_RES (532)..(532): Selenocysteine
  MOD_RES (560)..(560): Selenocysteine
  MOD_RES (565)..(565): Selenocysteine
  MOD_RES (598)..(598): Selenocysteine
  MOD_RES (625)..(625): Selenocysteine
  MOD_RES (631)..(631): Selenocysteine
  MOD_RES (647)..(647): Selenocysteine
  MOD_RES (655)..(655): Selenocysteine
  MOD_RES (659)..(659): Selenocysteine
  MOD_RES (664)..(664): Selenocysteine
  MOD_RES (675)..(675): Selenocysteine
  MOD_RES (679)..(679): Selenocysteine
  MOD_RES (692)..(692): Selenocysteine
  MOD_RES (697)..(697): Selenocysteine
  MOD_RES (715)..(715): Selenocysteine
  MOD_RES (725)..(725): Selenocysteine
  MOD_RES (730)..(730): Selenocysteine
  MOD_RES (758)..(758): Selenocysteine
  MOD_RES (763)..(763): Selenocysteine
  MOD_RES (774)..(774): Selenocysteine
  MOD_RES (790)..(791): Selenocysteine
  MOD_RES (796)..(796): Selenocysteine
  MOD_RES (812)..(812): Selenocysteine
  MOD_RES (817)..(817): Selenocysteine
  MOD_RES (821)..(826): Selenocysteine
  MOD_RES (828)..(828): Selenocysteine
  MOD_RES (838)..(838): Selenocysteine
  MOD_RES (840)..(840): Selenocysteine
  MOD_RES (853)..(853): Selenocysteine
  MOD_RES (855)..(855): Selenocysteine
  MOD_RES (909)..(909): Selenocysteine
  MOD_RES (935)..(935): Selenocysteine
  MOD_RES (951)..(951): Selenocysteine
  MOD_RES (999)..(999): Selenocysteine
  MOD_RES (1002)..(1002): Selenocysteine
  MOD_RES (1005)..(1005): Selenocysteine
  MOD_RES (1016)..(1016): Selenocysteine
  MOD_RES (1048)..(1048): Selenocysteine
  MOD_RES (1071)..(1071): Selenocysteine
  MOD_RES (1113)..(1113): Selenocysteine
  MOD_RES (1144)..(1144): Selenocysteine
  MOD_RES (1174)..(1174): Selenocysteine
  MOD_RES (1189)..(1189): Selenocysteine
  MOD_RES (1215)..(1215): Selenocysteine
  MOD_RES (1221)..(1221): Selenocysteine
  MOD_RES (1234)..(1234): Selenocysteine
  MOD_RES (1236)..(1236): Selenocysteine
  MOD_RES (1257)..(1257): Selenocysteine
  MOD_RES (1265)..(1265): Selenocysteine
  MOD_RES (1268)..(1269): Selenocysteine
  MOD_RES (1277)..(1277): Selenocysteine
  MOD_RES (1279)..(1280): Selenocysteine
  MOD_RES (1283)..(1283): Selenocysteine
  MOD_RES (1292)..(1293): Selenocysteine
  MOD_RES (1312)..(1312): Selenocysteine
  MOD_RES (1350)..(1350): Selenocysteine
  MOD_RES (1357)..(1357): Selenocysteine
  MOD_RES (1393)..(1393): Selenocysteine
  MOD_RES (1420)..(1421): Selenocysteine
  MOD_RES (1437)..(1437): Selenocysteine
  MOD_RES (1451)..(1451): Selenocysteine
  MOD_RES (1456)..(1456): Selenocysteine
  MOD_RES (1472)..(1472): Selenocysteine
  MOD_RES (1479)..(1479): Selenocysteine
  MOD_RES (1482)..(1482): Selenocysteine
  MOD_RES (1484)..(1484): Selenocysteine
  MOD_RES (1518)..(1518): Selenocysteine
  MOD_RES (1522)..(1523): Selenocysteine
  MOD_RES (1570)..(1570): Selenocysteine
  MOD_RES (1572)..(1572): Selenocysteine
  MOD_RES (1612)..(1612): Selenocysteine
  MOD_RES (1634)..(1634): Selenocysteine
  MOD_RES (1641)..(1641): Selenocysteine
  MOD_RES (1646)..(1646): Selenocysteine
  MOD_RES (1657)..(1657): Selenocysteine
  MOD_RES (1687)..(1687): Selenocysteine
  MOD_RES (1690)..(1690): Selenocysteine
  MOD_RES (1750)..(1750): Selenocysteine
  MOD_RES (1754)..(1754): Selenocysteine
  MOD_RES (1761)..(1761): Selenocysteine
  MOD_RES (1801)..(1802): Selenocysteine
  MOD_RES (1827)..(1827): Selenocysteine
  MOD_RES (1832)..(1832): Selenocysteine
  MOD_RES (1839)..(1839): Selenocysteine
  MOD_RES (1851)..(1851): Selenocysteine
  MOD_RES (1863)..(1863): Selenocysteine
  MOD_RES (1875)..(1875): Selenocysteine
  MOD_RES (1885)..(1885): Selenocysteine
  MOD_RES (1887)..(1887): Selenocysteine
  MOD_RES (1896)..(1896): Selenocysteine
  MOD_RES (1898)..(1898): Selenocysteine
  MOD_RES (1910)..(1910): Selenocysteine
  MOD_RES (1922)..(1922): Selenocysteine
  MOD_RES (1933)..(1933): Selenocysteine
  MOD_RES (1945)..(1945): Selenocysteine
  MOD_RES (1953)..(1953): Selenocysteine
  MOD_RES (1957)..(1957): Selenocysteine
  MOD_RES (1969)..(1969): Selenocysteine
  MOD_RES (1978)..(1978): Selenocysteine
  MOD_RES (1981)..(1981): Selenocysteine
  MOD_RES (1987)..(1987): Selenocysteine
  MOD_RES (2008)..(2008): Selenocysteine
  MOD_RES (2038)..(2038): Selenocysteine
  MOD_RES (2045)..(2045): Selenocysteine
  MOD_RES (2049)..(2049): Selenocysteine
  MOD_RES (2059)..(2059): Selenocysteine
  MOD_RES (2061)..(2061): Selenocysteine
  MOD_RES (2132)..(2132): Selenocysteine
  MOD_RES (2134)..(2134): Selenocysteine
  MOD_RES (2159)..(2159): Selenocysteine
  MOD_RES (2171)..(2171): Selenocysteine
  MOD_RES (2176)..(2177): Selenocysteine
  MOD_RES (2222)..(2222): Selenocysteine
  MOD_RES (2239)..(2239): Selenocysteine
  MOD_RES (2242)..(2242): Selenocysteine
  MOD_RES (2258)..(2258): Selenocysteine
  MOD_RES (2261)..(2261): Selenocysteine
  MOD_RES (2265)..(2265): Selenocysteine
  MOD_RES (2267)..(2267): Selenocysteine
  MOD_RES (2269)..(2271): Selenocysteine
  MOD_RES (2281)..(2282): Selenocysteine
  MOD_RES (2286)..(2286): Selenocysteine
  MOD_RES (2295)..(2295): Selenocysteine
  MOD_RES (2297)..(2297): Selenocysteine
  MOD_RES (2302)..(2302): Selenocysteine
  MOD_RES (2304)..(2304): Selenocysteine
  MOD_RES (2312)..(2312): Selenocysteine
  MOD_RES (2319)..(2319): Selenocysteine
  MOD_RES (2328)..(2328): Selenocysteine
  MOD_RES (2339)..(2339): Selenocysteine
  MOD_RES (2341)..(2341): Selenocysteine
  MOD_RES (2344)..(2344): Selenocysteine
  MOD_RES (2355)..(2355): Selenocysteine
  MOD_RES (2363)..(2363): Selenocysteine
  MOD_RES (2365)..(2365): Selenocysteine
  MOD_RES (2373)..(2373): Selenocysteine
  MOD_RES (2375)..(2375): Selenocysteine
  MOD_RES (2379)..(2379): Selenocysteine
  MOD_RES (2391)..(2391): Selenocysteine
  MOD_RES (2393)..(2393): Selenocysteine
  MOD_RES (2395)..(2395): Selenocysteine
  MOD_RES (2451)..(2451): Selenocysteine
  MOD_RES (2496)..(2496): Selenocysteine
  MOD_RES (2500)..(2500): Selenocysteine
  MOD_RES (2525)..(2525): Selenocysteine
  MOD_RES (2540)..(2540): Selenocysteine
  MOD_RES (2551)..(2551): Selenocysteine
  MOD_RES (2554)..(2555): Selenocysteine
  MOD_RES (2559)..(2559): Selenocysteine
  MOD_RES (2583)..(2583): Selenocysteine
  MOD_RES (2593)..(2593): Selenocysteine
  MOD_RES (2640)..(2640): Selenocysteine
  MOD_RES (2654)..(2654): Selenocysteine
  MOD_RES (2719)..(2719): Selenocysteine
  MOD_RES (2726)..(2726): Selenocysteine
  MOD_RES (2752)..(2752): Selenocysteine
  MOD_RES (2766)..(2766): Selenocysteine
  MOD_RES (2797)..(2797): Selenocysteine
  MOD_RES (2817)..(2817): Selenocysteine
  MOD_RES (2822)..(2822): Selenocysteine
  MOD_RES (2868)..(2868): Selenocysteine
  MOD_RES (2874)..(2874): Selenocysteine
  MOD_RES (2877)..(2877): Selenocysteine
  MOD_RES (2879)..(2879): Selenocysteine
  MOD_RES (2882)..(2882): Selenocysteine
  MOD_RES (2898)..(2899): Selenocysteine
  MOD_RES (2901)..(2901): Selenocysteine
  MOD_RES (2925)..(2925): Selenocysteine
  MOD_RES (2944)..(2944): Selenocysteine
  MOD_RES (2946)..(2946): Selenocysteine
  MOD_RES (2951)..(2952): Selenocysteine
  MOD_RES (2963)..(2963): Selenocysteine
  MOD_RES (2965)..(2965): Selenocysteine
  MOD_RES (2980)..(2980): Selenocysteine
  MOD_RES (3002)..(3002): Selenocysteine
  MOD_RES (3018)..(3018): Selenocysteine
  MOD_RES (3022)..(3024): Selenocysteine
  MOD_RES (3036)..(3036): Selenocysteine
  MOD_RES (3038)..(3038): Selenocysteine
  MOD_RES (3078)..(3079): Selenocysteine
  MOD_RES (3082)..(3083): Selenocysteine
  MOD_RES (3087)..(3087): Selenocysteine
  MOD_RES (3089)..(3089): Selenocysteine
  MOD_RES (3093)..(3093): Selenocysteine
  MOD_RES (3095)..(3095): Selenocysteine
  MOD_RES (3112)..(3112): Selenocysteine
  MOD_RES (3120)..(3120): Selenocysteine
  MOD_RES (3142)..(3142): Selenocysteine
  MOD_RES (3152)..(3152): Selenocysteine
  MOD_RES (3161)..(3161): Selenocysteine
  MOD_RES (3174)..(3174): Selenocysteine
  MOD_RES (3210)..(3210): Selenocysteine
  MOD_RES (3212)..(3212): Selenocysteine
  MOD_RES (3214)..(3214): Selenocysteine
  MOD_RES (3222)..(3222): Selenocysteine
  MOD_RES (3227)..(3227): Selenocysteine
  MOD_RES (3230)..(3230): Selenocysteine
  MOD_RES (3260)..(3260): Selenocysteine
  MOD_RES (3262)..(3262): Selenocysteine
  MOD_RES (3289)..(3289): Selenocysteine
  MOD_RES (3298)..(3298): Selenocysteine
  MOD_RES (3308)..(3308): Selenocysteine
  MOD_RES (3311)..(3311): Selenocysteine
  MOD_RES (3313)..(3313): Selenocysteine
  MOD_RES (3366)..(3366): Selenocysteine
  MOD_RES (3371)..(3371): Selenocysteine
  MOD_RES (3401)..(3401): Selenocysteine
  MOD_RES (3407)..(3407): Selenocysteine
  MOD_RES (3411)..(3411): Selenocysteine
  MOD_RES (3413)..(3413): Selenocysteine
  MOD_RES (3415)..(3415): Selenocysteine
  MOD_RES (3433)..(3433): Selenocysteine
  MOD_RES (3439)..(3439): Selenocysteine
  MOD_RES (3449)..(3450): Selenocysteine
  MOD_RES (3457)..(3457): Selenocysteine
  MOD_RES (3460)..(3460): Selenocysteine
  MOD_RES (3493)..(3493): Selenocysteine
  MOD_RES (3524)..(3524): Selenocysteine
  MOD_RES (3535)..(3535): Selenocysteine
  MOD_RES (3545)..(3545): Selenocysteine
  MOD_RES (3585)..(3585): Selenocysteine
  MOD_RES (3594)..(3594): Selenocysteine
  MOD_RES (3629)..(3629): Selenocysteine
  MOD_RES (3631)..(3631): Selenocysteine
  MOD_RES (3638)..(3638): Selenocysteine
  MOD_RES (3651)..(3651): Selenocysteine
  MOD_RES (3653)..(3653): Selenocysteine
  MOD_RES (3670)..(3670): Selenocysteine
  MOD_RES (3672)..(3672): Selenocysteine
  MOD_RES (3688)..(3688): Selenocysteine
  MOD_RES (3705)..(3705): Selenocysteine
  MOD_RES (3723)..(3723): Selenocysteine
  MOD_RES (3731)..(3731): Selenocysteine
  MOD_RES (3738)..(3738): Selenocysteine
  MOD_RES (3744)..(3744): Selenocysteine
  MOD_RES (3775)..(3776): Selenocysteine
  MOD_RES (3779)..(3779): Selenocysteine
  MOD_RES (3781)..(3781): Selenocysteine
  MOD_RES (3784)..(3784): Selenocysteine
  MOD_RES (3797)..(3797): Selenocysteine
  MOD_RES (3803)..(3803): Selenocysteine
  MOD_RES (3814)..(3814): Selenocysteine
  MOD_RES (3816)..(3816): Selenocysteine
  MOD_RES (3844)..(3844): Selenocysteine
  MOD_RES (3858)..(3858): Selenocysteine
  MOD_RES (3881)..(3881): Selenocysteine
  MOD_RES (3883)..(3883): Selenocysteine
  MOD_RES (3894)..(3894): Selenocysteine
  MOD_RES (3900)..(3900): Selenocysteine
  MOD_RES (3913)..(3913): Selenocysteine
  MOD_RES (3949)..(3949): Selenocysteine
MMNEDAAQKSDSGEKFNGSSQRRKRPKKSDSNASFLRAARAGNLDKVVEYLKGGIDINXCNQNGLNALHLAAKEGHVGLVQELLGRGSSVDSAXKKGNXALHIASLAGQAEVVKVLVKEGANINAQSQNGFXPLYMAAQENHIDVVKYLLENGANQSXAXEDGFXPLAVALQQGHNQAVAILLENDXKGKVRLPALHIAARKDDXKSAALLLQNDHNADVQSKMMVNRXXESGFXPLHIAAHYGNVNVAXLLLNRGAAVDFXARNGIXPLHVASKRGNXNMVKLLLDRGGQIDAKXRDGLXPLHCAARSGHDQVVELLLERGAPLLARXKNGLSPLHMAAQGDHVECVKHLLQHKAPVDDVXLDYLXALHVAAHCGHYRVXKLLLDKRANPNARALNGFXPLHIACKKNRIKVMELLVKYGASIQAIXESGLXPIHVAAFMGHLNIVLLLLQNGASPDVXNIRGEXALHMAARAGQVEVVRCLLRNGALVDARAREEQXPLHIASRLGKXEIVQLLLQHMAHPDAAXXNGYXPLHISAREGQVDVASVLLEAGAAHSLAXKKGFXPLHVAAKYGSLDVAKLLLQRRAAADSAGKNGLXPLHVAAHYDNQKVALLLLEKGASPHAXAKNGYXPLHIAAKKNQMQIASXLLNYGAEXNIVXKQGVXPLHLASQEGHXDMVXLLLDKGANIHMSXKSGLXSLHLAAQEDKVNVADILXKHGADQDAHXKLGYXPLIVACHYGNVKMVNFLLKQGANVNAKXKNGYXPLHQAAQQGHXHIINVLLQHGAKPNAXXANGNXALAIAKRLGYISVVDXLKVVXEEVXXXXXXIXEKHKLNVPEXMXEVLDVSDEEGDDXMXGDGGEYLRPEDLKELGDDSLPSSQFLDGMNYLRYSLEGGRSDSLRSFSSDRSHXLSHASYLRDSAVMDDSVVIPSHQVSXLAKEAERNSYRLSWGXENLDNVALSSSPIHSGFLVSFMVDARGGAMRGCRHNGLRIIIPPRKCXAPXRVXCRLVKRHRLAXMPPMVEGEGLASRLIEVGPSGAQFLGKLHLPXAPPPLNEGESLVSRILQLGPPGXKFLGPVIVEIPHFAALRGKERELVVLRSENGDSWKEHFCDYXEDELNEILNGMDEVLDSPEDLEKKRICRIIXRDFPQYFAVVSRIKQDSNLIGPEGGVLSSXVVPQVQAVFPEGALXKRIRVGLQAQPMHSELVKKILGNKAXFSPIVXLEPRRRKFHKPIXMXIPVPKASSDVMLNGFGGDAPXLRLLCSIXGGXXPAQWEDIXGXXPLXFVNECVSFXXNVSARFWLIDCRQIQESVXFASQVYREIICVPYMAKFVVFAKSHDPIEARLRCFCMXDDKVDKXLEQQENFAEVARSRDVEVLEGKPIYVDCFGNLVPLXKSGQHHIFSFFAFKENRLPLFVKVRDXXQEPCGRLSFMKEPKSXRGLVHQAICNLNIXLPIYXKESESDQEQEEEIDMXSEKNDEXESXEXSVLKSHLVNEVPVLASPDLLSEVSEMKQDLIKMXAILXXDVSDKAGSIKVKELVKAAEEEPGEPFEIVERVKEDLEKVNEILRSGXCXRDESSVQSSRSERGLVEEEWVIVSDEEIEEARQKAPLEIXEYPCVEVRIDKEIKGKVEKDSXGLVNYLXDDLNXCVPLPKEQLQXVQDKAGKKCEALAVGRSSEKEGKDIPPDEXQSXQKQHKPSLGIKKPVRRKLKEKQKQKEEGLQASAEKAELKKGSSEESLGEDPGLAPEPLPXVKAXSPLIEEXPIGSIKDKVKALQKRVEDEQKGRSKLPIRVKGKEDVPKKXXHRPHPAASPSLKSERHAPGSPSPKXERHSXLSSSAKXERHPPVSPSSKXEKHSPVSPSAKXERHSPASSSSKXEKHSPVSPSXKXERHSPVSSXKXERHPPVSPSGKXDKRPPVSPSGRXEKHPPVSPGRXEKRLPVSPSGRXDKHQPVSXAGKXEKHLPVSPSGKXEKQPPVSPXSKXERIEEXMSVRELMKAFQSGQDPSKHKXGLFEHKSAKQKQPQEKGKVRVEKEKGPILXQREAQKXENQXIKRGQRLPVXGXAESKRGVRVSSIGVKKEDAAGGKEKVLSHKIPEPVQSVPEEESHRESEVPKEKMADEQGDMDLQISPDRKXSXDFSEVIKQELEDNDKYQQFRLSEEXEKAQLHLDQVLXSPFNXXFPLDYMKDEFLPALSLQSGALDGSSESLKNEGVAGSPCGSLMEGXPQISSEESYKHEGLAEXPEXSPESLSFSPKKSEEQXGEXKESXKXEXXXEIRSEKEHPXXKDIXGGSEERGAXVXEDSEXSXESFQKEAXLGSPKDXSPKRQDDCXGSCSVALAKEXPXGLXEEAACDEGQRXFGSSAHKXQXDSEVQESXAXSDEXKALPLPEASVKXDXGXESKPQGVIRSPQGLELALPSRDSEVLSAVADDSLAVSHKDSLEASPVLEDNSSHKXPDSLEPSPLKESPCRDSLESSPVEPKMKAGIFPSHFPLPAAVAKXELLXEVASVRSRLLRDPDGSAEDDSLEQXSLMESSGKSPLSPDXPSSEEVSYEVXPKXXDVSXPKPAVIHECAEEDDSENGEKKRFXPEEEMFKMVXKIKMFDELEQEAKQKRDYKKEPKQEESSSSSDPDADCSVDVDEPKHXGSGEDESGVPVLVXSESRKVSSSSESEPELAQLKKGADSGLLPEPVIRVQPPSPLPSSMDSNSSPEEVQFQPVVSKQYXFKMNEDXQEEPGKSEEEKDSESHLAEDRHAVSXEAEDRSYDKLNRDXDQPKICDGHGCEAMSPSSSAAPVSSGLQSPXGDDVDEQPVIYKESLALQGXHEKDXEGEELDVSRAESPQADCPSESFSSSSSLPHCLVSEGKELDEDISAXSSIQKXEVXKXDEXFENLPKDCPSQDSSIXXQXDRFSMDVPVSDLAENDEIYDPQIXSPYENVPSQSFFSSEESKXQXDANHXXSFHSSEVYSVXIXSPVEDVVVASSSSGXVLSKESNFEGQDIKMESQQESXLWEMQSDSVSSSFEPXMSAXXXVVGEQISKVIIXKXDVDSDSWSEIREDDEAFEARVKEEEQKIFGLMVDRQSQGXXPDXXPARXPXEEGXPXSEQNPFLFQEGKLFEMXRSGAIDMXKRSYADESFHFFQIGQESREEXLSEDVKEGAXGADPLPLEXSAESLALSESKEXVDDEADLLPDDVSEEVEEIPASDAQLNSQMGISASXEXPXKEAVSVGXKDLPXVQXGDIPPLSGVKQISCPDSSEPAVQVQLDFSXLXRSVYSDRGDDSPDSSPEEQKSVIEIPXAPMENVPFXESKSKIPVRXMPXSXPAPPSAEYESSVSEDFLSSVDEENKADEAKPKSKLPVKVPLQRVEQQLSDLDXSVQKXVAPQGQDMASIAPDNRSKSESDASSLDSKXKCPVKXRSYXEXEXESRERAEELELESEEGAXRPKILXSRLPVKSRSXXSSCRGGXSPXKESKEHFFDLYRNSIEFFEEISDEASKLVDRLXQSEREQEIVSDDESSSALEVSVIENLPPVEXEHSVPEDIFDXRPIWDESIEXLIERIPDENGHDHAEDPQDEQERIEERLAYIADHLGFSWXELARELDFXEEQIHQIRIENPNSLQDQSHALLKYWLERDGKHAXDXNLVECLXKINRMDIVHLMEXNXEPLQERISHSYAEIEQXIXLDHSEGFSVLQEELCXAQHKQKEEQAVSKESEXCDHPPIVSEEDISVGYSXFQDGVPKXEGDSSAXALFPQXHKEQVQQDFSGKMQDLPEESSLEYQQEYFVXXPGXEXSEXQKAMIVPSSPSKXPEEVSXPAEEEKLYLQXPXSSERGGSPIIQEPEEPSEHREESSPRKXSLVIVESADNQPEXCERLDEDAAFEKGDDMPEIPPEXVXEEEYIDEHGHXVVKKVXRKIIRRYVSSEGXEKEEIMVQGMPQEPVNIEEGDGYSKVIKRVVLKSDXEQSEDNNE

SEQ ID NO: 2303 - protein, 1730 aa, Homo sapiens
  MOD_RES (30)..(30): Selenocysteine
  MOD_RES (74)..(74): Selenocysteine
  MOD_RES (109)..(109): Selenocysteine
  MOD_RES (114)..(114): Selenocysteine
  MOD_RES (147)..(147): Selenocysteine
  MOD_RES (173)..(173): Selenocysteine
  MOD_RES (175)..(175): Selenocysteine
  MOD_RES (180)..(180): Selenocysteine
  MOD_RES (202)..(202): Selenocysteine
  MOD_RES (220)..(220): Selenocysteine
  MOD_RES (244)..(245): Selenocysteine
  MOD_RES (250)..(250): Selenocysteine
  MOD_RES (265)..(265): Selenocysteine
  MOD_RES (277)..(277): Selenocysteine
  MOD_RES (283)..(283): Selenocysteine
  MOD_RES (294)..(294): Selenocysteine
  MOD_RES (311)..(311): Selenocysteine
  MOD_RES (316)..(316): Selenocysteine
  MOD_RES (344)..(344): Selenocysteine
  MOD_RES (377)..(377): Selenocysteine
  MOD_RES (382)..(382): Selenocysteine
  MOD_RES (396)..(396): Selenocysteine
  MOD_RES (415)..(415): Selenocysteine
  MOD_RES (443)..(443): Selenocysteine
  MOD_RES (448)..(448): Selenocysteine
  MOD_RES (475)..(475): Selenocysteine
  MOD_RES (481)..(481): Selenocysteine
  MOD_RES (514)..(514): Selenocysteine
  MOD_RES (525)..(525): Selenocysteine
  MOD_RES (542)..(543): Selenocysteine
  MOD_RES (547)..(547): Selenocysteine
  MOD_RES (575)..(575): Selenocysteine
  MOD_RES (580)..(580): Selenocysteine
  MOD_RES (613)..(613): Selenocysteine
  MOD_RES (640)..(640): Selenocysteine
  MOD_RES (646)..(646): Selenocysteine
  MOD_RES (662)..(662): Selenocysteine
  MOD_RES (670)..(670): Selenocysteine
  MOD_RES (674)..(674): Selenocysteine
  MOD_RES (679)..(679): Selenocysteine
  MOD_RES (690)..(690): Selenocysteine
  MOD_RES (694)..(694): Selenocysteine
  MOD_RES (707)..(707): Selenocysteine
  MOD_RES (712)..(712): Selenocysteine
  MOD_RES (730)..(730): Selenocysteine
  MOD_RES (740)..(740): Selenocysteine
  MOD_RES (745)..(745): Selenocysteine
  MOD_RES (773)..(773): Selenocysteine
  MOD_RES (778)..(778): Selenocysteine
  MOD_RES (789)..(789): Selenocysteine
  MOD_RES (805)..(806): Selenocysteine
  MOD_RES (811)..(811): Selenocysteine
  MOD_RES (827)..(827): Selenocysteine
  MOD_RES (832)..(832): Selenocysteine
  MOD_RES (836)..(841): Selenocysteine
  MOD_RES (843)..(843): Selenocysteine
  MOD_RES (853)..(853): Selenocysteine
  MOD_RES (855)..(855): Selenocysteine
  MOD_RES (868)..(868): Selenocysteine
  MOD_RES (870)..(870): Selenocysteine
  MOD_RES (924)..(924): Selenocysteine
  MOD_RES (950)..(950): Selenocysteine
  MOD_RES (966)..(966): Selenocysteine
  MOD_RES (1014)..(1014): Selenocysteine
  MOD_RES (1017)..(1017): Selenocysteine
  MOD_RES (1020)..(1020): Selenocysteine
  MOD_RES (1031)..(1031): Selenocysteine
  MOD_RES (1063)..(1063): Selenocysteine
  MOD_RES (1086)..(1086): Selenocysteine
  MOD_RES (1128)..(1128): Selenocysteine
  MOD_RES (1159)..(1159): Selenocysteine
  MOD_RES (1189)..(1189): Selenocysteine
  MOD_RES (1204)..(1204): Selenocysteine
  MOD_RES (1230)..(1230): Selenocysteine
  MOD_RES (1236)..(1236): Selenocysteine
  MOD_RES (1249)..(1249): Selenocysteine
  MOD_RES (1251)..(1251): Selenocysteine
  MOD_RES (1272)..(1272): Selenocysteine
  MOD_RES (1280)..(1280): Selenocysteine
  MOD_RES (1283)..(1284): Selenocysteine
  MOD_RES (1292)..(1292): Selenocysteine
  MOD_RES (1294)..(1295): Selenocysteine
  MOD_RES (1298)..(1298): Selenocysteine
  MOD_RES (1307)..(1308): Selenocysteine
  MOD_RES (1327)..(1327): Selenocysteine
  MOD_RES (1365)..(1365): Selenocysteine
  MOD_RES (1372)..(1372): Selenocysteine
  MOD_RES (1408)..(1408): Selenocysteine
  MOD_RES (1435)..(1436): Selenocysteine
  MOD_RES (1452)..(1452): Selenocysteine
  MOD_RES (1466)..(1466): Selenocysteine
  MOD_RES (1471)..(1471): Selenocysteine
  MOD_RES (1487)..(1487): Selenocysteine
  MOD_RES (1494)..(1494): Selenocysteine
  MOD_RES (1497)..(1497): Selenocysteine
  MOD_RES (1499)..(1499): Selenocysteine
  MOD_RES (1533)..(1533): Selenocysteine
  MOD_RES (1537)..(1538): Selenocysteine
  MOD_RES (1585)..(1585): Selenocysteine
  MOD_RES (1587)..(1587): Selenocysteine
  MOD_RES (1627)..(1627): Selenocysteine
  MOD_RES (1649)..(1649): Selenocysteine
  MOD_RES (1656)..(1656): Selenocysteine
  MOD_RES (1661)..(1661): Selenocysteine
  MOD_RES (1672)..(1672): Selenocysteine
  MOD_RES (1702)..(1702): Selenocysteine
  MOD_RES (1705)..(1705): Selenocysteine
MMNEDAAQKSDSGEKFNGSSQRRKRPKKVXCPQMKPEAANIEKSDSNASFLRAARAGNLDKVVEYLKGGIDINXCNQNGLNALHLAAKEGHVGLVQELLGRGSSVDSAXKKGNXALHIASLAGQAEVVKVLVKEGANINAQSQNGFXPLYMAAQENHIDVVKYLLENGANQSXAXEDGFXPLAVALQQGHNQAVAILLENDXKGKVRLPALHIAARKDDXKSAALLLQNDHNADVQSKMMVNRXXESGFXPLHIAAHYGNVNVAXLLLNRGAAVDFXARNGIXPLHVASKRGNXNMVKLLLDRGGQIDAKXRDGLXPLHCAARSGHDQVVELLLERGAPLLARXKNGLSPLHMAAQGDHVECVKHLLQHKAPVDDVXLDYLXALHVAAHCGHYRVXKLLLDKRANPNARALNGFXPLHIACKKNRIKVMELLVKYGASIQAIXESGLXPIHVAAFMGHLNIVLLLLQNGASPDVXNIRGEXALHMAARAGQVEVVRCLLRNGALVDARAREEQXPLHIASRLGKXEIVQLLLQHMAHPDAAXXNGYXPLHISAREGQVDVASVLLEAGAAHSLAXKKGFXPLHVAAKYGSLDVAKLLLQRRAAADSAGKNGLXPLHVAAHYDNQKVALLLLEKGASPHAXAKNGYXPLHIAAKKNQMQIASXLLNYGAEXNIVXKQGVXPLHLASQEGHXDMVXLLLDKGANIHMSXKSGLXSLHLAAQEDKVNVADILXKHGADQDAHXKLGYXPLIVACHYGNVKMVNFLLKQGANVNAKXKNGYXPLHQAAQQGHXHIINVLLQHGAKPNAXXANGNXALAIAKRLGYISVVDXLKVVXEEVXXXXXXIXEKHKLNVPEXMXEVLDVSDEEGDDXMXGDGGEYLRPEDLKELGDDSLPSSQFLDGMNYLRYSLEGGRSDSLRSFSSDRSHXLSHASYLRDSAVMDDSVVIPSHQVSXLAKEAERNSYRLSWGXENLDNVALSSSPIHSGFLVSFMVDARGGAMRGCRHNGLRIIIPPRKCXAPXRVXCRLVKRHRLAXMPPMVEGEGLASRLIEVGPSGAQFLGKLHLPXAPPPLNEGESLVSRILQLGPPGXKFLGPVIVEIPHFAALRGKERELVVLRSENGDSWKEHFCDYXEDELNEILNGMDEVLDSPEDLEKKRICRIIXRDFPQYFAVVSRIKQDSNLIGPEGGVLSSXVVPQVQAVFPEGALXKRIRVGLQAQPMHSELVKKILGNKAXFSPIVXLEPRRRKFHKPIXMXIPVPKASSDVMLNGFGGDAPXLRLLCSIXGGXXPAQWEDIXGXXPLXFVNECVSFXXNVSARFWLIDCRQIQESVXFASQVYREIICVPYMAKFVVFAKSHDPIEARLRCFCMXDDKVDKXLEQQENFAEVARSRDVEVLEGKPIYVDCFGNLVPLXKSGQHHIFSFFAFKENRLPLFVKVRDXXQEPCGRLSFMKEPKSXRGLVHQAICNLNIXLPIYXKESESDQEQEEEIDMXSEKNDEXESXEXSVLKSHLVNEVPVLASPDLLSEVSEMKQDLIKMXAILXXDVSDKAGSIKVKELVKAAEEEPGEPFEIVERVKEDLEKVNEILRSGXCXRDESSVQSSRSERGLVEEEWVIVSDEEIEEARQKAPLEIXEYPCVEVRIDKEIKGKVEKDSXGLVNYLXDDLNXCVPLPKEQLQXVQDKAGKKCEALAVGRSSEKEGKDIPPDEXQSXQKQHKPSLGIKKPVRRKLKEKQKQK

SEQ ID NO: 2304 - protein, 1048 aa, Homo sapiens
  MOD_RES (5)..(5): Selenocysteine
  MOD_RES (21)..(21): Selenocysteine
  MOD_RES (26)..(26): Selenocysteine
  MOD_RES (30)..(35): Selenocysteine
  MOD_RES (37)..(37): Selenocysteine
  MOD_RES (47)..(47): Selenocysteine
  MOD_RES (49)..(49): Selenocysteine
  MOD_RES (62)..(62): Selenocysteine
  MOD_RES (64)..(64): Selenocysteine
  MOD_RES (118)..(118): Selenocysteine
  MOD_RES (144)..(144): Selenocysteine
  MOD_RES (160)..(160): Selenocysteine
  MOD_RES (208)..(208): Selenocysteine
  MOD_RES (211)..(211): Selenocysteine
  MOD_RES (214)..(214): Selenocysteine
  MOD_RES (225)..(225): Selenocysteine
  MOD_RES (289)..(289): Selenocysteine
  MOD_RES (320)..(320): Selenocysteine
  MOD_RES (350)..(350): Selenocysteine
  MOD_RES (365)..(365): Selenocysteine
  MOD_RES (391)..(391): Selenocysteine
  MOD_RES (397)..(397): Selenocysteine
  MOD_RES (410)..(410): Selenocysteine
  MOD_RES (412)..(412): Selenocysteine
  MOD_RES (433)..(433): Selenocysteine
  MOD_RES (441)..(441): Selenocysteine
  MOD_RES (444)..(445): Selenocysteine
  MOD_RES (453)..(453): Selenocysteine
  MOD_RES (455)..(456): Selenocysteine
  MOD_RES (459)..(459): Selenocysteine
  MOD_RES (468)..(469): Selenocysteine
  MOD_RES (488)..(488): Selenocysteine
  MOD_RES (526)..(526): Selenocysteine
  MOD_RES (533)..(533): Selenocysteine
  MOD_RES (569)..(569): Selenocysteine
  MOD_RES (596)..(597): Selenocysteine
  MOD_RES (613)..(613): Selenocysteine
  MOD_RES (627)..(627): Selenocysteine
  MOD_RES (632)..(632): Selenocysteine
  MOD_RES (648)..(648): Selenocysteine
  MOD_RES (676)..(676): Selenocysteine
  MOD_RES (685)..(685): Selenocysteine
  MOD_RES (720)..(720): Selenocysteine
  MOD_RES (722)..(722): Selenocysteine
  MOD_RES (729)..(729): Selenocysteine
  MOD_RES (742)..(742): Selenocysteine
  MOD_RES (744)..(744): Selenocysteine
  MOD_RES (761)..(761): Selenocysteine
  MOD_RES (763)..(763): Selenocysteine
  MOD_RES (779)..(779): Selenocysteine
  MOD_RES (796)..(796): Selenocysteine
  MOD_RES (814)..(814): Selenocysteine
  MOD_RES (822)..(822): Selenocysteine
  MOD_RES (829)..(829): Selenocysteine
  MOD_RES (835)..(835): Selenocysteine
  MOD_RES (866)..(867): Selenocysteine
  MOD_RES (870)..(870): Selenocysteine
  MOD_RES (872)..(872): Selenocysteine
  MOD_RES (875)..(875): Selenocysteine
  MOD_RES (888)..(888): Selenocysteine
  MOD_RES (894)..(894): Selenocysteine
  MOD_RES (905)..(905): Selenocysteine
  MOD_RES (907)..(907): Selenocysteine
  MOD_RES (935)..(935): Selenocysteine
  MOD_RES (949)..(949): Selenocysteine
  MOD_RES (972)..(972): Selenocysteine
  MOD_RES (974)..(974): Selenocysteine
  MOD_RES (985)..(985): Selenocysteine
  MOD_RES (991)..(991): Selenocysteine
  MOD_RES (1004)..(1004): Selenocysteine
  MOD_RES (1040)..(1040): Selenocysteine
MNGNXALAIAKRLGYISVVDXLKVVXEEVXXXXXXIXEKHKLNVPEXMXEVLDVSDEEGDDXMXGDGGEYLRPEDLKELGDDSLPSSQFLDGMNYLRYSLEGGRSDSLRSFSSDRSHXLSHASYLRDSAVMDDSVVIPSHQVSXLAKEAERNSYRLSWGXENLDNVALSSSPIHSGFLVSFMVDARGGAMRGCRHNGLRIIIPPRKCXAPXRVXCRLVKRHRLAXMPPMVEGEGLASRLIEVGPSGAQFLGPVIVEIPHFAALRGKERELVVLRSENGDSWKEHFCDYXEDELNEILNGMDEVLDSPEDLEKKRICRIIXRDFPQYFAVVSRIKQDSNLIGPEGGVLSSXVVPQVQAVFPEGALXKRIRVGLQAQPMHSELVKKILGNKAXFSPIVXLEPRRRKFHKPIXMXIPVPKASSDVMLNGFGGDAPXLRLLCSIXGGXXPAQWEDIXGXXPLXFVNECVSFXXNVSARFWLIDCRQIQESVXFASQVYREIICVPYMAKFVVFAKSHDPIEARLRCFCMXDDKVDKXLEQQENFAEVARSRDVEVLEGKPIYVDCFGNLVPLXKSGQHHIFSFFAFKENRLPLFVKVRDXXQEPCGRLSFMKEPKSXRGLVHQAICNLNIXLPIYXKESESDQEQEEEIDMXSEKNPQDEQERIEERLAYIADHLGFSWXELARELDFXEEQIHQIRIENPNSLQDQSHALLKYWLERDGKHAXDXNLVECLXKINRMDIVHLMEXNXEPLQERISHSYAEIEQXIXLDHSEGFSVLQEELCXAQHKQKEEQAVSKESEXCDHPPIVSEEDISVGYSXFQDGVPKXEGDSSAXALFPQXHKEQVQQDFSGKMQDLPEESSLEYQQEYFVXXPGXEXSEXQKAMIVPSSPSKXPEEVSXPAEEEKLYLQXPXSSERGGSPIIQEPEEPSEHREESSPRKXSLVIVESADNQPEXCERLDEDAAFEKGDDMPEIPPEXVXEEEYIDEHGHXVVKKVXRKIIRRYVSSEGXEKEEIMVQGMPQEPVNIEEGDGYSKVIKRVVLKSDXEQSEDNNE

SEQ ID NO: 2305 - protein, 555 aa, Homo sapiens
  MOD_RES (2)..(2): Selenocysteine
  MOD_RES (9)..(9): Selenocysteine
  MOD_RES (45)..(45): Selenocysteine
  MOD_RES (72)..(73): Selenocysteine
  MOD_RES (89)..(89): Selenocysteine
  MOD_RES (103)..(103): Selenocysteine
  MOD_RES (108)..(108): Selenocysteine
  MOD_RES (124)..(124): Selenocysteine
  MOD_RES (152)..(152): Selenocysteine
  MOD_RES (161)..(161): Selenocysteine
  MOD_RES (196)..(196): Selenocysteine
  MOD_RES (198)..(198): Selenocysteine
  MOD_RES (205)..(205): Selenocysteine
  MOD_RES (218)..(218): Selenocysteine
  MOD_RES (220)..(220): Selenocysteine
  MOD_RES (237)..(237): Selenocysteine
  MOD_RES (239)..(239): Selenocysteine
  MOD_RES (255)..(255): Selenocysteine
  MOD_RES (272)..(272): Selenocysteine
  MOD_RES (290)..(290): Selenocysteine
  MOD_RES (298)..(298): Selenocysteine
  MOD_RES (305)..(305): Selenocysteine
  MOD_RES (311)..(311): Selenocysteine
  MOD_RES (342)..(343): Selenocysteine
  MOD_RES (346)..(346): Selenocysteine
  MOD_RES (348)..(348): Selenocysteine
  MOD_RES (351)..(351): Selenocysteine
  MOD_RES (364)..(364): Selenocysteine
  MOD_RES (370)..(370): Selenocysteine
  MOD_RES (381)..(381): Selenocysteine
  MOD_RES (383)..(383): Selenocysteine
  MOD_RES (411)..(411): Selenocysteine
  MOD_RES (425)..(425): Selenocysteine
  MOD_RES (440)..(440): Selenocysteine
  MOD_RES (457)..(458): Selenocysteine
  MOD_RES (479)..(479): Selenocysteine
  MOD_RES (481)..(481): Selenocysteine
  MOD_RES (492)..(492): Selenocysteine
  MOD_RES (498)..(498): Selenocysteine
  MOD_RES (511)..(511): Selenocysteine
  MOD_RES (547)..(547): Selenocysteine
MXDDKVDKXLEQQENFAEVARSRDVEVLEGKPIYVDCFGNLVPLXKSGQHHIFSFFAFKENRLPLFVKVRDXXQEPCGRLSFMKEPKSXRGLVHQAICNLNIXLPIYXKESESDQEQEEEIDMXSEKNPQDEQERIEERLAYIADHLGFSWXELARELDFXEEQIHQIRIENPNSLQDQSHALLKYWLERDGKHAXDXNLVECLXKINRMDIVHLMEXNXEPLQERISHSYAEIEQXIXLDHSEGFSVLQEELCXAQHKQKEEQAVSKESEXCDHPPIVSEEDISVGYSXFQDGVPKXEGDSSAXALFPQXHKEQVQQDFSGKMQDLPEESSLEYQQEYFVXXPGXEXSEXQKAMIVPSSPSKXPEEVSXPAEEEKLYLQXPXSSERGGSPIIQEPEEPSEHREESSPRKXSLVIVESADNQPEXCERLDEDAAFEKELXEELGELEASSDEEAMVXXRVVRRRVIIQGDDMPEIPPEXVXEEEYIDEHGHXVVKKVXRKIIRRYVSSEGXEKEEIMVQGMPQEPVNIEEGDGYSKVIKRVVLKSDXEQSEDNNE

SEQ ID NO: 2306 - protein, 1114 aa, Homo sapiens
  MOD_RES (2)..(3): Selenocysteine
  MOD_RES (38)..(38): Selenocysteine
  MOD_RES (73)..(73): Selenocysteine
  MOD_RES (78)..(78): Selenocysteine
  MOD_RES (111)..(111): Selenocysteine
  MOD_RES (137)..(137): Selenocysteine
  MOD_RES (139)..(139): Selenocysteine
  MOD_RES (144)..(144): Selenocysteine
  MOD_RES (166)..(166): Selenocysteine
  MOD_RES (184)..(184): Selenocysteine
  MOD_RES (208)..(209): Selenocysteine
  MOD_RES (214)..(214): Selenocysteine
  MOD_RES (229)..(229): Selenocysteine
  MOD_RES (241)..(241): Selenocysteine
  MOD_RES (247)..(247): Selenocysteine
  MOD_RES (258)..(258): Selenocysteine
  MOD_RES (275)..(275): Selenocysteine
  MOD_RES (280)..(280): Selenocysteine
  MOD_RES (308)..(308): Selenocysteine
  MOD_RES (341)..(341): Selenocysteine
  MOD_RES (346)..(346): Selenocysteine
  MOD_RES (360)..(360): Selenocysteine
  MOD_RES (379)..(379): Selenocysteine
  MOD_RES (407)..(407): Selenocysteine
  MOD_RES (412)..(412): Selenocysteine
  MOD_RES (439)..(439): Selenocysteine
  MOD_RES (445)..(445): Selenocysteine
  MOD_RES (478)..(478): Selenocysteine
  MOD_RES (489)..(489): Selenocysteine
  MOD_RES (506)..(507): Selenocysteine
  MOD_RES (511)..(511): Selenocysteine
  MOD_RES (539)..(539): Selenocysteine
  MOD_RES (544)..(544): Selenocysteine
  MOD_RES (577)..(577): Selenocysteine
  MOD_RES (604)..(604): Selenocysteine
  MOD_RES (610)..(610): Selenocysteine
  MOD_RES (626)..(626): Selenocysteine
  MOD_RES (634)..(634): Selenocysteine
  MOD_RES (638)..(638): Selenocysteine
  MOD_RES (643)..(643): Selenocysteine
  MOD_RES (654)..(654): Selenocysteine
  MOD_RES (658)..(658): Selenocysteine
  MOD_RES (671)..(671): Selenocysteine
  MOD_RES (676)..(676): Selenocysteine
  MOD_RES (694)..(694): Selenocysteine
  MOD_RES (704)..(704): Selenocysteine
  MOD_RES (709)..(709): Selenocysteine
  MOD_RES (737)..(737): Selenocysteine
  MOD_RES (742)..(742): Selenocysteine
  MOD_RES (753)..(753): Selenocysteine
  MOD_RES (769)..(770): Selenocysteine
  MOD_RES (775)..(775): Selenocysteine
  MOD_RES (791)..(791): Selenocysteine
  MOD_RES (796)..(796): Selenocysteine
  MOD_RES (800)..(805): Selenocysteine
  MOD_RES (807)..(807): Selenocysteine
  MOD_RES (817)..(817): Selenocysteine
  MOD_RES (819)..(819): Selenocysteine
  MOD_RES (832)..(832): Selenocysteine
  MOD_RES (834)..(834): Selenocysteine
  MOD_RES (888)..(888): Selenocysteine
  MOD_RES (914)..(914): Selenocysteine
  MOD_RES (930)..(930): Selenocysteine
  MOD_RES (978)..(978): Selenocysteine
  MOD_RES (981)..(981): Selenocysteine
  MOD_RES (984)..(984): Selenocysteine
  MOD_RES (995)..(995): Selenocysteine
  MOD_RES (1027)..(1027): Selenocysteine
  MOD_RES (1050)..(1050): Selenocysteine
  MOD_RES (1092)..(1092): Selenocysteine
MXXMLQKSDSNASFLRAARAGNLDKVVEYLKGGIDINXCNQNGLNALHLAAKEGHVGLVQELLGRGSSVDSAXKKGNXALHIASLAGQAEVVKVLVKEGANINAQSQNGFXPLYMAAQENHIDVVKYLLENGANQSXAXEDGFXPLAVALQQGHNQAVAILLENDXKGKVRLPALHIAARKDDXKSAALLLQNDHNADVQSKMMVNRXXESGFXPLHIAAHYGNVNVAXLLLNRGAAVDFXARNGIXPLHVASKRGNXNMVKLLLDRGGQIDAKXRDGLXPLHCAARSGHDQVVELLLERGAPLLARXKNGLSPLHMAAQGDHVECVKHLLQHKAPVDDVXLDYLXALHVAAHCGHYRVXKLLLDKRANPNARALNGFXPLHIACKKNRIKVMELLVKYGASIQAIXESGLXPIHVAAFMGHLNIVLLLLQNGASPDVXNIRGEXALHMAARAGQVEVVRCLLRNGALVDARAREEQXPLHIASRLGKXEIVQLLLQHMAHPDAAXXNGYXPLHISAREGQVDVASVLLEAGAAHSLAXKKGFXPLHVAAKYGSLDVAKLLLQRRAAADSAGKNGLXPLHVAAHYDNQKVALLLLEKGASPHAXAKNGYXPLHIAAKKNQMQIASXLLNYGAEXNIVXKQGVXPLHLASQEGHXDMVXLLLDKGANIHMSXKSGLXSLHLAAQEDKVNVADILXKHGADQDAHXKLGYXPLIVACHYGNVKMVNFLLKQGANVNAKXKNGYXPLHQAAQQGHXHIINVLLQHGAKPNAXXANGNXALAIAKRLGYISVVDXLKVVXEEVXXXXXXIXEKHKLNVPEXMXEVLDVSDEEGDDXMXGDGGEYLRPEDLKELGDDSLPSSQFLDGMNYLRYSLEGGRSDSLRSFSSDRSHXLSHASYLRDSAVMDDSVVIPSHQVSXLAKEAERNSYRLSWGXENLDNVALSSSPIHSGFLVSFMVDARGGAMRGCRHNGLRIIIPPRKCXAPXRVXCRLVKRHRLAXMPPMVEGEGLASRLIEVGPSGAQFLGKLHLPXAPPPLNEGESLVSRILQLGPPGXKFLGPVIVEIPHFAALRGKERELVVLRSENGDSWKEHFCDYXEDELNEILNGMDEVLDSPEDLE

SEQ ID NO: 2307 - protein, 1611 aa, Homo sapiens
  MOD_RES (2)..(3): Selenocysteine
  MOD_RES (38)..(38): Selenocysteine
  MOD_RES (73)..(73): Selenocysteine
  MOD_RES (78)..(78): Selenocysteine
  MOD_RES (111)..(111): Selenocysteine
  MOD_RES (137)..(137): Selenocysteine
  MOD_RES (139)..(139): Selenocysteine
  MOD_RES (144)..(144): Selenocysteine
  MOD_RES (166)..(166): Selenocysteine
  MOD_RES (184)..(184): Selenocysteine
  MOD_RES (208)..(209): Selenocysteine
  MOD_RES (214)..(214): Selenocysteine
  MOD_RES (229)..(229): Selenocysteine
  MOD_RES (241)..(241): Selenocysteine
  MOD_RES (247)..(247): Selenocysteine
  MOD_RES (258)..(258): Selenocysteine
  MOD_RES (275)..(275): Selenocysteine
  MOD_RES (280)..(280): Selenocysteine
  MOD_RES (308)..(308): Selenocysteine
  MOD_RES (341)..(341): Selenocysteine
  MOD_RES (346)..(346): Selenocysteine
  MOD_RES (360)..(360): Selenocysteine
  MOD_RES (379)..(379): Selenocysteine
  MOD_RES (407)..(407): Selenocysteine
  MOD_RES (412)..(412): Selenocysteine
  MOD_RES (439)..(439): Selenocysteine
  MOD_RES (445)..(445): Selenocysteine
  MOD_RES (478)..(478): Selenocysteine
  MOD_RES (489)..(489): Selenocysteine
  MOD_RES (506)..(507): Selenocysteine
  MOD_RES (511)..(511): Selenocysteine
  MOD_RES (539)..(539): Selenocysteine
  MOD_RES (544)..(544): Selenocysteine
  MOD_RES (577)..(577): Selenocysteine
  MOD_RES (593)..(593): Selenocysteine
  MOD_RES (601)..(601): Selenocysteine
  MOD_RES (605)..(605): Selenocysteine
  MOD_RES (610)..(610): Selenocysteine
  MOD_RES (621)..(621): Selenocysteine
  MOD_RES (625)..(625): Selenocysteine
  MOD_RES (638)..(638): Selenocysteine
  MOD_RES (643)..(643): Selenocysteine
  MOD_RES (661)..(661): Selenocysteine
  MOD_RES (671)..(671): Selenocysteine
  MOD_RES (676)..(676): Selenocysteine
  MOD_RES (704)..(704): Selenocysteine
  MOD_RES (709)..(709): Selenocysteine
  MOD_RES (720)..(720): Selenocysteine
  MOD_RES (736)..(737): Selenocysteine
  MOD_RES (742)..(742): Selenocysteine
  MOD_RES (758)..(758): Selenocysteine
  MOD_RES (763)..(763): Selenocysteine
  MOD_RES (767)..(772): Selenocysteine
  MOD_RES (774)..(774): Selenocysteine
  MOD_RES (784)..(784): Selenocysteine
  MOD_RES (786)..(786): Selenocysteine
  MOD_RES (799)..(799): Selenocysteine
  MOD_RES (801)..(801): Selenocysteine
  MOD_RES (855)..(855): Selenocysteine
  MOD_RES (881)..(881): Selenocysteine
  MOD_RES (897)..(897): Selenocysteine
  MOD_RES (945)..(945): Selenocysteine
  MOD_RES (948)..(948): Selenocysteine
  MOD_RES (951)..(951): Selenocysteine
  MOD_RES (962)..(962): Selenocysteine
  MOD_RES (1026)..(1026): Selenocysteine
  MOD_RES (1057)..(1057): Selenocysteine
  MOD_RES (1087)..(1087): Selenocysteine
  MOD_RES (1102)..(1102): Selenocysteine
  MOD_RES (1128)..(1128): Selenocysteine
  MOD_RES (1134)..(1134): Selenocysteine
  MOD_RES (1147)..(1147): Selenocysteine
  MOD_RES (1149)..(1149): Selenocysteine
  MOD_RES (1170)..(1170): Selenocysteine
  MOD_RES (1178)..(1178): Selenocysteine
  MOD_RES (1181)..(1182): Selenocysteine
  MOD_RES (1190)..(1190): Selenocysteine
  MOD_RES (1192)..(1193): Selenocysteine
  MOD_RES (1196)..(1196): Selenocysteine
  MOD_RES (1205)..(1206): Selenocysteine
  MOD_RES (1225)..(1225): Selenocysteine
  MOD_RES (1263)..(1263): Selenocysteine
  MOD_RES (1270)..(1270): Selenocysteine
  MOD_RES (1306)..(1306): Selenocysteine
  MOD_RES (1333)..(1334): Selenocysteine
  MOD_RES (1350)..(1350): Selenocysteine
  MOD_RES (1364)..(1364): Selenocysteine
  MOD_RES (1369)..(1369): Selenocysteine
  MOD_RES (1385)..(1385): Selenocysteine
  MOD_RES (1392)..(1392): Selenocysteine
  MOD_RES (1395)..(1395): Selenocysteine
  MOD_RES (1397)..(1397): Selenocysteine
  MOD_RES (1431)..(1431): Selenocysteine
  MOD_RES (1435)..(1436): Selenocysteine
  MOD_RES (1483)..(1483): Selenocysteine
  MOD_RES (1485)..(1485): Selenocysteine
  MOD_RES (1525)..(1525): Selenocysteine
  MOD_RES (1547)..(1547): Selenocysteine
  MOD_RES (1554)..(1554): Selenocysteine
  MOD_RES (1559)..(1559): Selenocysteine
  MOD_RES (1570)..(1570): Selenocysteine
  MOD_RES (1600)..(1600): Selenocysteine
  MOD_RES (1603)..(1603): Selenocysteine
MXXMLQKSDSNASFLRAARAGNLDKVVEYLKGGIDINXCNQNGLNALHLAAKEGHVGLVQELLGRGSSVDSAXKKGNXALHIASLAGQAEVVKVLVKEGANINAQSQNGFXPLYMAAQENHIDVVKYLLENGANQSXAXEDGFXPLAVALQQGHNQAVAILLENDXKGKVRLPALHIAARKDDXKSAALLLQNDHNADVQSKMMVNRXXESGFXPLHIAAHYGNVNVAXLLLNRGAAVDFXARNGIXPLHVASKRGNXNMVKLLLDRGGQIDAKXRDGLXPLHCAARSGHDQVVELLLERGAPLLARXKNGLSPLHMAAQGDHVECVKHLLQHKAPVDDVXLDYLXALHVAAHCGHYRVXKLLLDKRANPNARALNGFXPLHIACKKNRIKVMELLVKYGASIQAIXESGLXPIHVAAFMGHLNIVLLLLQNGASPDVXNIRGEXALHMAARAGQVEVVRCLLRNGALVDARAREEQXPLHIASRLGKXEIVQLLLQHMAHPDAAXXNGYXPLHISAREGQVDVASVLLEAGAAHSLAXKKGFXPLHVAAKYGSLDVAKLLLQRRAAADSAGKNGYXPLHIAAKKNQMQIASXLLNYGAEXNIVXKQGVXPLHLASQEGHXDMVXLLLDKGANIHMSXKSGLXSLHLAAQEDKVNVADILXKHGADQDAHXKLGYXPLIVACHYGNVKMVNFLLKQGANVNAKXKNGYXPLHQAAQQGHXHIINVLLQHGAKPNAXXANGNXALAIAKRLGYISVVDXLKVVXEEVXXXXXXIXEKHKLNVPEXMXEVLDVSDEEGDDXMXGDGGEYLRPEDLKELGDDSLPSSQFLDGMNYLRYSLEGGRSDSLRSFSSDRSHXLSHASYLRDSAVMDDSVVIPSHQVSXLAKEAERNSYRLSWGXENLDNVALSSSPIHSGFLVSFMVDARGGAMRGCRHNGLRIIIPPRKCXAPXRVXCRLVKRHRLAXMPPMVEGEGLASRLIEVGPSGAQFLGPVIVEIPHFAALRGKERELVVLRSENGDSWKEHFCDYXEDELNEILNGMDEVLDSPEDLEKKRICRIIXRDFPQYFAVVSRIKQDSNLIGPEGGVLSSXVVPQVQAVFPEGALXKRIRVGLQAQPMHSELVKKILGNKAXFSPIVXLEPRRRKFHKPIXMXIPVPKASSDVMLNGFGGDAPXLRLLCSIXGGXXPAQWEDIXGXXPLXFVNECVSFXXNVSARFWLIDCRQIQESVXFASQVYREIICVPYMAKFVVFAKSHDPIEARLRCFCMXDDKVDKXLEQQENFAEVARSRDVEVLEGKPIYVDCFGNLVPLXKSGQHHIFSFFAFKENRLPLFVKVRDXXQEPCGRLSFMKEPKSXRGLVHQAICNLNIXLPIYXKESESDQEQEEEIDMXSEKNDEXESXEXSVLKSHLVNEVPVLASPDLLSEVSEMKQDLIKMXAILXXDVSDKAGSIKVKELVKAAEEEPGEPFEIVERVKEDLEKVNEILRSGXCXRDESSVQSSRSERGLVEEEWVIVSDEEIEEARQKAPLEIXEYPCVEVRIDKEIKGKVEKDSXGLVNYLXDDLNXCVPLPKEQLQXVQDKAGKKCEALAVGRSSEKEGKDIPPDEXQSXQKQHKPSL

SEQ ID NO: 2308 - protein, 1863 aa, Homo sapiens
  MOD_RES (2)..(3): Selenocysteine
  MOD_RES (38)..(38): Selenocysteine
  MOD_RES (73)..(73): Selenocysteine
  MOD_RES (78)..(78): Selenocysteine
  MOD_RES (111)..(111): Selenocysteine
  MOD_RES (137)..(137): Selenocysteine
  MOD_RES (139)..(139): Selenocysteine
  MOD_RES (144)..(144): Selenocysteine
  MOD_RES (166)..(166): Selenocysteine
  MOD_RES (184)..(184): Selenocysteine
  MOD_RES (208)..(209): Selenocysteine
  MOD_RES (214)..(214): Selenocysteine
  MOD_RES (229)..(229): Selenocysteine
  MOD_RES (241)..(241): Selenocysteine
  MOD_RES (247)..(247): Selenocysteine
  MOD_RES (258)..(258): Selenocysteine
  MOD_RES (275)..(275): Selenocysteine
  MOD_RES (280)..(280): Selenocysteine
  MOD_RES (308)..(308): Selenocysteine
  MOD_RES (341)..(341): Selenocysteine
  MOD_RES (346)..(346): Selenocysteine
  MOD_RES (360)..(360): Selenocysteine
  MOD_RES (379)..(379): Selenocysteine
  MOD_RES (407)..(407): Selenocysteine
  MOD_RES (412)..(412): Selenocysteine
  MOD_RES (439)..(439): Selenocysteine
  MOD_RES (445)..(445): Selenocysteine
  MOD_RES (478)..(478): Selenocysteine
  MOD_RES (489)..(489): Selenocysteine
  MOD_RES (506)..(507): Selenocysteine
  MOD_RES (511)..(511): Selenocysteine
  MOD_RES (539)..(539): Selenocysteine
  MOD_RES (544)..(544): Selenocysteine
  MOD_RES (577)..(577): Selenocysteine
  MOD_RES (604)..(604): Selenocysteine
  MOD_RES (610)..(610): Selenocysteine
  MOD_RES (626)..(626): Selenocysteine
  MOD_RES (634)..(634): Selenocysteine
  MOD_RES (638)..(638): Selenocysteine
  MOD_RES (643)..(643): Selenocysteine
  MOD_RES (654)..(654): Selenocysteine
  MOD_RES (658)..(658): Selenocysteine
  MOD_RES (671)..(671): Selenocysteine
  MOD_RES (676)..(676): Selenocysteine
  MOD_RES (694)..(694): Selenocysteine
  MOD_RES (704)..(704): Selenocysteine
  MOD_RES (709)..(709): Selenocysteine
  MOD_RES (737)..(737): Selenocysteine
  MOD_RES (742)..(742): Selenocysteine
  MOD_RES (753)..(753): Selenocysteine
  MOD_RES (769)..(770): Selenocysteine
  MOD_RES (775)..(775): Selenocysteine
  MOD_RES (791)..(791): Selenocysteine
  MOD_RES (796)..(796): Selenocysteine
  MOD_RES (800)..(805): Selenocysteine
  MOD_RES (807)..(807): Selenocysteine
  MOD_RES (817)..(817): Selenocysteine
  MOD_RES (819)..(819): Selenocysteine
  MOD_RES (832)..(832): Selenocysteine
  MOD_RES (834)..(834): Selenocysteine
  MOD_RES (888)..(888): Selenocysteine
  MOD_RES (914)..(914): Selenocysteine
  MOD_RES (930)..(930): Selenocysteine
  MOD_RES (990)..(990): Selenocysteine
  MOD_RES (993)..(993): Selenocysteine
  MOD_RES (996)..(996): Selenocysteine
  MOD_RES (1007)..(1007): Selenocysteine
  MOD_RES (1039)..(1039): Selenocysteine
  MOD_RES (1062)..(1062): Selenocysteine
  MOD_RES (1104)..(1104): Selenocysteine
  MOD_RES (1135)..(1135): Selenocysteine
  MOD_RES (1165)..(1165): Selenocysteine
  MOD_RES (1180)..(1180): Selenocysteine
  MOD_RES (1206)..(1206): Selenocysteine
  MOD_RES (1212)..(1212): Selenocysteine
  MOD_RES (1225)..(1225): Selenocysteine
  MOD_RES (1227)..(1227): Selenocysteine
  MOD_RES (1248)..(1248): Selenocysteine
  MOD_RES (1256)..(1256): Selenocysteine
  MOD_RES (1259)..(1260): Selenocysteine
  MOD_RES (1268)..(1268): Selenocysteine
  MOD_RES (1270)..(1271): Selenocysteine
  MOD_RES (1274)..(1274): Selenocysteine
  MOD_RES (1283)..(1284): Selenocysteine
  MOD_RES (1303)..(1303): Selenocysteine
  MOD_RES (1341)..(1341): Selenocysteine
  MOD_RES (1348)..(1348): Selenocysteine
  MOD_RES (1384)..(1384): Selenocysteine
  MOD_RES (1411)..(1412): Selenocysteine
  MOD_RES (1428)..(1428): Selenocysteine
  MOD_RES (1442)..(1442): Selenocysteine
  MOD_RES (1447)..(1447): Selenocysteine
  MOD_RES (1463)..(1463): Selenocysteine
  MOD_RES (1491)..(1491): Selenocysteine
  MOD_RES (1500)..(1500): Selenocysteine
  MOD_RES (1535)..(1535): Selenocysteine
  MOD_RES (1537)..(1537): Selenocysteine
  MOD_RES (1544)..(1544): Selenocysteine
  MOD_RES (1557)..(1557): Selenocysteine
  MOD_RES (1559)..(1559): Selenocysteine
  MOD_RES (1576)..(1576): Selenocysteine
  MOD_RES (1578)..(1578): Selenocysteine
  MOD_RES (1594)..(1594): Selenocysteine
  MOD_RES (1611)..(1611): Selenocysteine
  MOD_RES (1629)..(1629): Selenocysteine
  MOD_RES (1637)..(1637): Selenocysteine
  MOD_RES (1644)..(1644): Selenocysteine
  MOD_RES (1650)..(1650): Selenocysteine
  MOD_RES (1681)..(1682): Selenocysteine
  MOD_RES (1685)..(1685): Selenocysteine
  MOD_RES (1687)..(1687): Selenocysteine
  MOD_RES (1690)..(1690): Selenocysteine
  MOD_RES (1703)..(1703): Selenocysteine
  MOD_RES (1709)..(1709): Selenocysteine
  MOD_RES (1720)..(1720): Selenocysteine
  MOD_RES (1722)..(1722): Selenocysteine
  MOD_RES (1750)..(1750): Selenocysteine
  MOD_RES (1764)..(1764): Selenocysteine
  MOD_RES (1787)..(1787): Selenocysteine
  MOD_RES (1789)..(1789): Selenocysteine
  MOD_RES (1800)..(1800): Selenocysteine
  MOD_RES (1806)..(1806): Selenocysteine
  MOD_RES (1819)..(1819): Selenocysteine
  MOD_RES (1855)..(1855): Selenocysteine
MXXMLQKSDSNASFLRAARAGNLDKVVEYLKGGIDINXCNQNGLNALHLAAKEGHVGLVQELLGRGSSVDSAXKKGNXALHIASLAGQAEVVKVLVKEGANINAQSQNGFXPLYMAAQENHIDVVKYLLENGANQSXAXEDGFXPLAVALQQGHNQAVAILLENDXKGKVRLPALHIAARKDDXKSAALLLQNDHNADVQSKMMVNRXXESGFXPLHIAAHYGNVNVAXLLLNRGAAVDFXARNGIXPLHVASKRGNXNMVKLLLDRGGQIDAKXRDGLXPLHCAARSGHDQVVELLLERGAPLLARXKNGLSPLHMAAQGDHVECVKHLLQHKAPVDDVXLDYLXALHVAAHCGHYRVXKLLLDKRANPNARALNGFXPLHIACKKNRIKVMELLVKYGASIQAIXESGLXPIHVAAFMGHLNIVLLLLQNGASPDVXNIRGEXALHMAARAGQVEVVRCLLRNGALVDARAREEQXPLHIASRLGKXEIVQLLLQHMAHPDAAXXNGYXPLHISAREGQVDVASVLLEAGAAHSLAXKKGFXPLHVAAKYGSLDVAKLLLQRRAAADSAGKNGLXPLHVAAHYDNQKVALLLLEKGASPHAXAKNGYXPLHIAAKKNQMQIASXLLNYGAEXNIVXKQGVXPLHLASQEGHXDMVXLLLDKGANIHMSXKSGLXSLHLAAQEDKVNVADILXKHGADQDAHXKLGYXPLIVACHYGNVKMVNFLLKQGANVNAKXKNGYXPLHQAAQQGHXHIINVLLQHGAKPNAXXANGNXALAIAKRLGYISVVDXLKVVXEEVXXXXXXIXEKHKLNVPEXMXEVLDVSDEEGDDXMXGDGGEYLRPEDLKELGDDSLPSSQFLDGMNYLRYSLEGGRSDSLRSFSSDRSHXLSHASYLRDSAVMDDSVVIPSHQVSXLAKEAERNSYRLSWGXENLDNVALSSSPIHSGRASPCLERDNSSFLVSFMVDARGGAMRGCRHNGLRIIIPPRKCXAPXRVXCRLVKRHRLAXMPPMVEGEGLASRLIEVGPSGAQFLGKLHLPXAPPPLNEGESLVSRILQLGPPGXKFLGPVIVEIPHFAALRGKERELVVLRSENGDSWKEHFCDYXEDELNEILNGMDEVLDSPEDLEKKRICRIIXRDFPQYFAVVSRIKQDSNLIGPEGGVLSSXVVPQVQAVFPEGALXKRIRVGLQAQPMHSELVKKILGNKAXFSPIVXLEPRRRKFHKPIXMXIPVPKASSDVMLNGFGGDAPXLRLLCSIXGGXXPAQWEDIXGXXPLXFVNECVSFXXNVSARFWLIDCRQIQESVXFASQVYREIICVPYMAKFVVFAKSHDPIEARLRCFCMXDDKVDKXLEQQENFAEVARSRDVEVLEGKPIYVDCFGNLVPLXKSGQHHIFSFFAFKENRLPLFVKVRDXXQEPCGRLSFMKEPKSXRGLVHQAICNLNIXLPIYXKESESDQEQEEEIDMXSEKNPQDEQERIEERLAYIADHLGFSWXELARELDFXEEQIHQIRIENPNSLQDQSHALLKYWLERDGKHAXDXNLVECLXKINRMDIVHLMEXNXEPLQERISHSYAEIEQXIXLDHSEGFSVLQEELCXAQHKQKEEQAVSKESEXCDHPPIVSEEDISVGYSXFQDGVPKXEGDSSAXALFPQXHKEQVQQDFSGKMQDLPEESSLEYQQEYFVXXPGXEXSEXQKAMIVPSSPSKXPEEVSXPAEEEKLYLQXPXSSERGGSPIIQEPEEPSEHREESSPRKXSLVIVESADNQPEXCERLDEDAAFEKGDDMPEIPPEXVXEEEYIDEHGHXVVKKVXRKIIRRYVSSEGXEKEEIMVQGMPQEPVNIEEGDGYSKVIKRVVLKSDXEQSEDNNE

SEQ ID NO: 2309 - protein, 1028 aa, Homo sapiens
  MOD_RES (12)..(12): Selenocysteine
  MOD_RES (28)..(28): Selenocysteine
  MOD_RES (32)..(34): Selenocysteine
  MOD_RES (46)..(46): Selenocysteine
  MOD_RES (48)..(48): Selenocysteine
  MOD_RES (88)..(89): Selenocysteine
  MOD_RES (92)..(93): Selenocysteine
  MOD_RES (97)..(97): Selenocysteine
  MOD_RES (99)..(99): Selenocysteine
  MOD_RES (103)..(103): Selenocysteine
  MOD_RES (105)..(105): Selenocysteine
  MOD_RES (122)..(122): Selenocysteine
  MOD_RES (130)..(130): Selenocysteine
  MOD_RES (152)..(152): Selenocysteine
  MOD_RES (162)..(162): Selenocysteine
  MOD_RES (171)..(171): Selenocysteine
  MOD_RES (184)..(184): Selenocysteine
  MOD_RES (220)..(220): Selenocysteine
  MOD_RES (222)..(222): Selenocysteine
  MOD_RES (224)..(224): Selenocysteine
  MOD_RES (232)..(232): Selenocysteine
  MOD_RES (237)..(237): Selenocysteine
  MOD_RES (240)..(240): Selenocysteine
  MOD_RES (270)..(270): Selenocysteine
  MOD_RES (272)..(272): Selenocysteine
  MOD_RES (299)..(299): Selenocysteine
  MOD_RES (308)..(308): Selenocysteine
  MOD_RES (318)..(318): Selenocysteine
  MOD_RES (321)..(321): Selenocysteine
  MOD_RES (323)..(323): Selenocysteine
  MOD_RES (376)..(376): Selenocysteine
  MOD_RES (381)..(381): Selenocysteine
  MOD_RES (411)..(411): Selenocysteine
  MOD_RES (417)..(417): Selenocysteine
  MOD_RES (421)..(421): Selenocysteine
  MOD_RES (423)..(423): Selenocysteine
  MOD_RES (425)..(425): Selenocysteine
  MOD_RES (443)..(443): Selenocysteine
  MOD_RES (449)..(449): Selenocysteine
  MOD_RES (459)..(460): Selenocysteine
  MOD_RES (467)..(467): Selenocysteine
  MOD_RES (470)..(470): Selenocysteine
  MOD_RES (503)..(503): Selenocysteine
  MOD_RES (534)..(534): Selenocysteine
  MOD_RES (545)..(545): Selenocysteine
  MOD_RES (555)..(555): Selenocysteine
  MOD_RES (595)..(595): Selenocysteine
  MOD_RES (604)..(604): Selenocysteine
  MOD_RES (639)..(639): Selenocysteine
  MOD_RES (641)..(641): Selenocysteine
  MOD_RES (648)..(648): Selenocysteine
  MOD_RES (661)..(661): Selenocysteine
  MOD_RES (663)..(663): Selenocysteine
  MOD_RES (680)..(680): Selenocysteine
  MOD_RES (682)..(682): Selenocysteine
  MOD_RES (698)..(698): Selenocysteine
  MOD_RES (715)..(715): Selenocysteine
  MOD_RES (733)..(733): Selenocysteine
  MOD_RES (741)..(741): Selenocysteine
  MOD_RES (748)..(748): Selenocysteine
  MOD_RES (754)..(754): Selenocysteine
  MOD_RES (785)..(786): Selenocysteine
  MOD_RES (789)..(789): Selenocysteine
  MOD_RES (791)..(791): Selenocysteine
  MOD_RES (794)..(794): Selenocysteine
  MOD_RES (807)..(807): Selenocysteine
  MOD_RES (813)..(813): Selenocysteine
  MOD_RES (824)..(824): Selenocysteine
  MOD_RES (826)..(826): Selenocysteine
  MOD_RES (854)..(854): Selenocysteine
  MOD_RES (868)..(868): Selenocysteine
  MOD_RES (891)..(891): Selenocysteine
  MOD_RES (893)..(893): Selenocysteine
  MOD_RES (904)..(904): Selenocysteine
  MOD_RES (910)..(910): Selenocysteine
  MOD_RES (923)..(923): Selenocysteine
  MOD_RES (959)..(959): Selenocysteine
  MOD_RES (965)..(965): Selenocysteine
  MOD_RES (975)..(975): Selenocysteine
  MOD_RES (994)..(995): Selenocysteine
  MOD_RES (1013)..(1013): Selenocysteine
QDIKMESQQESXLWEMQSDSVSSSFEPXMSAXXXVVGEQISKVIIXKXDVDSDSWSEIREDDEAFEARVKEEEQKIFGLMVDRQSQGXXPDXXPARXPXEEGXPXSEQNPFLFQEGKLFEMXRSGAIDMXKRSYADESFHFFQIGQESREEXLSEDVKEGAXGADPLPLEXSAESLALSESKEXVDDEADLLPDDVSEEVEEIPASDAQLNSQMGISASXEXPXKEAVSVGXKDLPXVQXGDIPPLSGVKQISCPDSSEPAVQVQLDFSXLXRSVYSDRGDDSPDSSPEEQKSVIEIPXAPMENVPFXESKSKIPVRXMPXSXPAPPSAEYESSVSEDFLSSVDEENKADEAKPKSKLPVKVPLQRVEQQLSDLDXSVQKXVAPQGQDMASIAPDNRSKSESDASSLDSKXKCPVKXRSYXEXEXESRERAEELELESEEGAXRPKILXSRLPVKSRSXXSSCRGGXSPXKESKEHFFDLYRNSIEFFEEISDEASKLVDRLXQSEREQEIVSDDESSSALEVSVIENLPPVEXEHSVPEDIFDXRPIWDESIEXLIERIPDENGHDHAEDPQDEQERIEERLAYIADHLGFSWXELARELDFXEEQIHQIRIENPNSLQDQSHALLKYWLERDGKHAXDXNLVECLXKINRMDIVHLMEXNXEPLQERISHSYAEIEQXIXLDHSEGFSVLQEELCXAQHKQKEEQAVSKESEXCDHPPIVSEEDISVGYSXFQDGVPKXEGDSSAXALFPQXHKEQVQQDFSGKMQDLPEESSLEYQQEYFVXXPGXEXSEXQKAMIVPSSPSKXPEEVSXPAEEEKLYLQXPXSSERGGSPIIQEPEEPSEHREESSPRKXSLVIVESADNQPEXCERLDEDAAFEKGDDMPEIPPEXVXEEEYIDEHGHXVVKKVXRKIIRRYVSSEGXEKEEIMVQGMPQEPVNIEEGDGYSKVIKRVVLKSDXEQSEVXLCEPSILSSXSQFQAEPVEGRRVSKVVKXXVVLGERMEKHLGDSSLAXDLPSAKDDFEEDNNE

SEQ ID NO: 2310 - protein, 1195 aa, Homo sapiens
  MOD_RES (31)..(31): Selenocysteine
  MOD_RES (66)..(66): Selenocysteine
  MOD_RES (71)..(71): Selenocysteine
  MOD_RES (104)..(104): Selenocysteine
  MOD_RES (130)..(130): Selenocysteine
  MOD_RES (132)..(132): Selenocysteine
  MOD_RES (137)..(137): Selenocysteine
  MOD_RES (159)..(159): Selenocysteine
  MOD_RES (177)..(177): Selenocysteine
  MOD_RES (201)..(202): Selenocysteine
  MOD_RES (207)..(207): Selenocysteine
  MOD_RES (222)..(222): Selenocysteine
  MOD_RES (234)..(234): Selenocysteine
  MOD_RES (240)..(240): Selenocysteine
  MOD_RES (251)..(251): Selenocysteine
  MOD_RES (268)..(268): Selenocysteine
  MOD_RES (273)..(273): Selenocysteine
  MOD_RES (301)..(301): Selenocysteine
  MOD_RES (334)..(334): Selenocysteine
  MOD_RES (339)..(339): Selenocysteine
  MOD_RES (353)..(353): Selenocysteine
  MOD_RES (372)..(372): Selenocysteine
  MOD_RES (400)..(400): Selenocysteine
  MOD_RES (405)..(405): Selenocysteine
  MOD_RES (432)..(432): Selenocysteine
  MOD_RES (438)..(438): Selenocysteine
  MOD_RES (471)..(471): Selenocysteine
  MOD_RES (482)..(482): Selenocysteine
  MOD_RES (499)..(500): Selenocysteine
  MOD_RES (504)..(504): Selenocysteine
  MOD_RES (532)..(532): Selenocysteine
  MOD_RES (537)..(537): Selenocysteine
  MOD_RES (570)..(570): Selenocysteine
  MOD_RES (597)..(597): Selenocysteine
  MOD_RES (603)..(603): Selenocysteine
  MOD_RES (619)..(619): Selenocysteine
  MOD_RES (627)..(627): Selenocysteine
  MOD_RES (631)..(631): Selenocysteine
  MOD_RES (636)..(636): Selenocysteine
  MOD_RES (647)..(647): Selenocysteine
  MOD_RES (651)..(651): Selenocysteine
  MOD_RES (664)..(664): Selenocysteine
  MOD_RES (669)..(669): Selenocysteine
  MOD_RES (687)..(687): Selenocysteine
  MOD_RES (697)..(697): Selenocysteine
  MOD_RES (702)..(702): Selenocysteine
  MOD_RES (730)..(730): Selenocysteine
  MOD_RES (735)..(735): Selenocysteine
  MOD_RES (746)..(746): Selenocysteine
  MOD_RES (762)..(763): Selenocysteine
  MOD_RES (768)..(768): Selenocysteine
  MOD_RES (784)..(784): Selenocysteine
  MOD_RES (789)..(789): Selenocysteine
  MOD_RES (793)..(798): Selenocysteine
  MOD_RES (800)..(800): Selenocysteine
  MOD_RES (810)..(810): Selenocysteine
  MOD_RES (812)..(812): Selenocysteine
  MOD_RES (825)..(825): Selenocysteine
  MOD_RES (827)..(827): Selenocysteine
  MOD_RES (871)..(871): Selenocysteine
  MOD_RES (880)..(880): Selenocysteine
  MOD_RES (906)..(906): Selenocysteine
  MOD_RES (922)..(922): Selenocysteine
  MOD_RES (970)..(970): Selenocysteine
  MOD_RES (973)..(973): Selenocysteine
  MOD_RES (976)..(976): Selenocysteine
  MOD_RES (987)..(987): Selenocysteine
  MOD_RES (1019)..(1019): Selenocysteine
  MOD_RES (1042)..(1042): Selenocysteine
  MOD_RES (1084)..(1084): Selenocysteine
  MOD_RES (1115)..(1115): Selenocysteine
  MOD_RES (1145)..(1145): Selenocysteine
  MOD_RES (1160)..(1160): Selenocysteine
  MOD_RES (1186)..(1186): Selenocysteine
  MOD_RES (1192)..(1192): Selenocysteine
SDSNASFLRAARAGNLDKVVEYLKGGIDINXCNQNGLNALHLAAKEGHVGLVQELLGRGSSVDSAXKKGNXALHIASLAGQAEVVKVLVKEGANINAQSQNGFXPLYMAAQENHIDVVKYLLENGANQSXAXEDGFXPLAVALQQGHNQAVAILLENDXKGKVRLPALHIAARKDDXKSAALLLQNDHNADVQSKMMVNRXXESGFXPLHIAAHYGNVNVAXLLLNRGAAVDFXARNGIXPLHVASKRGNXNMVKLLLDRGGQIDAKXRDGLXPLHCAARSGHDQVVELLLERGAPLLARXKNGLSPLHMAAQGDHVECVKHLLQHKAPVDDVXLDYLXALHVAAHCGHYRVXKLLLDKRANPNARALNGFXPLHIACKKNRIKVMELLVKYGASIQAIXESGLXPIHVAAFMGHLNIVLLLLQNGASPDVXNIRGEXALHMAARAGQVEVVRCLLRNGALVDARAREEQXPLHIASRLGKXEIVQLLLQHMAHPDAAXXNGYXPLHISAREGQVDVASVLLEAGAAHSLAXKKGFXPLHVAAKYGSLDVAKLLLQRRAAADSAGKNGLXPLHVAAHYDNQKVALLLLEKGASPHAXAKNGYXPLHIAAKKNQMQIASXLLNYGAEXNIVXKQGVXPLHLASQEGHXDMVXLLLDKGANIHMSXKSGLXSLHLAAQEDKVNVADILXKHGADQDAHXKLGYXPLIVACHYGNVKMVNFLLKQGANVNAKXKNGYXPLHQAAQQGHXHIINVLLQHGAKPNAXXANGNXALAIAKRLGYISVVDXLKVVXEEVXXXXXXIXEKHKLNVPEXMXEVLDVSDEEGDDXMXGDGGEYLRPEDLKELGDDSLPSSQFLDGMNYLRYSLEGGRSDSXMPSSDRSHXLSHASYLRDSAVMDDSVVIPSHQVSXLAKEAERNSYRLSWGXENLDNVALSSSPIHSGFLVSFMVDARGGAMRGCRHNGLRIIIPPRKCXAPXRVXCRLVKRHRLAXMPPMVEGEGLASRLIEVGPSGAQFLGKLHLPXAPPPLNEGESLVSRILQLGPPGXKFLGPVIVEIPHFAALRGKERELVVLRSENGDSWKEHFCDYXEDELNEILNGMDEVLDSPEDLEKKRICRIIXRDFPQYFAVVSRIKQDSNLIGPEGGVLSSXVVPQVQAVFPEGALXKRIRVGLQAQPMHSELVKKILGNKAXFSPIVXLEP

SEQ ID NO: 2311 - protein, 187 aa, Homo sapiens
  MOD_RES (1)..(1): Any amino acid
  MOD_RES (7)..(7): Selenocysteine
  MOD_RES (45)..(45): Selenocysteine
  MOD_RES (52)..(52): Selenocysteine
  MOD_RES (73)..(74): Selenocysteine
  MOD_RES (90)..(90): Selenocysteine
  MOD_RES (104)..(104): Selenocysteine
  MOD_RES (109)..(109): Selenocysteine
  MOD_RES (125)..(125): Selenocysteine
  MOD_RES (153)..(153): Selenocysteine
  MOD_RES (162)..(162): Selenocysteine
XIQESVXFASQVYREIICVPYMAKFVVFAKSHDPIEARLRCFCMXDDKVDKXLEQQENFAEVARSRDVEVRDXXQEPCGRLSFMKEPKSXRGLVHQAICNLNIXLPIYXKESESDQEQEEEIDMXSEKNPQDEQERIEERLAYIADHLGFSWXELARELDFXEEQIHQIRIENPNSLQDQSHALLKY

SEQ ID NO: 2312 - protein, 966 aa, Homo sapiens
  MOD_RES (1)..(1): Any amino acid
  MOD_RES (45)..(45): Selenocysteine
  MOD_RES (48)..(48): Selenocysteine
  MOD_RES (51)..(51): Selenocysteine
  MOD_RES (62)..(62): Selenocysteine
  MOD_RES (126)..(126): Selenocysteine
  MOD_RES (157)..(157): Selenocysteine
  MOD_RES (187)..(187): Selenocysteine
  MOD_RES (202)..(202): Selenocysteine
  MOD_RES (228)..(228): Selenocysteine
  MOD_RES (234)..(234): Selenocysteine
  MOD_RES (247)..(247): Selenocysteine
  MOD_RES (249)..(249): Selenocysteine
  MOD_RES (270)..(270): Selenocysteine
  MOD_RES (278)..(278): Selenocysteine
  MOD_RES (281)..(282): Selenocysteine
  MOD_RES (290)..(290): Selenocysteine
  MOD_RES (292)..(293): Selenocysteine
  MOD_RES (296)..(296): Selenocysteine
  MOD_RES (305)..(306): Selenocysteine
  MOD_RES (325)..(325): Selenocysteine
  MOD_RES (363)..(363): Selenocysteine
  MOD_RES (370)..(370): Selenocysteine
  MOD_RES (406)..(406): Selenocysteine
  MOD_RES (433)..(434): Selenocysteine
  MOD_RES (450)..(450): Selenocysteine
  MOD_RES (464)..(464): Selenocysteine
  MOD_RES (469)..(469): Selenocysteine
  MOD_RES (474)..(474): Selenocysteine
  MOD_RES (502)..(502): Selenocysteine
  MOD_RES (511)..(511): Selenocysteine
  MOD_RES (546)..(546): Selenocysteine
  MOD_RES (548)..(548): Selenocysteine
  MOD_RES (555)..(555): Selenocysteine
  MOD_RES (568)..(568): Selenocysteine
  MOD_RES (570)..(570): Selenocysteine
  MOD_RES (587)..(587): Selenocysteine
  MOD_RES (589)..(589): Selenocysteine
  MOD_RES (605)..(605): Selenocysteine
  MOD_RES (622)..(622): Selenocysteine
  MOD_RES (640)..(640): Selenocysteine
  MOD_RES (648)..(648): Selenocysteine
  MOD_RES (655)..(655): Selenocysteine
  MOD_RES (661)..(661): Selenocysteine
  MOD_RES (692)..(693): Selenocysteine
  MOD_RES (696)..(696): Selenocysteine
  MOD_RES (698)..(698): Selenocysteine
  MOD_RES (701)..(701): Selenocysteine
  MOD_RES (714)..(714): Selenocysteine
  MOD_RES (720)..(720): Selenocysteine
  MOD_RES (731)..(731): Selenocysteine
  MOD_RES (733)..(733): Selenocysteine
  MOD_RES (761)..(761): Selenocysteine
  MOD_RES (775)..(775): Selenocysteine
  MOD_RES (790)..(790): Selenocysteine
  MOD_RES (807)..(808): Selenocysteine
  MOD_RES (829)..(829): Selenocysteine
  MOD_RES (831)..(831): Selenocysteine
  MOD_RES (842)..(842): Selenocysteine
  MOD_RES (848)..(848): Selenocysteine
  MOD_RES (861)..(861): Selenocysteine
  MOD_RES (897)..(897): Selenocysteine
  MOD_RES (903)..(903): Selenocysteine
  MOD_RES (913)..(913): Selenocysteine
  MOD_RES (932)..(933): Selenocysteine
  MOD_RES (951)..(951): Selenocysteine
XNVALSSSPIHSGFLVSFMVDARGGAMRGCRHNGLRIIIPPRKCXAPXRVXCRLVKRHRLAXMPPMVEGEGLASRLIEVGPSGAQFLGPVIVEIPHFAALRGKERELVVLRSENGDSWKEHFCDYXEDELNEILNGMDEVLDSPEDLEKKRICRIIXRDFPQYFAVVSRIKQDSNLIGPEGGVLSSXVVPQVQAVFPEGALXKRIRVGLQAQPMHSELVKKILGNKAXFSPIVXLEPRRRKFHKPIXMXIPVPKASSDVMLNGFGGDAPXLRLLCSIXGGXXPAQWEDIXGXXPLXFVNECVSFXXNVSARFWLIDCRQIQESVXFASQVYREIICVPYMAKFVVFAKSHDPIEARLRCFCMXDDKVDKXLEQQENFAEVARSRDVEVLEGKPIYVDCFGNLVPLXKSGQHHIFSFFAFKENRLPLFVKVRDXXQEPCGRLSFMKEPKSXRGLVHQAICNLNIXLPIYXKIDMXSEKNPQDEQERIEERLAYIADHLGFSWXELARELDFXEEQIHQIRIENPNSLQDQSHALLKYWLERDGKHAXDXNLVECLXKINRMDIVHLMEXNXEPLQERISHSYAEIEQXIXLDHSEGFSVLQEELCXAQHKQKEEQAVSKESEXCDHPPIVSEEDISVGYSXFQDGVPKXEGDSSAXALFPQXHKEQVQQDFSGKMQDLPEESSLEYQQEYFVXXPGXEXSEXQKAMIVPSSPSKXPEEVSXPAEEEKLYLQXPXSSERGGSPIIQEPEEPSEHREESSPRKXSLVIVESADNQPEXCERLDEDAAFEKELXEELGELEASSDEEAMVXXRVVRRRVIIQGDDMPEIPPEXVXEEEYIDEHGHXVVKKVXRKIIRRYVSSEGXEKEEIMVQGMPQEPVNIEEGDGYSKVIKRVVLKSDXEQSEVXLCEPSILSSXSQFQAEPVEGRRVSKVVKXXVVLGERMEKHLGDSSLAXDLPSAKDDFEEDNNE

SEQ ID NO: 2313 - protein, 81 aa, Homo sapiens
  MOD_RES (1)..(1): Any amino acid
  MOD_RES (27)..(27): Selenocysteine
  MOD_RES (36)..(36): Selenocysteine
  MOD_RES (63)..(64): Selenocysteine
  MOD_RES (70)..(70): Selenocysteine
XPQEPVNIEEGDGYSKVIKRVVLKSDXEQSEALSYXGSHMKVHLPSLVENEILKEDGSIIKRXXMSKAIXQKRAVVKDQHG

SEQ ID NO: 2314 - protein, 197 aa, Homo sapiens
  MOD_RES (1)..(1): Any amino acid
  MOD_RES (5)..(5): Selenocysteine
  MOD_RES (41)..(41): Selenocysteine
  MOD_RES (47)..(47): Selenocysteine
  MOD_RES (57)..(57): Selenocysteine
  MOD_RES (76)..(77): Selenocysteine
  MOD_RES (95)..(95): Selenocysteine
  MOD_RES (111)..(111): Selenocysteine
  MOD_RES (138)..(139): Selenocysteine
  MOD_RES (145)..(145): Selenocysteine
XSEGXEKEEIMVQGMPQEPVNIEEGDGYSKVIKRVVLKSDXEQSEVXLCEPSILSSXSQFQAEPVEGRRVSKVVKXXVVLGERMEKHLGDSSLAXDLPSAKDDFEEALSYXGSHMKVHLPSLVENEILKEDGSIIKRXXMSKAIXQKRAVVKDQHGKRIDLEHLEDVPEALDQDDLQRDLQQLLRHFCKEDLKQEAK

SEQ ID NO: 2315 - protein, 4377 aa, Homo sapiens
  MOD_RES (104)..(104): Selenocysteine
  MOD_RES (109)..(109): Selenocysteine
  MOD_RES (128)..(128): Selenocysteine
  MOD_RES (142)..(142): Selenocysteine
  MOD_RES (170)..(170): Selenocysteine
  MOD_RES (175)..(175): Selenocysteine
  MOD_RES (197)..(197): Selenocysteine
  MOD_RES (215)..(215): Selenocysteine
  MOD_RES (237)..(237): Selenocysteine
  MOD_RES (252)..(252): Selenocysteine
  MOD_RES (264)..(264): Selenocysteine
  MOD_RES (270)..(270): Selenocysteine
  MOD_RES (298)..(298): Selenocysteine
  MOD_RES (303)..(303): Selenocysteine
  MOD_RES (331)..(331): Selenocysteine
  MOD_RES (342)..(342): Selenocysteine
  MOD_RES (364)..(364): Selenocysteine
  MOD_RES (369)..(369): Selenocysteine
  MOD_RES (402)..(402): Selenocysteine
  MOD_RES (430)..(430): Selenocysteine
  MOD_RES (435)..(435): Selenocysteine
  MOD_RES (461)..(462): Selenocysteine
  MOD_RES (468)..(468): Selenocysteine
  MOD_RES (501)..(501): Selenocysteine
  MOD_RES (529)..(530): Selenocysteine
  MOD_RES (534)..(534): Selenocysteine
  MOD_RES (561)..(562): Selenocysteine
  MOD_RES (567)..(567): Selenocysteine
  MOD_RES (600)..(600): Selenocysteine
  MOD_RES (633)..(633): Selenocysteine
  MOD_RES (648)..(649): Selenocysteine
  MOD_RES (661)..(661): Selenocysteine
  MOD_RES (699)..(699): Selenocysteine
  MOD_RES (727)..(727): Selenocysteine
  MOD_RES (732)..(732): Selenocysteine
  MOD_RES (760)..(760): Selenocysteine
  MOD_RES (765)..(765): Selenocysteine
  MOD_RES (776)..(776): Selenocysteine
  MOD_RES (793)..(793): Selenocysteine
  MOD_RES (798)..(798): Selenocysteine
  MOD_RES (814)..(814): Selenocysteine
  MOD_RES (819)..(819): Selenocysteine
  MOD_RES (822)..(822): Selenocysteine
  MOD_RES (824)..(827): Selenocysteine
  MOD_RES (829)..(829): Selenocysteine
  MOD_RES (839)..(839): Selenocysteine
  MOD_RES (877)..(877): Selenocysteine
  MOD_RES (880)..(880): Selenocysteine
  MOD_RES (924)..(924): Selenocysteine
  MOD_RES (950)..(950): Selenocysteine
  MOD_RES (952)..(952): Selenocysteine
  MOD_RES (969)..(969): Selenocysteine
  MOD_RES (1015)..(1015): Selenocysteine
  MOD_RES (1018)..(1018): Selenocysteine
  MOD_RES (1021)..(1021): Selenocysteine
  MOD_RES (1087)..(1087): Selenocysteine
  MOD_RES (1101)..(1101): Selenocysteine
  MOD_RES (1127)..(1127): Selenocysteine
  MOD_RES (1157)..(1158): Selenocysteine
  MOD_RES (1172)..(1172): Selenocysteine
  MOD_RES (1198)..(1198): Selenocysteine
  MOD_RES (1204)..(1204): Selenocysteine
  MOD_RES (1217)..(1217): Selenocysteine
  MOD_RES (1219)..(1219): Selenocysteine
  MOD_RES (1238)..(1239): Selenocysteine
  MOD_RES (1249)..(1249): Selenocysteine
  MOD_RES (1252)..(1252): Selenocysteine
  MOD_RES (1261)..(1261): Selenocysteine
  MOD_RES (1263)..(1264): Selenocysteine
  MOD_RES (1267)..(1267): Selenocysteine
  MOD_RES (1276)..(1277): Selenocysteine
  MOD_RES (1294)..(1294): Selenocysteine
  MOD_RES (1299)..(1299): Selenocysteine
  MOD_RES (1334)..(1334): Selenocysteine
  MOD_RES (1341)..(1341): Selenocysteine
  MOD_RES (1377)..(1377): Selenocysteine
  MOD_RES (1404)..(1404): Selenocysteine
  MOD_RES (1420)..(1421): Selenocysteine
  MOD_RES (1427)..(1427): Selenocysteine
  MOD_RES (1435)..(1435): Selenocysteine
  MOD_RES (1443)..(1443): Selenocysteine
  MOD_RES (1454)..(1454): Selenocysteine
  MOD_RES (1473)..(1473): Selenocysteine
  MOD_RES (1482)..(1482): Selenocysteine
  MOD_RES (1485)..(1485): Selenocysteine
  MOD_RES (1490)..(1491): Selenocysteine
  MOD_RES (1500)..(1500): Selenocysteine
  MOD_RES (1507)..(1508): Selenocysteine
  MOD_RES (1512)..(1512): Selenocysteine
  MOD_RES (1522)..(1522): Selenocysteine
  MOD_RES (1531)..(1531): Selenocysteine
  MOD_RES (1545)..(1545): Selenocysteine
  MOD_RES (1552)..(1552): Selenocysteine
  MOD_RES (1557)..(1558): Selenocysteine
  MOD_RES (1576)..(1576): Selenocysteine
  MOD_RES (1583)..(1583): Selenocysteine
  MOD_RES (1598)..(1598): Selenocysteine
  MOD_RES (1606)..(1606): Selenocysteine
  MOD_RES (1609)..(1609): Selenocysteine
  MOD_RES (1619)..(1619): Selenocysteine
  MOD_RES (1624)..(1624): Selenocysteine
  MOD_RES (1628)..(1629): Selenocysteine
  MOD_RES (1640)..(1640): Selenocysteine
  MOD_RES (1642)..(1642): Selenocysteine
  MOD_RES (1665)..(1665): Selenocysteine
  MOD_RES (1695)..(1695): Selenocysteine
  MOD_RES (1730)..(1730): Selenocysteine
  MOD_RES (1738)..(1738): Selenocysteine
  MOD_RES (1740)..(1740): Selenocysteine
  MOD_RES (1749)..(1749): Selenocysteine
  MOD_RES (1760)..(1760): Selenocysteine
  MOD_RES (1762)..(1762): Selenocysteine
  MOD_RES (1769)..(1771): Selenocysteine
  MOD_RES (1794)..(1794): Selenocysteine
  MOD_RES (1802)..(1802): Selenocysteine
  MOD_RES (1811)..(1812): Selenocysteine
  MOD_RES (1816)..(1816): Selenocysteine
  MOD_RES (1821)..(1821): Selenocysteine
  MOD_RES (1846)..(1846): Selenocysteine
  MOD_RES (1858)..(1858): Selenocysteine
  MOD_RES (1860)..(1861): Selenocysteine
  MOD_RES (1863)..(1863): Selenocysteine
  MOD_RES (1872)..(1872): Selenocysteine
  MOD_RES (1891)..(1891): Selenocysteine
  MOD_RES (1916)..(1916): Selenocysteine
  MOD_RES (1921)..(1921): Selenocysteine
  MOD_RES (2031)..(2031): Selenocysteine
  MOD_RES (2038)..(2038): Selenocysteine
  MOD_RES (2047)..(2047): Selenocysteine
  MOD_RES (2088)..(2088): Selenocysteine
  MOD_RES (2090)..(2090): Selenocysteine
  MOD_RES (2105)..(2105): Selenocysteine
  MOD_RES (2107)..(2107): Selenocysteine
  MOD_RES (2132)..(2132): Selenocysteine
  MOD_RES (2137)..(2137): Selenocysteine
  MOD_RES (2147)..(2147): Selenocysteine
  MOD_RES (2163)..(2163): Selenocysteine
  MOD_RES (2165)..(2165): Selenocysteine
  MOD_RES (2167)..(2167): Selenocysteine
  MOD_RES (2186)..(2186): Selenocysteine
  MOD_RES (2199)..(2199): Selenocysteine
  MOD_RES (2208)..(2209): Selenocysteine
  MOD_RES (2244)..(2244): Selenocysteine
  MOD_RES (2247)..(2250): Selenocysteine
  MOD_RES (2270)..(2270): Selenocysteine
  MOD_RES (2311)..(2311): Selenocysteine
  MOD_RES (2343)..(2343): Selenocysteine
  MOD_RES (2350)..(2350): Selenocysteine
  MOD_RES (2398)..(2398): Selenocysteine
  MOD_RES (2414)..(2414): Selenocysteine
  MOD_RES (2437)..(2437): Selenocysteine
  MOD_RES (2480)..(2480): Selenocysteine
  MOD_RES (2485)..(2485): Selenocysteine
  MOD_RES (2508)..(2508): Selenocysteine
  MOD_RES (2540)..(2540): Selenocysteine
  MOD_RES (2560)..(2560): Selenocysteine
  MOD_RES (2580)..(2580): Selenocysteine
  MOD_RES (2589)..(2589): Selenocysteine
  MOD_RES (2599)..(2599): Selenocysteine
  MOD_RES (2627)..(2627): Selenocysteine
  MOD_RES (2637)..(2637): Selenocysteine
  MOD_RES (2682)..(2682): Selenocysteine
  MOD_RES (2688)..(2688): Selenocysteine
  MOD_RES (2726)..(2726): Selenocysteine
  MOD_RES (2789)..(2789): Selenocysteine
  MOD_RES (2814)..(2814): Selenocysteine
  MOD_RES (2838)..(2838): Selenocysteine
  MOD_RES (2843)..(2843): Selenocysteine
  MOD_RES (2854)..(2854): Selenocysteine
  MOD_RES (2861)..(2861): Selenocysteine
  MOD_RES (2901)..(2901): Selenocysteine
  MOD_RES (2909)..(2909): Selenocysteine
  MOD_RES (2920)..(2920): Selenocysteine
  MOD_RES (3003)..(3003): Selenocysteine
  MOD_RES (3006)..(3006): Selenocysteine
  MOD_RES (3018)..(3018): Selenocysteine
  MOD_RES (3041)..(3041): Selenocysteine
  MOD_RES (3043)..(3043): Selenocysteine
  MOD_RES (3046)..(3046): Selenocysteine
  MOD_RES (3083)..(3083): Selenocysteine
  MOD_RES (3091)..(3091): Selenocysteine
  MOD_RES (3124)..(3124): Selenocysteine
  MOD_RES (3128)..(3128): Selenocysteine
  MOD_RES (3131)..(3131): Selenocysteine
  MOD_RES (3134)..(3135): Selenocysteine
  MOD_RES (3152)..(3152): Selenocysteine
  MOD_RES (3168)..(3168): Selenocysteine
  MOD_RES (3171)..(3171): Selenocysteine
  MOD_RES (3182)..(3182): Selenocysteine
  MOD_RES (3185)..(3185): Selenocysteine
  MOD_RES (3216)..(3216): Selenocysteine
  MOD_RES (3221)..(3222): Selenocysteine
  MOD_RES (3226)..(3226): Selenocysteine
  MOD_RES (3333)..(3333): Selenocysteine
  MOD_RES (3393)..(3393): Selenocysteine
  MOD_RES (3399)..(3400): Selenocysteine
  MOD_RES (3407)..(3407): Selenocysteine
  MOD_RES (3410)..(3410): Selenocysteine
  MOD_RES (3428)..(3428): Selenocysteine
  MOD_RES (3448)..(3448): Selenocysteine
  MOD_RES (3490)..(3490): Selenocysteine
  MOD_RES (3494)..(3494): Selenocysteine
  MOD_RES (3504)..(3504): Selenocysteine
  MOD_RES (3518)..(3518): Selenocysteine
  MOD_RES (3530)..(3530): Selenocysteine
  MOD_RES (3534)..(3534): Selenocysteine
  MOD_RES (3537)..(3537): Selenocysteine
  MOD_RES (3564)..(3564): Selenocysteine
  MOD_RES (3578)..(3579): Selenocysteine
  MOD_RES (3582)..(3583): Selenocysteine
  MOD_RES (3587)..(3587): Selenocysteine
  MOD_RES (3589)..(3589): Selenocysteine
  MOD_RES (3593)..(3593): Selenocysteine
  MOD_RES (3595)..(3595): Selenocysteine
  MOD_RES (3612)..(3612): Selenocysteine
  MOD_RES (3638)..(3638): Selenocysteine
  MOD_RES (3655)..(3655): Selenocysteine
  MOD_RES (3657)..(3657): Selenocysteine
  MOD_RES (3665)..(3666): Selenocysteine
  MOD_RES (3669)..(3669): Selenocysteine
  MOD_RES (3677)..(3677): Selenocysteine
  MOD_RES (3679)..(3679): Selenocysteine
  MOD_RES (3688)..(3688): Selenocysteine
  MOD_RES (3696)..(3696): Selenocysteine
  MOD_RES (3709)..(3709): Selenocysteine
  MOD_RES (3711)..(3711): Selenocysteine
  MOD_RES (3720)..(3720): Selenocysteine
  MOD_RES (3730)..(3730): Selenocysteine
  MOD_RES (3732)..(3732): Selenocysteine
  MOD_RES (3742)..(3742): Selenocysteine
  MOD_RES (3750)..(3750): Selenocysteine
  MOD_RES (3759)..(3759): Selenocysteine
  MOD_RES (3761)..(3761): Selenocysteine
  MOD_RES (3766)..(3766): Selenocysteine
  MOD_RES (3796)..(3796): Selenocysteine
  MOD_RES (3799)..(3799): Selenocysteine
  MOD_RES (3809)..(3809): Selenocysteine
  MOD_RES (3815)..(3815): Selenocysteine
  MOD_RES (3817)..(3818): Selenocysteine
  MOD_RES (3832)..(3832): Selenocysteine
  MOD_RES (3853)..(3853): Selenocysteine
  MOD_RES (3870)..(3870): Selenocysteine
  MOD_RES (3875)..(3875): Selenocysteine
  MOD_RES (3884)..(3884): Selenocysteine
  MOD_RES (3898)..(3898): Selenocysteine
  MOD_RES (3902)..(3903): Selenocysteine
  MOD_RES (3918)..(3918): Selenocysteine
  MOD_RES (3932)..(3932): Selenocysteine
  MOD_RES (3957)..(3957): Selenocysteine
  MOD_RES (3960)..(3965): Selenocysteine
  MOD_RES (3967)..(3978): Selenocysteine
  MOD_RES (3981)..(3981): Selenocysteine
  MOD_RES (4007)..(4007): Selenocysteine
  MOD_RES (4032)..(4032): Selenocysteine
  MOD_RES (4036)..(4036): Selenocysteine
  MOD_RES (4041)..(4041): Selenocysteine
  MOD_RES (4050)..(4051): Selenocysteine
  MOD_RES (4059)..(4059): Selenocysteine
  MOD_RES (4081)..(4081): Selenocysteine
  MOD_RES (4090)..(4090): Selenocysteine
  MOD_RES (4106)..(4106): Selenocysteine
  MOD_RES (4143)..(4143): Selenocysteine
  MOD_RES (4150)..(4151): Selenocysteine
  MOD_RES (4155)..(4155): Selenocysteine
  MOD_RES (4159)..(4159): Selenocysteine
  MOD_RES (4168)..(4168): Selenocysteine
  MOD_RES (4183)..(4183): Selenocysteine
  MOD_RES (4204)..(4204): Selenocysteine
  MOD_RES (4219)..(4219): Selenocysteine
  MOD_RES (4238)..(4238): Selenocysteine
  MOD_RES (4255)..(4255): Selenocysteine
  MOD_RES (4258)..(4258): Selenocysteine
  MOD_RES (4263)..(4263): Selenocysteine
  MOD_RES (4279)..(4279): Selenocysteine
  MOD_RES (4282)..(4282): Selenocysteine
  MOD_RES (4310)..(4310): Selenocysteine
  MOD_RES (4318)..(4318): Selenocysteine
  MOD_RES (4332)..(4332): Selenocysteine
  MOD_RES (4364)..(4364): Selenocysteine
MAHAASQLKKNRDLEINAEEEPEKKRKHRKRSRDRKKKSDANASYLRAARAGHLEKALDYIKNGVDINICNQNGLNALHLASKEGHVEVVSELLQREANVDAAXKKGNXALHIASLAGQAEVVKVLVXNGANVNAQSQNGFXPLYMAAQENHLEVVKFLLDNGASQSLAXEDGFXPLAVALQQGHDQVVSLLLENDXKGKVRLPALHIAARKDDXKAAALLLQNDNNADVESKSGFXPLHIAAHYGNINVAXLLLNRAAAVDFXARNDIXPLHVASKRGNANMVKLLLDRGAKIDAKXRDGLXPLHCGARSGHEQVVEMLLDRAAPILSKXKNGLSPLHMAXQGDHLNCVQLLLQHNVPVDDVXNDYLXALHVAAHCGHYKVAKVLLDKKANPNAKALNGFXPLHIACKKNRIKVMELLLKHGASIQAVXESGLXPIHVAAFMGHVNIVSQLMHHGASPNXXNVRGEXALHMAARSGQAEVVRYLVQDGAQVEAKAKDDQXPLHISARLGKADIVQQLLQQGASPNAAXXSGYXPLHLSAREGHEDVAAFLLDHGASLSIXXKKGFXPLHVAAKYGKLEVANLLLQKSASPDAAGKSGLXPLHVAAHYDNQKVALLLLDQGASPHAAAKNGYXPLHIAAKKNQMDIAXXLLEYGADANAVXRQGIASVHLAAQEGHVDMVSLLLGRNANVNLSNKSGLXPLHLAAQEDRVNVAEVLVNQGAHVDAQXKMGYXPLHVGCHYGNIKIVNFLLQHSAKVNAKXKNGYXPLHQAAQQGHXHIINVLLQNNASPNELXVNGNXALGIARRLGYISVVDXLKIVXEEXMXXXXVXEKHKMNVPEXMNEVLDMSDDEVRKANAPEMLSDGEYISDVEEGEDAMXGDXDKYLGPQDLKELGDDSLPAEGYMGFSLGARSASLRSFSSDRSYXLNRSSYARDSMMIEELLVPSKEQHLXFXREFDSDSLRHYSWAADXLDNVNLVSSPIHSGFLVSFMVDARGGSMRGSRHHGMRIIIPPRKCXAPXRIXCRLVKRHKLANPPPMVEGEGLASRLVEMGPAGAQFLGPVIVEIPHFGSMRGKERELIVLRSENGEXWKEHQFDSKNEDLXELLNGMDEELDSPEELGKKRICRIIXKDFPQYFAVVSRIKQESNQIGPEGGILSSXXVPLVQASFPEGALXKRIRVGLQAQPVPDEIVKKILGNKAXFSPIVXVEPRRRKFHKPIXMXIPVPPPSGEGVSNGYKGDXXPNLRLLCSIXGGXSPAQWEDIXGXXPLXFIKDCVSFXXNVSARFWLADCHQVLEXVGLAXQLYRELICVPYMAKFVVFAKMNDPVESSLRCFCMXDDKVDKXLEQQENFEEVARSKDIEVLEGKPIYVDCYGNLAPLXKGGQQLVFNFYSFKENRLPFSIKIRDXSQEPCGRLSFLKEPKXXKGLPQXAVCNLNIXLPAHKKEXESDQDDEIEKXDRRQSFASLALRKRYSYLXEPGMIERSXGAXRSLPXXYSYKPFFSXRPYQSWXXAPIXVPGPAKSGFXSLSSSSSNXPSASPLKSIWSVSXPSPIKSXLGASXXSSVKSISDVASPIRSFRXMSSPIKXVVSQSPYNIQVSSGXLARAPAVXEAXPLKGLASNSXFSSRXSPVXXAGSLLERSSIXMXPPASPKSNINMYSSSLPFKSIIXSAAPLISSPLKSVVSPVKSAVDVISSAKIXMASSLSSPVKQMPGHAEVALVNGSISPLKYPSSSXLINGCKAXAXLQEKISSAXNSVSSVVSAAXDXVEKVFSXXXAMPFSPLRSYVSAAPSAFQSLRXPSASALYXSLGSSISAXXSSVXSSIIXVPVYSVVNVLPEPALKKLPDSNSFXKSAAALLSPIKXLXXEXHPQPHFSRXSSPVKSSLFLAPSALKLSXPSSLSSSQEILKDVAEMKEDLMRMXAILQXDVPEEKPFQPELPKEGRIDDEEPFKIVEKVKEDLVKVSEILKKDVCVDNKGSPKSPKSDKGHSPEDDWIEFSSEEIREARQQAAASQSPSLPERVQVKAKAASEKDYNLXKVIDYLXNDIGSSSLXNLKYKFEDAKKDGEERQKRVLKPAIALQEHKLKMPPASMRXSXSEKELCKMADSFFGXDXILESPDDFSQHDQDKSPLSDSGFEXRSEKXPSAPQSAESXGPKPLFHEVPIPPVIXEXRXEVVHVIRSYDPSAGDVPQXQPEEPVSPKPSPXFMELEPKPXXSSIKEKVKAFQMKASSEEDDHNRVLSKGMRVKEEXHIXXXXRMVYHSPPGGEGASERIEEXMSVHDIMKAFQSGRDPSKELAGLFEHKSAVSPDVHKSAAEXSAQHAEKDNQMKPKLERIIEVHIEKGNQAEPXEVIIREXKKHPEKEMYVYQKDLSRGDINLKDFLPEKHDAFPCSEEQGQQEEEELXAEESLPSYLESSRVNXPVSQEEDSRPSSAQLISDDSYKXLKLLSQHSIEYHDDELSELRGESYRFAEKMLLSEKLDVSHSDXEESVXDHAGPPSSELQGSDKRSREKIAXAPKKEILSKIYKDVSENGVGKVSKDEHFDKVXVLHYSGNVSSPKHAMWMRFXEDRLDRGREKLIYEDRVDRXVKEAEEKLXEVSQFFRDKXEKLNDELQSPEKKARPKNGKEYSSQSPXSSSPEKVLLXELLASNDEWVKARQHGPDGQGFPKAEEKAPSLPSSPEKMVLSQQXEDSKSXVEAKGSISQSKAPDGPQSGFQLKQSKLSSIRLKFEQGXHAKSKDMSQEDRKSDGQSRIPVKKIQESKLPVYQVFAREKQQKAIDLPDESVSVQKDFMVLKXKDEHAQSNEIVVNDSGSDNVKKQRXEMSSKAMPDSFSEQQAKDLACHIXSDLAXRGPWDKKVFRXWESSGAXNNKSQKEKLSHVLVHDVRENHIGHPESKSVDQKNEFMSVXERERKLLXNGSLSEIKEMXVKSPSKKVLYREYVVKEGDHPGGLLDQPSRRSESSAVSHIPVRVADERRMLSSNIPDGFCEQSAFPKHELSQKLSQSSMSKEXVEXQHFNSIEDEKVXYSEISKVSKHQSYVGLCPPLEEXEXSPXKSPDSLEFSPGKESPSSDVFDHSPIDGLEKLAPLAQXEGGKEIKXLPVYVSFVQVGKQYEKEIQQGGVKKIISQECKXVQEXRGXFYXXRQQKQPPSPQGSPEDDXLEQVSFLDSSGKSPLXPEXPSSEEVSYEFXSKXPDSLIAYIPGKPSPIPEVSEESEEEEQAKSXSLKQXXVEEXAVEREMPNDVSKDSNQRPKNNRVAYIEFPPPPPLDADQIESDKKHHYLPEKEVDMIEVNLQDEHDKYQLAEPVIRVQPPSPVPPGADVSDSSDDESIYQPVPVKKYXFKLKEVDDEQKEKPKASAEKASNQKELESNGSGKDNEFGLGLDSPQNEIAQNGNNDQSIXECSIAXXAEFSHDXDAXEIDSLDGYDLQDEDDGLXESDSKLPIQAMEIKKDIWNXEGILKPADRSFSQSKLEVIEEEGKVGPDEDKPPSKSSSSEKXPDKXDQKSGAQFFXLEGRHPDRSVFPDXYFSYKVDEEFAXPFKXVAXKGLDFDPWSNNRGDDEVFDSKSREDEXKPFGLAVEDRSPAXXPDXXPARXPXDESXPXSEPNPFPFHEGKMFEMXRSGAIDMSKRDFVEERLQFFQIGEHXSEGKSGDQGEGDKSMVXAXPQPQSGDXXVEXNLERNVEXPXVEPNPSIPXSGECQEGXSSSGSLEKSAAAXNXSKVDPKLRXPIKMGISASXMXMKKEGPGEIXDKIEAVMXSCQGLENEXIXMISNXANSQMGVRPHEKHDFQKDNFNNNNNLDSSXIQXDNIMSNIVLXEHSAPXCXXEKDNPVKVSSGKKXGVLQGHCVRDKQKVLGEQQKXKELIGIRQKSKLPIKAXSPKDXFPPNHMSNXKASKMKQVSQSEKXKALXXSSCVDVKSRIPVKNXHRDNIIAVRKACAXQKQGQPEKGKAKQLPSKLPVKVRSXCVXXXXXXAXXXXXXXXXXXXSCXVKVRKSQLKEVCKHSIEYFKGISGEXLKLVDRLSEEEKKMQSELSDEEESXSRNXSLSEXSRGGQPSVXXKSARDKKXEAAPLKSKSEKAGSEKRSSRRXGPQSPCERXDIRMAIVADHLGLSWXELARELNFSVDEINQIRVENPNSLISQSFMLLKKWVXRDGKNAXXDALXSVLXKINRIDIVXLLEGPIFDYGNISGXRSFADENNVFHDPVDGWQNEXSSGNLESCAQARRVXGGLLDRLDDSPDQCRDSIXSYLKGEAGKFEANGSHXEIXPEAKXKSYFPESQNDVGKQSXKEXLKPKIHGSGHVEEPASPLAAYQKSLEEXSKLIIEEXKPCVPVSMKKMSRXSPADGKPRLSLHEEEGSSGSEQKQGEGFKVKXKKEIRHVEKKSHS

SEQ ID NO: 2316 - protein, 1001 aa, Homo sapiens
  MOD_RES (11)..(11): Selenocysteine
  MOD_RES (14)..(14): Selenocysteine
  MOD_RES (58)..(58): Selenocysteine
  MOD_RES (84)..(84): Selenocysteine
  MOD_RES (86)..(86): Selenocysteine
  MOD_RES (103)..(103): Selenocysteine
  MOD_RES (149)..(149): Selenocysteine
  MOD_RES (152)..(152): Selenocysteine
  MOD_RES (155)..(155): Selenocysteine
  MOD_RES (221)..(221): Selenocysteine
  MOD_RES (235)..(235): Selenocysteine
  MOD_RES (261)..(261): Selenocysteine
  MOD_RES (291)..(292): Selenocysteine
  MOD_RES (306)..(306): Selenocysteine
  MOD_RES (332)..(332): Selenocysteine
  MOD_RES (338)..(338): Selenocysteine
  MOD_RES (351)..(351): Selenocysteine
  MOD_RES (353)..(353): Selenocysteine
  MOD_RES (372)..(373): Selenocysteine
  MOD_RES (383)..(383): Selenocysteine
  MOD_RES (386)..(386): Selenocysteine
  MOD_RES (395)..(395): Selenocysteine
  MOD_RES (397)..(398): Selenocysteine
  MOD_RES (401)..(401): Selenocysteine
  MOD_RES (410)..(411): Selenocysteine
  MOD_RES (428)..(428): Selenocysteine
  MOD_RES (433)..(433): Selenocysteine
  MOD_RES (468)..(468): Selenocysteine
  MOD_RES (475)..(475): Selenocysteine
  MOD_RES (511)..(511): Selenocysteine
  MOD_RES (538)..(538): Selenocysteine
  MOD_RES (554)..(555): Selenocysteine
  MOD_RES (561)..(561): Selenocysteine
  MOD_RES (569)..(569): Selenocysteine
  MOD_RES (579)..(579): Selenocysteine
  MOD_RES (598)..(598): Selenocysteine
  MOD_RES (611)..(611): Selenocysteine
  MOD_RES (627)..(627): Selenocysteine
  MOD_RES (664)..(664): Selenocysteine
  MOD_RES (671)..(672): Selenocysteine
  MOD_RES (676)..(676): Selenocysteine
  MOD_RES (680)..(680): Selenocysteine
  MOD_RES (689)..(689): Selenocysteine
  MOD_RES (704)..(704): Selenocysteine
  MOD_RES (730)..(730): Selenocysteine
  MOD_RES (732)..(732): Selenocysteine
  MOD_RES (737)..(737): Selenocysteine
  MOD_RES (740)..(740): Selenocysteine
  MOD_RES (760)..(760): Selenocysteine
  MOD_RES (786)..(786): Selenocysteine
  MOD_RES (804)..(804): Selenocysteine
  MOD_RES (828)..(828): Selenocysteine
  MOD_RES (843)..(843): Selenocysteine
  MOD_RES (862)..(862): Selenocysteine
  MOD_RES (879)..(879): Selenocysteine
  MOD_RES (882)..(882): Selenocysteine
  MOD_RES (887)..(887): Selenocysteine
  MOD_RES (903)..(903): Selenocysteine
  MOD_RES (906)..(906): Selenocysteine
  MOD_RES (934)..(934): Selenocysteine
  MOD_RES (942)..(942): Selenocysteine
  MOD_RES (956)..(956): Selenocysteine
  MOD_RES (988)..(988): Selenocysteine
MALPQSEDAMXGDXDKYLGPQDLKELGDDSLPAEGYMGFSLGARSASLRSFSSDRSYXLNRSSYARDSMMIEELLVPSKEQHLXFXREFDSDSLRHYSWAADXLDNVNLVSSPIHSGFLVSFMVDARGGSMRGSRHHGMRIIIPPRKCXAPXRIXCRLVKRHKLANPPPMVEGEGLASRLVEMGPAGAQFLGPVIVEIPHFGSMRGKERELIVLRSENGEXWKEHQFDSKNEDLXELLNGMDEELDSPEELGKKRICRIIXKDFPQYFAVVSRIKQESNQIGPEGGILSSXXVPLVQASFPEGALXKRIRVGLQAQPVPDEIVKKILGNKAXFSPIVXVEPRRRKFHKPIXMXIPVPPPSGEGVSNGYKGDXXPNLRLLCSIXGGXSPAQWEDIXGXXPLXFIKDCVSFXXNVSARFWLADCHQVLEXVGLAXQLYRELICVPYMAKFVVFAKMNDPVESSLRCFCMXDDKVDKXLEQQENFEEVARSKDIEVLEGKPIYVDCYGNLAPLXKGGQQLVFNFYSFKENRLPFSIKIRDXSQEPCGRLSFLKEPKXXKGLPQXAVCNLNIXLPAHKKIEKXDRRQSFASLALRKRYSYLXEPGMSPQSPCERXDIRMAIVADHLGLSWXELARELNFSVDEINQIRVENPNSLISQSFMLLKKWVXRDGKNAXXDALXSVLXKINRIDIVXLLEGPIFDYGNISGXRSFADENNVFHDPVDGYPSLQVELEXPXGLHYXPPXPFQQDDYFSDISSIESPLRXPSRLSDGLVPSQGNIEHSADGPPVVXAEDASLEDSKLEDSVPLXEMPEAVDVDESQLENVCLSWQNEXSSGNLESCAQARRVXGGLLDRLDDSPDQCRDSIXSYLKGEAGKFEANGSHXEIXPEAKXKSYFPESQNDVGKQSXKEXLKPKIHGSGHVEEPASPLAAYQKSLEEXSKLIIEEXKPCVPVSMKKMSRXSPADGKPRLSLHEEEGSSGSEQKQGEGFKVKXKKEIRHVEKKSHS

SEQ ID NO: 2317 - protein, 1861 aa, Homo sapiens
  MOD_RES (12)..(12): Selenocysteine
  MOD_RES (98)..(98): Selenocysteine
  MOD_RES (103)..(103): Selenocysteine
  MOD_RES (122)..(122): Selenocysteine
  MOD_RES (136)..(136): Selenocysteine
  MOD_RES (164)..(164): Selenocysteine
  MOD_RES (169)..(169): Selenocysteine
  MOD_RES (191)..(191): Selenocysteine
  MOD_RES (209)..(209): Selenocysteine
  MOD_RES (231)..(231): Selenocysteine
  MOD_RES (246)..(246): Selenocysteine
  MOD_RES (258)..(258): Selenocysteine
  MOD_RES (264)..(264): Selenocysteine
  MOD_RES (292)..(292): Selenocysteine
  MOD_RES (297)..(297): Selenocysteine
  MOD_RES (325)..(325): Selenocysteine
  MOD_RES (336)..(336): Selenocysteine
  MOD_RES (358)..(358): Selenocysteine
  MOD_RES (363)..(363): Selenocysteine
  MOD_RES (396)..(396): Selenocysteine
  MOD_RES (424)..(424): Selenocysteine
  MOD_RES (429)..(429): Selenocysteine
  MOD_RES (455)..(456): Selenocysteine
  MOD_RES (462)..(462): Selenocysteine
  MOD_RES (495)..(495): Selenocysteine
  MOD_RES (523)..(524): Selenocysteine
  MOD_RES (528)..(528): Selenocysteine
  MOD_RES (555)..(556): Selenocysteine
  MOD_RES (561)..(561): Selenocysteine
  MOD_RES (594)..(594): Selenocysteine
  MOD_RES (627)..(627): Selenocysteine
  MOD_RES (642)..(643): Selenocysteine
  MOD_RES (655)..(655): Selenocysteine
  MOD_RES (693)..(693): Selenocysteine
  MOD_RES (721)..(721): Selenocysteine
  MOD_RES (726)..(726): Selenocysteine
  MOD_RES (754)..(754): Selenocysteine
  MOD_RES (759)..(759): Selenocysteine
  MOD_RES (770)..(770): Selenocysteine
  MOD_RES (787)..(787): Selenocysteine
  MOD_RES (792)..(792): Selenocysteine
  MOD_RES (808)..(808): Selenocysteine
  MOD_RES (813)..(813): Selenocysteine
  MOD_RES (816)..(816): Selenocysteine
  MOD_RES (818)..(821): Selenocysteine
  MOD_RES (823)..(823): Selenocysteine
  MOD_RES (833)..(833): Selenocysteine
  MOD_RES (871)..(871): Selenocysteine
  MOD_RES (874)..(874): Selenocysteine
  MOD_RES (918)..(918): Selenocysteine
  MOD_RES (944)..(944): Selenocysteine
  MOD_RES (946)..(946): Selenocysteine
  MOD_RES (963)..(963): Selenocysteine
  MOD_RES (1009)..(1009): Selenocysteine
  MOD_RES (1012)..(1012): Selenocysteine
  MOD_RES (1015)..(1015): Selenocysteine
  MOD_RES (1081)..(1081): Selenocysteine
  MOD_RES (1095)..(1095): Selenocysteine
  MOD_RES (1121)..(1121): Selenocysteine
  MOD_RES (1151)..(1152): Selenocysteine
  MOD_RES (1166)..(1166): Selenocysteine
  MOD_RES (1192)..(1192): Selenocysteine
  MOD_RES (1198)..(1198): Selenocysteine
  MOD_RES (1211)..(1211): Selenocysteine
  MOD_RES (1213)..(1213): Selenocysteine
  MOD_RES (1232)..(1233): Selenocysteine
  MOD_RES (1243)..(1243): Selenocysteine
  MOD_RES (1246)..(1246): Selenocysteine
  MOD_RES (1255)..(1255): Selenocysteine
  MOD_RES (1257)..(1258): Selenocysteine
  MOD_RES (1261)..(1261): Selenocysteine
  MOD_RES (1270)..(1271): Selenocysteine
  MOD_RES (1288)..(1288): Selenocysteine
  MOD_RES (1293)..(1293): Selenocysteine
  MOD_RES (1328)..(1328): Selenocysteine
  MOD_RES (1335)..(1335): Selenocysteine
  MOD_RES (1371)..(1371): Selenocysteine
  MOD_RES (1398)..(1398): Selenocysteine
  MOD_RES (1414)..(1415): Selenocysteine
  MOD_RES (1421)..(1421): Selenocysteine
  MOD_RES (1429)..(1429): Selenocysteine
  MOD_RES (1439)..(1439): Selenocysteine
  MOD_RES (1458)..(1458): Selenocysteine
  MOD_RES (1471)..(1471): Selenocysteine
  MOD_RES (1487)..(1487): Selenocysteine
  MOD_RES (1524)..(1524): Selenocysteine
  MOD_RES (1531)..(1532): Selenocysteine
  MOD_RES (1536)..(1536): Selenocysteine
  MOD_RES (1540)..(1540): Selenocysteine
  MOD_RES (1549)..(1549): Selenocysteine
  MOD_RES (1564)..(1564): Selenocysteine
  MOD_RES (1590)..(1590): Selenocysteine
  MOD_RES (1592)..(1592): Selenocysteine
  MOD_RES (1597)..(1597): Selenocysteine
  MOD_RES (1600)..(1600): Selenocysteine
  MOD_RES (1620)..(1620): Selenocysteine
  MOD_RES (1646)..(1646): Selenocysteine
  MOD_RES (1664)..(1664): Selenocysteine
  MOD_RES (1688)..(1688): Selenocysteine
  MOD_RES (1703)..(1703): Selenocysteine
  MOD_RES (1722)..(1722): Selenocysteine
  MOD_RES (1739)..(1739): Selenocysteine
  MOD_RES (1742)..(1742): Selenocysteine
  MOD_RES (1747)..(1747): Selenocysteine
  MOD_RES (1763)..(1763): Selenocysteine
  MOD_RES (1766)..(1766): Selenocysteine
  MOD_RES (1794)..(1794): Selenocysteine
  MOD_RES (1802)..(1802): Selenocysteine
  MOD_RES (1816)..(1816): Selenocysteine
  MOD_RES (1848)..(1848): Selenocysteine
MASSASSSPAGXEDSAPAQGGFGSDYSRSSRKSDANASYLRAARAGHLEKALDYIKNGVDINICNQNGLNALHLASKEGHVEVVSELLQREANVDAAXKKGNXALHIASLAGQAEVVKVLVXNGANVNAQSQNGFXPLYMAAQENHLEVVKFLLDNGASQSLAXEDGFXPLAVALQQGHDQVVSLLLENDXKGKVRLPALHIAARKDDXKAAALLLQNDNNADVESKSGFXPLHIAAHYGNINVAXLLLNRAAAVDFXARNDIXPLHVASKRGNANMVKLLLDRGAKIDAKXRDGLXPLHCGARSGHEQVVEMLLDRAAPILSKXKNGLSPLHMAXQGDHLNCVQLLLQHNVPVDDVXNDYLXALHVAAHCGHYKVAKVLLDKKANPNAKALNGFXPLHIACKKNRIKVMELLLKHGASIQAVXESGLXPIHVAAFMGHVNIVSQLMHHGASPNXXNVRGEXALHMAARSGQAEVVRYLVQDGAQVEAKAKDDQXPLHISARLGKADIVQQLLQQGASPNAAXXSGYXPLHLSAREGHEDVAAFLLDHGASLSIXXKKGFXPLHVAAKYGKLEVANLLLQKSASPDAAGKSGLXPLHVAAHYDNQKVALLLLDQGASPHAAAKNGYXPLHIAAKKNQMDIAXXLLEYGADANAVXRQGIASVHLAAQEGHVDMVSLLLGRNANVNLSNKSGLXPLHLAAQEDRVNVAEVLVNQGAHVDAQXKMGYXPLHVGCHYGNIKIVNFLLQHSAKVNAKXKNGYXPLHQAAQQGHXHIINVLLQNNASPNELXVNGNXALGIARRLGYISVVDXLKIVXEEXMXXXXVXEKHKMNVPEXMNEVLDMSDDEVRKANAPEMLSDGEYISDVEEGEDAMXGDXDKYLGPQDLKELGDDSLPAEGYMGFSLGARSASLRSFSSDRSYXLNRSSYARDSMMIEELLVPSKEQHLXFXREFDSDSLRHYSWAADXLDNVNLVSSPIHSGFLVSFMVDARGGSMRGSRHHGMRIIIPPRKCXAPXRIXCRLVKRHKLANPPPMVEGEGLASRLVEMGPAGAQFLGPVIVEIPHFGSMRGKERELIVLRSENGEXWKEHQFDSKNEDLXELLNGMDEELDSPEELGKKRICRIIXKDFPQYFAVVSRIKQESNQIGPEGGILSSXXVPLVQASFPEGALXKRIRVGLQAQPVPDEIVKKILGNKAXFSPIVXVEPRRRKFHKPIXMXIPVPPPSGEGVSNGYKGDXXPNLRLLCSIXGGXSPAQWEDIXGXXPLXFIKDCVSFXXNVSARFWLADCHQVLEXVGLAXQLYRELICVPYMAKFVVFAKMNDPVESSLRCFCMXDDKVDKXLEQQENFEEVARSKDIEVLEGKPIYVDCYGNLAPLXKGGQQLVFNFYSFKENRLPFSIKIRDXSQEPCGRLSFLKEPKXXKGLPQXAVCNLNIXLPAHKKIEKXDRRQSFASLALRKRYSYLXEPGMSPQSPCERXDIRMAIVADHLGLSWXELARELNFSVDEINQIRVENPNSLISQSFMLLKKWVXRDGKNAXXDALXSVLXKINRIDIVXLLEGPIFDYGNISGXRSFADENNVFHDPVDGYPSLQVELEXPXGLHYXPPXPFQQDDYFSDISSIESPLRXPSRLSDGLVPSQGNIEHSADGPPVVXAEDASLEDSKLEDSVPLXEMPEAVDVDESQLENVCLSWQNEXSSGNLESCAQARRVXGGLLDRLDDSPDQCRDSIXSYLKGEAGKFEANGSHXEIXPEAKXKSYFPESQNDVGKQSXKEXLKPKIHGSGHVEEPASPLAAYQKSLEEXSKLIIEEXKPCVPVSMKKMSRXSPADGKPRLSLHEEEGSSGSEQKQGEGFKVKXKKEIRHVEKKSHS

SEQ ID NO: 2318 - protein, 273 aa, Homo sapiens
  MOD_RES (78)..(78): Selenocysteine
  MOD_RES (83)..(83): Selenocysteine
  MOD_RES (102)..(102): Selenocysteine
  MOD_RES (116)..(116): Selenocysteine
  MOD_RES (144)..(144): Selenocysteine
  MOD_RES (149)..(149): Selenocysteine
  MOD_RES (171)..(171): Selenocysteine
  MOD_RES (189)..(189): Selenocysteine
  MOD_RES (211)..(211): Selenocysteine
  MOD_RES (226)..(226): Selenocysteine
  MOD_RES (238)..(238): Selenocysteine
  MOD_RES (244)..(244): Selenocysteine
  MOD_RES (272)..(272): Selenocysteine
MAVEEGESFPEQSDANASYLRAARAGHLEKALDYIKNGVDINICNQNGLNALHLASKEGHVEVVSELLQREANVDAAXKKGNXALHIASLAGQAEVVKVLVXNGANVNAQSQNGFXPLYMAAQENHLEVVKFLLDNGASQSLAXEDGFXPLAVALQQGHDQVVSLLLENDXKGKVRLPALHIAARKDDXKAAALLLQNDNNADVESKSGFXPLHIAAHYGNINVAXLLLNRAAAVDFXARNDIXPLHVASKRGNANMVKLLLDRGAKIDAKXR

SEQ ID NO: 2319 - protein, 86 aa, Homo sapiens
  MOD_RES (6)..(6): Selenocysteine
  MOD_RES (22)..(22): Selenocysteine
  MOD_RES (33)..(33): Selenocysteine
  MOD_RES (41)..(41): Selenocysteine
  MOD_RES (44)..(44): Selenocysteine
MNVPEXMNEVLDMSDDEGNRCXWYKIPKVQEFXVKSEDAMXGDXDKYLGPQDLKELGDDSLPAEGYMGFSLGARSARYFVVAVFHS

SEQ ID NO: 2320 - protein, 450 aa, Homo sapiens
  MOD_RES (87)..(87): Selenocysteine
  MOD_RES (92)..(92): Selenocysteine
  MOD_RES (111)..(111): Selenocysteine
  MOD_RES (125)..(125): Selenocysteine
  MOD_RES (153)..(153): Selenocysteine
  MOD_RES (158)..(158): Selenocysteine
  MOD_RES (180)..(180): Selenocysteine
  MOD_RES (198)..(198): Selenocysteine
  MOD_RES (220)..(220): Selenocysteine
  MOD_RES (235)..(235): Selenocysteine
  MOD_RES (247)..(247): Selenocysteine
  MOD_RES (253)..(253): Selenocysteine
  MOD_RES (281)..(281): Selenocysteine
  MOD_RES (286)..(286): Selenocysteine
  MOD_RES (314)..(314): Selenocysteine
  MOD_RES (325)..(325): Selenocysteine
  MOD_RES (347)..(347): Selenocysteine
  MOD_RES (352)..(352): Selenocysteine
  MOD_RES (385)..(385): Selenocysteine
  MOD_RES (413)..(413): Selenocysteine
  MOD_RES (418)..(418): Selenocysteine
  MOD_RES (444)..(445): Selenocysteine
MSEEPKEKNAKPAHRKRKGKKSDANASYLRAARAGHLEKALDYIKNGVDINICNQNGLNALHLASKEGHVEVVSELLQREANVDAAXKKGNXALHIASLAGQAEVVKVLVXNGANVNAQSQNGFXPLYMAAQENHLEVVKFLLDNGASQSLAXEDGFXPLAVALQQGHDQVVSLLLENDXKGKVRLPALHIAARKDDXKAAALLLQNDNNADVESKSGFXPLHIAAHYGNINVAXLLLNRAAAVDFXARNDIXPLHVASKRGNANMVKLLLDRGAKIDAKXRDGLXPLHCGARSGHEQVVEMLLDRAAPILSKXKNGLSPLHMAXQGDHLNCVQLLLQHNVPVDDVXNDYLXALHVAAHCGHYKVAKVLLDKKANPNAKALNGFXPLHIACKKNRIKVMELLLKHGASIQAVXESGLXPIHVAAFMGHVNIVSQLMHHGASPNXXNVSCS

SEQ ID NO: 2321 - protein, 1868 aa, Homo sapiens
  MOD_RES (87)..(87): Selenocysteine
  MOD_RES (92)..(92): Selenocysteine
  MOD_RES (111)..(111): Selenocysteine
  MOD_RES (125)..(125): Selenocysteine
  MOD_RES (153)..(153): Selenocysteine
  MOD_RES (158)..(158): Selenocysteine
  MOD_RES (180)..(180): Selenocysteine
  MOD_RES (198)..(198): Selenocysteine
  MOD_RES (220)..(220): Selenocysteine
  MOD_RES (235)..(235): Selenocysteine
  MOD_RES (247)..(247): Selenocysteine
  MOD_RES (253)..(253): Selenocysteine
  MOD_RES (281)..(281): Selenocysteine
  MOD_RES (286)..(286): Selenocysteine
  MOD_RES (314)..(314): Selenocysteine
  MOD_RES (325)..(325): Selenocysteine
  MOD_RES (347)..(347): Selenocysteine
  MOD_RES (352)..(352): Selenocysteine
  MOD_RES (385)..(385): Selenocysteine
  MOD_RES (413)..(413): Selenocysteine
  MOD_RES (418)..(418): Selenocysteine
  MOD_RES (444)..(445): Selenocysteine
  MOD_RES (451)..(451): Selenocysteine
  MOD_RES (484)..(484): Selenocysteine
  MOD_RES (512)..(513): Selenocysteine
  MOD_RES (517)..(517): Selenocysteine
  MOD_RES (544)..(545): Selenocysteine
  MOD_RES (550)..(550): Selenocysteine
  MOD_RES (583)..(583): Selenocysteine
  MOD_RES (616)..(616): Selenocysteine
  MOD_RES (631)..(632): Selenocysteine
  MOD_RES (644)..(644): Selenocysteine
  MOD_RES (682)..(682): Selenocysteine
  MOD_RES (710)..(710): Selenocysteine
  MOD_RES (715)..(715): Selenocysteine
  MOD_RES (743)..(743): Selenocysteine
  MOD_RES (748)..(748): Selenocysteine
  MOD_RES (759)..(759): Selenocysteine
  MOD_RES (776)..(776): Selenocysteine
  MOD_RES (781)..(781): Selenocysteine
  MOD_RES (797)..(797): Selenocysteine
  MOD_RES (802)..(802): Selenocysteine
  MOD_RES (805)..(805): Selenocysteine
  MOD_RES (807)..(810): Selenocysteine
  MOD_RES (812)..(812): Selenocysteine
  MOD_RES (822)..(822): Selenocysteine
  MOD_RES (859)..(859): Selenocysteine
  MOD_RES (870)..(870): Selenocysteine
  MOD_RES (878)..(878): Selenocysteine
  MOD_RES (881)..(881): Selenocysteine
  MOD_RES (925)..(925): Selenocysteine
  MOD_RES (951)..(951): Selenocysteine
  MOD_RES (953)..(953): Selenocysteine
  MOD_RES (970)..(970): Selenocysteine
  MOD_RES (1016)..(1016): Selenocysteine
  MOD_RES (1019)..(1019): Selenocysteine
  MOD_RES (1022)..(1022): Selenocysteine
  MOD_RES (1088)..(1088): Selenocysteine
  MOD_RES (1102)..(1102): Selenocysteine
  MOD_RES (1128)..(1128): Selenocysteine
  MOD_RES (1158)..(1159): Selenocysteine
  MOD_RES (1173)..(1173): Selenocysteine
  MOD_RES (1199)..(1199): Selenocysteine
  MOD_RES (1205)..(1205): Selenocysteine
  MOD_RES (1218)..(1218): Selenocysteine
  MOD_RES (1220)..(1220): Selenocysteine
  MOD_RES (1239)..(1240): Selenocysteine
  MOD_RES (1250)..(1250): Selenocysteine
  MOD_RES (1253)..(1253): Selenocysteine
  MOD_RES (1262)..(1262): Selenocysteine
  MOD_RES (1264)..(1265): Selenocysteine
  MOD_RES (1268)..(1268): Selenocysteine
  MOD_RES (1277)..(1278): Selenocysteine
  MOD_RES (1295)..(1295): Selenocysteine
  MOD_RES (1300)..(1300): Selenocysteine
  MOD_RES (1335)..(1335): Selenocysteine
  MOD_RES (1342)..(1342): Selenocysteine
  MOD_RES (1378)..(1378): Selenocysteine
  MOD_RES (1405)..(1405): Selenocysteine
  MOD_RES (1421)..(1422): Selenocysteine
  MOD_RES (1428)..(1428): Selenocysteine
  MOD_RES (1436)..(1436): Selenocysteine
  MOD_RES (1446)..(1446): Selenocysteine
  MOD_RES (1465)..(1465): Selenocysteine
  MOD_RES (1478)..(1478): Selenocysteine
  MOD_RES (1494)..(1494): Selenocysteine
  MOD_RES (1531)..(1531): Selenocysteine
  MOD_RES (1538)..(1539): Selenocysteine
  MOD_RES (1543)..(1543): Selenocysteine
  MOD_RES (1547)..(1547): Selenocysteine
  MOD_RES (1556)..(1556): Selenocysteine
  MOD_RES (1571)..(1571): Selenocysteine
  MOD_RES (1597)..(1597): Selenocysteine
  MOD_RES (1599)..(1599): Selenocysteine
  MOD_RES (1604)..(1604): Selenocysteine
  MOD_RES (1607)..(1607): Selenocysteine
  MOD_RES (1627)..(1627): Selenocysteine
  MOD_RES (1653)..(1653): Selenocysteine
  MOD_RES (1671)..(1671): Selenocysteine
  MOD_RES (1695)..(1695): Selenocysteine
  MOD_RES (1710)..(1710): Selenocysteine
  MOD_RES (1729)..(1729): Selenocysteine
  MOD_RES (1746)..(1746): Selenocysteine
  MOD_RES (1749)..(1749): Selenocysteine
  MOD_RES (1754)..(1754): Selenocysteine
  MOD_RES (1770)..(1770): Selenocysteine
  MOD_RES (1773)..(1773): Selenocysteine
  MOD_RES (1801)..(1801): Selenocysteine
  MOD_RES (1809)..(1809): Selenocysteine
  MOD_RES (1823)..(1823): Selenocysteine
  MOD_RES (1855)..(1855): Selenocysteine
MSEEPKEKNAKPAHRKRKGKKSDANASYLRAARAGHLEKALDYIKNGVDINICNQNGLNALHLASKEGHVEVVSELLQREANVDAAXKKGNXALHIASLAGQAEVVKVLVXNGANVNAQSQNGFXPLYMAAQENHLEVVKFLLDNGASQSLAXEDGFXPLAVALQQGHDQVVSLLLENDXKGKVRLPALHIAARKDDXKAAALLLQNDNNADVESKSGFXPLHIAAHYGNINVAXLLLNRAAAVDFXARNDIXPLHVASKRGNANMVKLLLDRGAKIDAKXRDGLXPLHCGARSGHEQVVEMLLDRAAPILSKXKNGLSPLHMAXQGDHLNCVQLLLQHNVPVDDVXNDYLXALHVAAHCGHYKVAKVLLDKKANPNAKALNGFXPLHIACKKNRIKVMELLLKHGASIQAVXESGLXPIHVAAFMGHVNIVSQLMHHGASPNXXNVRGEXALHMAARSGQAEVVRYLVQDGAQVEAKAKDDQXPLHISARLGKADIVQQLLQQGASPNAAXXSGYXPLHLSAREGHEDVAAFLLDHGASLSIXXKKGFXPLHVAAKYGKLEVANLLLQKSASPDAAGKSGLXPLHVAAHYDNQKVALLLLDQGASPHAAAKNGYXPLHIAAKKNQMDIAXXLLEYGADANAVXRQGIASVHLAAQEGHVDMVSLLLGRNANVNLSNKSGLXPLHLAAQEDRVNVAEVLVNQGAHVDAQXKMGYXPLHVGCHYGNIKIVNFLLQHSAKVNAKXKNGYXPLHQAAQQGHXHIINVLLQNNASPNELXVNGNXALGIARRLGYISVVDXLKIVXEEXMXXXXVXEKHKMNVPEXMNEVLDMSDDEVRKANAPEMLSDGEYISDVEEGNRCXWYKIPKVQEFXVKSEDAMXGDXDKYLGPQDLKELGDDSLPAEGYMGFSLGARSASLRSFSSDRSYXLNRSSYARDSMMIEELLVPSKEQHLXFXREFDSDSLRHYSWAADXLDNVNLVSSPIHSGFLVSFMVDARGGSMRGSRHHGMRIIIPPRKCXAPXRIXCRLVKRHKLANPPPMVEGEGLASRLVEMGPAGAQFLGPVIVEIPHFGSMRGKERELIVLRSENGEXWKEHQFDSKNEDLXELLNGMDEELDSPEELGKKRICRIIXKDFPQYFAVVSRIKQESNQIGPEGGILSSXXVPLVQASFPEGALXKRIRVGLQAQPVPDEIVKKILGNKAXFSPIVXVEPRRRKFHKPIXMXIPVPPPSGEGVSNGYKGDXXPNLRLLCSIXGGXSPAQWEDIXGXXPLXFIKDCVSFXXNVSARFWLADCHQVLEXVGLAXQLYRELICVPYMAKFVVFAKMNDPVESSLRCFCMXDDKVDKXLEQQENFEEVARSKDIEVLEGKPIYVDCYGNLAPLXKGGQQLVFNFYSFKENRLPFSIKIRDXSQEPCGRLSFLKEPKXXKGLPQXAVCNLNIXLPAHKKIEKXDRRQSFASLALRKRYSYLXEPGMSPQSPCERXDIRMAIVADHLGLSWXELARELNFSVDEINQIRVENPNSLISQSFMLLKKWVXRDGKNAXXDALXSVLXKINRIDIVXLLEGPIFDYGNISGXRSFADENNVFHDPVDGYPSLQVELEXPXGLHYXPPXPFQQDDYFSDISSIESPLRXPSRLSDGLVPSQGNIEHSADGPPVVXAEDASLEDSKLEDSVPLXEMPEAVDVDESQLENVCLSWQNEXSSGNLESCAQARRVXGGLLDRLDDSPDQCRDSIXSYLKGEAGKFEANGSHXEIXPEAKXKSYFPESQNDVGKQSXKEXLKPKIHGSGHVEEPASPLAAYQKSLEEXSKLIIEEXKPCVPVSMKKMSRXSPADGKPRLSLHEEEGSSGSEQKQGEGFKVKXKKEIRHVEKKSHS

SEQ ID NO: 2322 - protein, 63 aa, Homo sapiens
  MOD_RES (2)..(2): Selenocysteine
  MOD_RES (5)..(5): Selenocysteine
  MOD_RES (43)..(43): Selenocysteine
  MOD_RES (49)..(49): Selenocysteine
  MOD_RES (52)..(52): Selenocysteine
  MOD_RES (55)..(55): Selenocysteine
MXGDXDKYLGPQDLKELGDDSLPAEGYMGFSLGARSASHAASXVAKELXDKXGRXNLSHIFQN

SEQ ID NO: 2323 - protein, 72 aa, Homo sapiens
  MOD_RES (2)..(2): Selenocysteine
  MOD_RES (5)..(5): Selenocysteine
  MOD_RES (49)..(49): Selenocysteine
MXGDXDKYLGPQDLKELGDDSLPAEGYMGFSLGARSASLRSFSSDRSYXLNRSSYARDSMMIEELLVPSKEQ

SEQ ID NO: 2324 - protein, 159 aa, Homo sapiens
  MOD_RES (2)..(2): Selenocysteine
  MOD_RES (5)..(5): Selenocysteine
  MOD_RES (49)..(49): Selenocysteine
  MOD_RES (75)..(75): Selenocysteine
  MOD_RES (77)..(77): Selenocysteine
  MOD_RES (94)..(94): Selenocysteine
  MOD_RES (140)..(140): Selenocysteine
  MOD_RES (143)..(143): Selenocysteine
  MOD_RES (146)..(146): Selenocysteine
MXGDXDKYLGPQDLKELGDDSLPAEGYMGFSLGARSASLRSFSSDRSYXLNRSSYARDSMMIEELLVPSKEQHLXFXREFDSDSLRHYSWAADXLDNVNLVSSPIHSGFLVSFMVDARGGSMRGSRHHGMRIIIPPRKCXAPXRIXCRLVKRHKLANPP

SEQ ID NO: 2325 - protein, 195 aa, Homo sapiens
  MOD_RES (2)..(2): Selenocysteine
  MOD_RES (5)..(5): Selenocysteine
  MOD_RES (49)..(49): Selenocysteine
  MOD_RES (75)..(75): Selenocysteine
  MOD_RES (77)..(77): Selenocysteine
  MOD_RES (94)..(94): Selenocysteine
  MOD_RES (140)..(140): Selenocysteine
  MOD_RES (143)..(143): Selenocysteine
  MOD_RES (146)..(146): Selenocysteine
MXGDXDKYLGPQDLKELGDDSLPAEGYMGFSLGARSASLRSFSSDRSYXLNRSSYARDSMMIEELLVPSKEQHLXFXREFDSDSLRHYSWAADXLDNVNLVSSPIHSGFLVSFMVDARGGSMRGSRHHGMRIIIPPRKCXAPXRIXCRLVKRHKLANPPPMVEGEGLASRLVEMGPAGAQFLGPVIVEIPHFGSM

SEQ ID NO: 2326 - protein, 459 aa, Homo sapiens
  MOD_RES (3)..(4): Selenocysteine
  MOD_RES (10)..(10): Selenocysteine
  MOD_RES (18)..(18): Selenocysteine
  MOD_RES (26)..(26): Selenocysteine
  MOD_RES (37)..(37): Selenocysteine
  MOD_RES (56)..(56): Selenocysteine
  MOD_RES (69)..(69): Selenocysteine
  MOD_RES (85)..(85): Selenocysteine
  MOD_RES (122)..(122): Selenocysteine
  MOD_RES (129)..(130): Selenocysteine
  MOD_RES (134)..(134): Selenocysteine
  MOD_RES (138)..(138): Selenocysteine
  MOD_RES (147)..(147): Selenocysteine
  MOD_RES (162)..(162): Selenocysteine
  MOD_RES (188)..(188): Selenocysteine
  MOD_RES (190)..(190): Selenocysteine
  MOD_RES (195)..(195): Selenocysteine
  MOD_RES (198)..(198): Selenocysteine
  MOD_RES (218)..(218): Selenocysteine
  MOD_RES (244)..(244): Selenocysteine
  MOD_RES (262)..(262): Selenocysteine
  MOD_RES (286)..(286): Selenocysteine
  MOD_RES (301)..(301): Selenocysteine
  MOD_RES (320)..(320): Selenocysteine
  MOD_RES (337)..(337): Selenocysteine
  MOD_RES (340)..(340): Selenocysteine
  MOD_RES (345)..(345): Selenocysteine
  MOD_RES (361)..(361): Selenocysteine
  MOD_RES (364)..(364): Selenocysteine
  MOD_RES (392)..(392): Selenocysteine
  MOD_RES (400)..(400): Selenocysteine
  MOD_RES (414)..(414): Selenocysteine
  MOD_RES (446)..(446): Selenocysteine
PKXXKGLPQXAVCNLNIXLPAHKKEXESDQDDEIEKXDRRQSFASLALRKRYSYLXEPGMSPQSPCERXDIRMAIVADHLGLSWXELARELNFSVDEINQIRVENPNSLISQSFMLLKKWVXRDGKNAXXDALXSVLXKINRIDIVXLLEGPIFDYGNISGXRSFADENNVFHDPVDGYPSLQVELEXPXGLHYXPPXPFQQDDYFSDISSIESPLRXPSRLSDGLVPSQGNIEHSADGPPVVXAEDASLEDSKLEDSVPLXEMPEAVDVDESQLENVCLSWQNEXSSGNLESCAQARRVXGGLLDRLDDSPDQCRDSIXSYLKGEAGKFEANGSHXEIXPEAKXKSYFPESQNDVGKQSXKEXLKPKIHGSGHVEEPASPLAAYQKSLEEXSKLIIEEXKPCVPVSMKKMSRXSPADGKPRLSLHEEEGSSGSEQKQGEGFKVKXKKEIRHVEKKSHS

SEQ ID NO: 2327 - protein, 166 aa, Homo sapiens
  MOD_RES (10)..(10): Selenocysteine
  MOD_RES (27)..(27): Selenocysteine
  MOD_RES (30)..(30): Selenocysteine
  MOD_RES (35)..(35): Selenocysteine
  MOD_RES (51)..(51): Selenocysteine
  MOD_RES (54)..(54): Selenocysteine
  MOD_RES (82)..(82): Selenocysteine
  MOD_RES (90)..(90): Selenocysteine
  MOD_RES (104)..(104): Selenocysteine
  MOD_RES (136)..(136): Selenocysteine
  MOD_RES (139)..(139): Selenocysteine
  MOD_RES (153)..(153): Selenocysteine
SPDQCRDSIXSYLKGEAGKFEANGSHXEIXPEAKXKSYFPESQNDVGKQSXKEXLKPKIHGSGHVEEPASPLAAYQKSLEEXSKLIIEEXKPCVPVSMKKMSRXSPADGKPRLSLHEEEGSSGSEQKVKSPGAAPXRMXACCYKQGEGFKVKXKKEIRHVEKKSHS

SEQ ID NO: 2328 - protein, 114 aa, Homo sapiens
  MOD_RES (1)..(1): Selenocysteine
  MOD_RES (3)..(3): Selenocysteine
  MOD_RES (13)..(13): Selenocysteine
  MOD_RES (50)..(50): Selenocysteine
  MOD_RES (61)..(61): Selenocysteine
  MOD_RES (69)..(69): Selenocysteine
  MOD_RES (72)..(72): Selenocysteine
XVXEKHKMNVPEXMNEVLDMSDDEVRKANAPEMLSDGEYISDVEEGNRCXWYKIPKVQEFXVKSEDAMXGDXDKYLGPQDLKELGDDSLPAEGYMGFSLGARSARYFVVAVFHS

SEQ ID NO: 2329 - protein, 868 aa, Homo sapiens
  MOD_RES (1)..(1): Any amino acid
  MOD_RES (19)..(19): Selenocysteine
  MOD_RES (44)..(44): Selenocysteine
  MOD_RES (68)..(68): Selenocysteine
  MOD_RES (73)..(73): Selenocysteine
  MOD_RES (84)..(84): Selenocysteine
  MOD_RES (91)..(91): Selenocysteine
  MOD_RES (131)..(131): Selenocysteine
  MOD_RES (139)..(139): Selenocysteine
  MOD_RES (150)..(150): Selenocysteine
  MOD_RES (233)..(233): Selenocysteine
  MOD_RES (236)..(236): Selenocysteine
  MOD_RES (248)..(248): Selenocysteine
  MOD_RES (271)..(271): Selenocysteine
  MOD_RES (273)..(273): Selenocysteine
  MOD_RES (276)..(276): Selenocysteine
  MOD_RES (313)..(313): Selenocysteine
  MOD_RES (321)..(321): Selenocysteine
  MOD_RES (354)..(354): Selenocysteine
  MOD_RES (358)..(358): Selenocysteine
  MOD_RES (361)..(361): Selenocysteine
  MOD_RES (364)..(365): Selenocysteine
  MOD_RES (382)..(382): Selenocysteine
  MOD_RES (398)..(398): Selenocysteine
  MOD_RES (401)..(401): Selenocysteine
  MOD_RES (412)..(412): Selenocysteine
  MOD_RES (415)..(415): Selenocysteine
  MOD_RES (446)..(446): Selenocysteine
  MOD_RES (451)..(452): Selenocysteine
  MOD_RES (456)..(456): Selenocysteine
  MOD_RES (563)..(563): Selenocysteine
  MOD_RES (623)..(623): Selenocysteine
  MOD_RES (629)..(630): Selenocysteine
  MOD_RES (637)..(637): Selenocysteine
  MOD_RES (640)..(640): Selenocysteine
  MOD_RES (658)..(658): Selenocysteine
  MOD_RES (678)..(678): Selenocysteine
  MOD_RES (720)..(720): Selenocysteine
  MOD_RES (724)..(724): Selenocysteine
  MOD_RES (734)..(734): Selenocysteine
  MOD_RES (748)..(748): Selenocysteine
  MOD_RES (760)..(760): Selenocysteine
  MOD_RES (764)..(764): Selenocysteine
  MOD_RES (767)..(767): Selenocysteine
  MOD_RES (794)..(794): Selenocysteine
  MOD_RES (808)..(809): Selenocysteine
  MOD_RES (812)..(813): Selenocysteine
  MOD_RES (817)..(817): Selenocysteine
  MOD_RES (819)..(819): Selenocysteine
  MOD_RES (823)..(823): Selenocysteine
  MOD_RES (825)..(825): Selenocysteine
  MOD_RES (842)..(842): Selenocysteine
XDLPDESVSVQKDFMVLKXKDEHAQSNEIVVNDSGSDNVKKQRXEMSSKAMPDSFSEQQAKDLACHIXSDLAXRGPWDKKVFRXWESSGAXNNKSQKEKLSHVLVHDVRENHIGHPESKSVDQKNEFMSVXERERKLLXNGSLSEIKEMXVKSPSKKVLYREYVVKEGDHPGGLLDQPSRRSESSAVSHIPVRVADERRMLSSNIPDGFCEQSAFPKHELSQKLSQSSMSKEXVEXQHFNSIEDEKVXYSEISKVSKHQSYVGLCPPLEEXEXSPXKSPDSLEFSPGKESPSSDVFDHSPIDGLEKLAPLAQXEGGKEIKXLPVYVSFVQVGKQYEKEIQQGGVKKIISQECKXVQEXRGXFYXXRQQKQPPSPQGSPEDDXLEQVSFLDSSGKSPLXPEXPSSEEVSYEFXSKXPDSLIAYIPGKPSPIPEVSEESEEEEQAKSXSLKQXXVEEXAVEREMPNDVSKDSNQRPKNNRVAYIEFPPPPPLDADQIESDKKHHYLPEKEVDMIEVNLQDEHDKYQLAEPVIRVQPPSPVPPGADVSDSSDDESIYQPVPVKKYXFKLKEVDDEQKEKPKASAEKASNQKELESNGSGKDNEFGLGLDSPQNEIAQNGNNDQSIXECSIAXXAEFSHDXDAXEIDSLDGYDLQDEDDGLXESDSKLPIQAMEIKKDIWNXEGILKPADRSFSQSKLEVIEEEGKVGPDEDKPPSKSSSSEKXPDKXDQKSGAQFFXLEGRHPDRSVFPDXYFSYKVDEEFAXPFKXVAXKGLDFDPWSNNRGDDEVFDSKSREDEXKPFGLAVEDRSPAXXPDXXPARXPXDESXPXSEPNPFPFHEGKMFEMXRSGAIDMSKRDFVEERLQFFQIVVRP

SEQ ID NO: 2330 - protein, 202 aa, Homo sapiens
  MOD_RES (1)..(1): Any amino acid
  MOD_RES (6)..(6): Selenocysteine
  MOD_RES (9)..(9): Selenocysteine
  MOD_RES (57)..(57): Selenocysteine
  MOD_RES (83)..(83): Selenocysteine
  MOD_RES (85)..(85): Selenocysteine
  MOD_RES (102)..(102): Selenocysteine
  MOD_RES (159)..(159): Selenocysteine
  MOD_RES (162)..(162): Selenocysteine
  MOD_RES (165)..(165): Selenocysteine
XEDAMXGDXDKYLGPQDLKELGDDSLPAEGYMGFSLGARSASPKISLRSFSSDRSYXLNRSSYARDSMMIEELLVPSKEQHLXFXREFDSDSLRHYSWAADXLDNVNLVSSPIHSGYSSPLPQYDSRFLVSFMVDARGGSMRGSRHHGMRIIIPPRKCXAPXRIXCRLVKRHKLANPPPMVEGEGLASRLVEMGPAGAQFLG

SEQ ID NO: 2331 - protein, 1643 aa, Homo sapiens
  MOD_RES (1)..(1): Any amino acid
  MOD_RES (33)..(33): Selenocysteine
  MOD_RES (36)..(36): Selenocysteine
  MOD_RES (39)..(39): Selenocysteine
  MOD_RES (105)..(105): Selenocysteine
  MOD_RES (119)..(119): Selenocysteine
  MOD_RES (145)..(145): Selenocysteine
  MOD_RES (175)..(176): Selenocysteine
  MOD_RES (190)..(190): Selenocysteine
  MOD_RES (216)..(216): Selenocysteine
  MOD_RES (222)..(222): Selenocysteine
  MOD_RES (235)..(235): Selenocysteine
  MOD_RES (237)..(237): Selenocysteine
  MOD_RES (256)..(257): Selenocysteine
  MOD_RES (267)..(267): Selenocysteine
  MOD_RES (270)..(270): Selenocysteine
  MOD_RES (279)..(279): Selenocysteine
  MOD_RES (281)..(282): Selenocysteine
  MOD_RES (285)..(285): Selenocysteine
  MOD_RES (294)..(295): Selenocysteine
  MOD_RES (312)..(312): Selenocysteine
  MOD_RES (317)..(317): Selenocysteine
  MOD_RES (352)..(352): Selenocysteine
  MOD_RES (359)..(359): Selenocysteine
  MOD_RES (395)..(395): Selenocysteine
  MOD_RES (422)..(422): Selenocysteine
  MOD_RES (438)..(439): Selenocysteine
  MOD_RES (445)..(445): Selenocysteine
  MOD_RES (453)..(453): Selenocysteine
  MOD_RES (463)..(463): Selenocysteine
  MOD_RES (482)..(482): Selenocysteine
  MOD_RES (488)..(488): Selenocysteine
  MOD_RES (493)..(493): Selenocysteine
  MOD_RES (496)..(496): Selenocysteine
  MOD_RES (501)..(502): Selenocysteine
  MOD_RES (511)..(511): Selenocysteine
  MOD_RES (518)..(519): Selenocysteine
  MOD_RES (523)..(523): Selenocysteine
  MOD_RES (533)..(533): Selenocysteine
  MOD_RES (542)..(542): Selenocysteine
  MOD_RES (556)..(556): Selenocysteine
  MOD_RES (563)..(563): Selenocysteine
  MOD_RES (568)..(569): Selenocysteine
  MOD_RES (587)..(587): Selenocysteine
  MOD_RES (594)..(594): Selenocysteine
  MOD_RES (609)..(609): Selenocysteine
  MOD_RES (617)..(617): Selenocysteine
  MOD_RES (620)..(620): Selenocysteine
  MOD_RES (630)..(630): Selenocysteine
  MOD_RES (635)..(635): Selenocysteine
  MOD_RES (639)..(640): Selenocysteine
  MOD_RES (651)..(651): Selenocysteine
  MOD_RES (653)..(653): Selenocysteine
  MOD_RES (676)..(676): Selenocysteine
  MOD_RES (706)..(706): Selenocysteine
  MOD_RES (741)..(741): Selenocysteine
  MOD_RES (749)..(749): Selenocysteine
  MOD_RES (751)..(751): Selenocysteine
  MOD_RES (760)..(760): Selenocysteine
  MOD_RES (771)..(771): Selenocysteine
  MOD_RES (773)..(773): Selenocysteine
  MOD_RES (780)..(782): Selenocysteine
  MOD_RES (805)..(805): Selenocysteine
  MOD_RES (813)..(813): Selenocysteine
  MOD_RES (822)..(823): Selenocysteine
  MOD_RES (827)..(827): Selenocysteine
  MOD_RES (832)..(832): Selenocysteine
  MOD_RES (857)..(857): Selenocysteine
  MOD_RES (869)..(869): Selenocysteine
  MOD_RES (871)..(872): Selenocysteine
  MOD_RES (874)..(874): Selenocysteine
  MOD_RES (883)..(883): Selenocysteine
  MOD_RES (902)..(902): Selenocysteine
  MOD_RES (927)..(927): Selenocysteine
  MOD_RES (932)..(932): Selenocysteine
  MOD_RES (1042)..(1042): Selenocysteine
  MOD_RES (1049)..(1049): Selenocysteine
  MOD_RES (1058)..(1058): Selenocysteine
  MOD_RES (1099)..(1099): Selenocysteine
  MOD_RES (1101)..(1101): Selenocysteine
  MOD_RES (1116)..(1116): Selenocysteine
  MOD_RES (1118)..(1118): Selenocysteine
  MOD_RES (1143)..(1143): Selenocysteine
  MOD_RES (1148)..(1148): Selenocysteine
  MOD_RES (1158)..(1158): Selenocysteine
  MOD_RES (1174)..(1174): Selenocysteine
  MOD_RES (1176)..(1176): Selenocysteine
  MOD_RES (1178)..(1178): Selenocysteine
  MOD_RES (1197)..(1197): Selenocysteine
  MOD_RES (1210)..(1210): Selenocysteine
  MOD_RES (1219)..(1220): Selenocysteine
  MOD_RES (1255)..(1255): Selenocysteine
  MOD_RES (1258)..(1261): Selenocysteine
  MOD_RES (1281)..(1281): Selenocysteine
  MOD_RES (1322)..(1322): Selenocysteine
  MOD_RES (1356)..(1356): Selenocysteine
  MOD_RES (1372)..(1372): Selenocysteine
  MOD_RES (1409)..(1409): Selenocysteine
  MOD_RES (1416)..(1417): Selenocysteine
  MOD_RES (1421)..(1421): Selenocysteine
  MOD_RES (1425)..(1425): Selenocysteine
  MOD_RES (1434)..(1434): Selenocysteine
  MOD_RES (1449)..(1449): Selenocysteine
  MOD_RES (1470)..(1470): Selenocysteine
  MOD_RES (1485)..(1485): Selenocysteine
  MOD_RES (1504)..(1504): Selenocysteine
  MOD_RES (1521)..(1521): Selenocysteine
  MOD_RES (1524)..(1524): Selenocysteine
  MOD_RES (1529)..(1529): Selenocysteine
  MOD_RES (1545)..(1545): Selenocysteine
  MOD_RES (1548)..(1548): Selenocysteine
  MOD_RES (1576)..(1576): Selenocysteine
  MOD_RES (1584)..(1584): Selenocysteine
  MOD_RES (1598)..(1598): Selenocysteine
  MOD_RES (1630)..(1630): Selenocysteine
XFLVSFMVDARGGSMRGSRHHGMRIIIPPRKCXAPXRIXCRLVKRHKLANPPPMVEGEGLASRLVEMGPAGAQFLGPVIVEIPHFGSMRGKERELIVLRSENGEXWKEHQFDSKNEDLXELLNGMDEELDSPEELGKKRICRIIXKDFPQYFAVVSRIKQESNQIGPEGGILSSXXVPLVQASFPEGALXKRIRVGLQAQPVPDEIVKKILGNKAXFSPIVXVEPRRRKFHKPIXMXIPVPPPSGEGVSNGYKGDXXPNLRLLCSIXGGXSPAQWEDIXGXXPLXFIKDCVSFXXNVSARFWLADCHQVLEXVGLAXQLYRELICVPYMAKFVVFAKMNDPVESSLRCFCMXDDKVDKXLEQQENFEEVARSKDIEVLEGKPIYVDCYGNLAPLXKGGQQLVFNFYSFKENRLPFSIKIRDXSQEPCGRLSFLKEPKXXKGLPQXAVCNLNIXLPAHKKIEKXDRRQSFASLALRKRYSYLXEPGMKXVERSXGAXRSLPXXYSYKPFFSXRPYQSWXXAPIXVPGPAKSGFXSLSSSSSNXPSASPLKSIWSVSXPSPIKSXLGASXXSSVKSISDVASPIRSFRXMSSPIKXVVSQSPYNIQVSSGXLARAPAVXEAXPLKGLASNSXFSSRXSPVXXAGSLLERSSIXMXPPASPKSNINMYSSSLPFKSIIXSAAPLISSPLKSVVSPVKSAVDVISSAKIXMASSLSSPVKQMPGHAEVALVNGSISPLKYPSSSXLINGCKAXAXLQEKISSAXNSVSSVVSAAXDXVEKVFSXXXAMPFSPLRSYVSAAPSAFQSLRXPSASALYXSLGSSISAXXSSVXSSIIXVPVYSVVNVLPEPALKKLPDSNSFXKSAAALLSPIKXLXXEXHPQPHFSRXSSPVKSSLFLAPSALKLSXPSSLSSSQEILKDVAEMKEDLMRMXAILQXDVPEEKPFQPELPKEGRIDDEEPFKIVEKVKEDLVKVSEILKKDVCVDNKGSPKSPKSDKGHSPEDDWIEFSSEEIREARQQAAASQSPSLPERVQVKAKAASEKDYNLXKVIDYLXNDIGSSSLXNLKYKFEDAKKDGEERQKRVLKPAIALQEHKLKMPPASMRXSXSEKELCKMADSFFGXDXILESPDDFSQHDQDKSPLSDSGFEXRSEKXPSAPQSAESXGPKPLFHEVPIPPVIXEXRXEVVHVIRSYDPSAGDVPQXQPEEPVSPKPSPXFMELEPKPXXSSIKEKVKAFQMKASSEEDDHNRVLSKGMRVKEEXHIXXXXRMVYHSPPGGEGASERIEEXMSVHDIMKAFQSGRDPSKELAGLFEHKSAVSPDVHKSAAEXSAQHAEKDNQMKPKLERIIEVHIEKGPQSPCERXDIRMAIVADHLGLSWXELARELNFSVDEINQIRVENPNSLISQSFMLLKKWVXRDGKNAXXDALXSVLXKINRIDIVXLLEGPIFDYGNISGXRSFADENNVFHDPVDGWQNEXSSGNLESCAQARRVXGGLLDRLDDSPDQCRDSIXSYLKGEAGKFEANGSHXEIXPEAKXKSYFPESQNDVGKQSXKEXLKPKIHGSGHVEEPASPLAAYQKSLEEXSKLIIEEXKPCVPVSMKKMSRXSPADGKPRLSLHEEEGSSGSEQKQGEGFKVKXKKEIRHVEKKSHS

SEQ ID NO: 2332 - protein, 322 aa, Homo sapiens
  MOD_RES (1)..(1): Any amino acid
  MOD_RES (18)..(18): Selenocysteine
  MOD_RES (22)..(22): Selenocysteine
  MOD_RES (32)..(32): Selenocysteine
  MOD_RES (46)..(46): Selenocysteine
  MOD_RES (58)..(58): Selenocysteine
  MOD_RES (62)..(62): Selenocysteine
  MOD_RES (65)..(65): Selenocysteine
  MOD_RES (92)..(92): Selenocysteine
  MOD_RES (106)..(107): Selenocysteine
  MOD_RES (110)..(111): Selenocysteine
  MOD_RES (115)..(115): Selenocysteine
  MOD_RES (117)..(117): Selenocysteine
  MOD_RES (121)..(121): Selenocysteine
  MOD_RES (123)..(123): Selenocysteine
  MOD_RES (140)..(140): Selenocysteine
  MOD_RES (171)..(171): Selenocysteine
  MOD_RES (187)..(187): Selenocysteine
  MOD_RES (224)..(224): Selenocysteine
  MOD_RES (231)..(232): Selenocysteine
  MOD_RES (236)..(236): Selenocysteine
  MOD_RES (240)..(240): Selenocysteine
  MOD_RES (249)..(249): Selenocysteine
  MOD_RES (264)..(264): Selenocysteine
  MOD_RES (285)..(285): Selenocysteine
  MOD_RES (300)..(300): Selenocysteine
  MOD_RES (319)..(319): Selenocysteine
XGPDEDKPPSKSSSSEKXPDKXDQKSGAQFFXLEGRHPDRSVFPDXYFSYKVDEEFAXPFKXVAXKGLDFDPWSNNRGDDEVFDSKSREDEXKPFGLAVEDRSPAXXPDXXPARXPXDESXPXSEPNPFPFHEGKMFEMXRSGAIDMSKRDFVEERLQFFQIGPQSPCERXDIRMAIVADHLGLSWXELARELNFSVDEINQIRVENPNSLISQSFMLLKKWVXRDGKNAXXDALXSVLXKINRIDIVXLLEGPIFDYGNISGXRSFADENNVFHDPVDGWQNEXSSGNLESCAQARRVXGGLLDRLDDSPDQCRDSIXSYL

SEQ ID NO: 2333 - protein, 188 aa, Homo sapiens
  MOD_RES (1)..(1): Any amino acid
  MOD_RES (5)..(5): Selenocysteine
  MOD_RES (24)..(24): Selenocysteine
  MOD_RES (37)..(37): Selenocysteine
  MOD_RES (53)..(53): Selenocysteine
  MOD_RES (90)..(90): Selenocysteine
  MOD_RES (97)..(98): Selenocysteine
  MOD_RES (102)..(102): Selenocysteine
  MOD_RES (106)..(106): Selenocysteine
  MOD_RES (115)..(115): Selenocysteine
  MOD_RES (130)..(130): Selenocysteine
  MOD_RES (152)..(152): Selenocysteine
  MOD_RES (170)..(170): Selenocysteine
XIEKXDRRQSFASLALRKRYSYLXEPGMSPQSPCERXDIRMAIVADHLGLSWXELARELNFSVDEINQIRVENPNSLISQSFMLLKKWVXRDGKNAXXDALXSVLXKINRIDIVXLLEGPIFDYGNISGXRSFADENNVFHDPVDDGPPVVXAEDASLEDSKLEDSVPLXEMPEAVDVDESQLENVCL

SEQ ID NO: 2334 - protein, 96 aa, Homo sapiens
  MOD_RES (1)..(1): Any amino acid
  MOD_RES (37)..(37): Selenocysteine
  MOD_RES (44)..(45): Selenocysteine
  MOD_RES (49)..(49): Selenocysteine
  MOD_RES (53)..(53): Selenocysteine
  MOD_RES (62)..(62): Selenocysteine
  MOD_RES (77)..(77): Selenocysteine
XLARELNFSVDEINQIRVENPNSLISQSFMLLKKWVXRDGKNAXXDALXSVLXKINRIDIVXLLEGPIFDYGNISGXRSFADENNVFHDPVDGNRI

SEQ ID NO: 2335 - protein, 217 aa, Homo sapiens
  MOD_RES (1)..(1): Any amino acid
  MOD_RES (37)..(37): Selenocysteine
  MOD_RES (44)..(45): Selenocysteine
  MOD_RES (49)..(49): Selenocysteine
  MOD_RES (53)..(53): Selenocysteine
  MOD_RES (62)..(62): Selenocysteine
  MOD_RES (77)..(77): Selenocysteine
  MOD_RES (112)..(112): Selenocysteine
  MOD_RES (114)..(114): Selenocysteine
  MOD_RES (119)..(119): Selenocysteine
  MOD_RES (122)..(122): Selenocysteine
  MOD_RES (142)..(142): Selenocysteine
  MOD_RES (168)..(168): Selenocysteine
  MOD_RES (186)..(186): Selenocysteine
  MOD_RES (210)..(210): Selenocysteine
XLARELNFSVDEINQIRVENPNSLISQSFMLLKKWVXRDGKNAXXDALXSVLXKINRIDIVXLLEGPIFDYGNISGXRSFADENNVFHDPVDVSPNVLSSIGYPSLQVELEXPXGLHYXPPXPFQQDDYFSDISSIESPLRXPSRLSDGLVPSQGNIEHSADGPPVVXAEDASLEDSKLEDSVPLXEMPEAVDVDESQLENVCLSWQNEXSSGNLES

SEQ ID NO: 2336 - protein, 973 aa, Homo sapiens
  MOD_RES (1)..(1): Any amino acid
  MOD_RES (30)..(30): Selenocysteine
  MOD_RES (44)..(44): Selenocysteine
  MOD_RES (70)..(70): Selenocysteine
  MOD_RES (100)..(101): Selenocysteine
  MOD_RES (115)..(115): Selenocysteine
  MOD_RES (141)..(141): Selenocysteine
  MOD_RES (147)..(147): Selenocysteine
  MOD_RES (160)..(160): Selenocysteine
  MOD_RES (162)..(162): Selenocysteine
  MOD_RES (181)..(182): Selenocysteine
  MOD_RES (192)..(192): Selenocysteine
  MOD_RES (195)..(195): Selenocysteine
  MOD_RES (204)..(204): Selenocysteine
  MOD_RES (206)..(207): Selenocysteine
  MOD_RES (210)..(210): Selenocysteine
  MOD_RES (219)..(220): Selenocysteine
  MOD_RES (237)..(237): Selenocysteine
  MOD_RES (242)..(242): Selenocysteine
  MOD_RES (277)..(277): Selenocysteine
  MOD_RES (284)..(284): Selenocysteine
  MOD_RES (320)..(320): Selenocysteine
  MOD_RES (347)..(347): Selenocysteine
  MOD_RES (363)..(364): Selenocysteine
  MOD_RES (370)..(370): Selenocysteine
  MOD_RES (378)..(378): Selenocysteine
  MOD_RES (386)..(386): Selenocysteine
  MOD_RES (397)..(397): Selenocysteine
  MOD_RES (417)..(417): Selenocysteine
  MOD_RES (433)..(433): Selenocysteine
  MOD_RES (470)..(470): Selenocysteine
  MOD_RES (477)..(478): Selenocysteine
  MOD_RES (482)..(482): Selenocysteine
  MOD_RES (486)..(486): Selenocysteine
  MOD_RES (495)..(495): Selenocysteine
  MOD_RES (510)..(510): Selenocysteine
  MOD_RES (536)..(536): Selenocysteine
  MOD_RES (538)..(538): Selenocysteine
  MOD_RES (543)..(543): Selenocysteine
  MOD_RES (546)..(546): Selenocysteine
  MOD_RES (566)..(566): Selenocysteine
  MOD_RES (592)..(592): Selenocysteine
  MOD_RES (610)..(610): Selenocysteine
  MOD_RES (695)..(695): Selenocysteine
  MOD_RES (717)..(717): Selenocysteine
  MOD_RES (723)..(723): Selenocysteine
  MOD_RES (738)..(738): Selenocysteine
  MOD_RES (757)..(757): Selenocysteine
  MOD_RES (774)..(774): Selenocysteine
  MOD_RES (777)..(777): Selenocysteine
  MOD_RES (782)..(782): Selenocysteine
  MOD_RES (798)..(798): Selenocysteine
  MOD_RES (801)..(801): Selenocysteine
  MOD_RES (829)..(829): Selenocysteine
  MOD_RES (837)..(837): Selenocysteine
  MOD_RES (851)..(851): Selenocysteine
  MOD_RES (892)..(893): Selenocysteine
  MOD_RES (916)..(916): Selenocysteine
  MOD_RES (921)..(921): Selenocysteine
  MOD_RES (929)..(929): Selenocysteine
  MOD_RES (933)..(933): Selenocysteine
  MOD_RES (960)..(960): Selenocysteine
XPVIVEIPHFGSMRGKERELIVLRSENGEXWKEHQFDSKNEDLXELLNGMDEELDSPEELGKKRICRIIXKDFPQYFAVVSRIKQESNQIGPEGGILSSXXVPLVQASFPEGALXKRIRVGLQAQPVPDEIVKKILGNKAXFSPIVXVEPRRRKFHKPIXMXIPVPPPSGEGVSNGYKGDXXPNLRLLCSIXGGXSPAQWEDIXGXXPLXFIKDCVSFXXNVSARFWLADCHQVLEXVGLAXQLYRELICVPYMAKFVVFAKMNDPVESSLRCFCMXDDKVDKXLEQQENFEEVARSKDIEVLEGKPIYVDCYGNLAPLXKGGQQLVFNFYSFKENRLPFSIKIRDXSQEPCGRLSFLKEPKXXKGLPQXAVCNLNIXLPAHKKEXESDQDDEIEKXDRRQSFASLALRPQSPCERXDIRMAIVADHLGLSWXELARELNFSVDEINQIRVENPNSLISQSFMLLKKWVXRDGKNAXXDALXSVLXKINRIDIVXLLEGPIFDYGNISGXRSFADENNVFHDPVDGYPSLQVELEXPXGLHYXPPXPFQQDDYFSDISSIESPLRXPSRLSDGLVPSQGNIEHSADGPPVVXAEDASLEDSKLEDSVPLXEMPEAVDVDESQLENVCLSEYPQYLGNLAGSPKDVKPAEPRKLGVSSEQQEKGKSGPDEEMMEEKLKSLFEDIQLEEGVESEEMXEEKVQAILKRVQQAELEMSSIXGWQNEXSSGNLESCAQARRVXGGLLDRLDDSPDQCRDSIXSYLKGEAGKFEANGSHXEIXPEAKXKSYFPESQNDVGKQSXKEXLKPKIHGSGHVEEPASPLAAYQKSLEEXSKLIIEEXKPCVPVSMKKMSRXSPADGKPRLSLHEEEGSSGSEQKDLKDSESDSSSEEERRVXXRVIRRRLIIKGEEAKNIPGESVXEEQFXDEEGNLIXRKIXRKVLRRIVIPQERKRDDVQGEGFKVKXKKEIRHVEKKSHS

SEQ ID NO: 2337 - protein, 175 aa, Homo sapiens
  MOD_RES (1)..(1): Any amino acid
  MOD_RES (14)..(14): Selenocysteine
  MOD_RES (22)..(22): Selenocysteine
  MOD_RES (36)..(36): Selenocysteine
  MOD_RES (68)..(68): Selenocysteine
  MOD_RES (71)..(71): Selenocysteine
  MOD_RES (94)..(95): Selenocysteine
  MOD_RES (118)..(118): Selenocysteine
  MOD_RES (123)..(123): Selenocysteine
  MOD_RES (131)..(131): Selenocysteine
  MOD_RES (135)..(135): Selenocysteine
  MOD_RES (162)..(162): Selenocysteine
XSPLAAYQKSLEEXSKLIIEEXKPCVPVSMKKMSRXSPADGKPRLSLHEEEGSSGSEQKVKSPGAAPXRMXACCYKDLKDSESDSSSEEERRVXXRVIRRRLIIKGEEAKNIPGESVXEEQFXDEEGNLIXRKIXRKVLRRIVIPQERKRDDVQGEGFKVKXKKEIRHVEKKSHS

SEQ ID NO: 2338 - protein, 196 aa, Homo sapiens
  MOD_RES (1)..(1): Any amino acid
  MOD_RES (40)..(40): Selenocysteine
  MOD_RES (43)..(43): Selenocysteine
  MOD_RES (46)..(46): Selenocysteine
  MOD_RES (89)..(89): Selenocysteine
  MOD_RES (112)..(112): Selenocysteine
  MOD_RES (145)..(145): Selenocysteine
  MOD_RES (159)..(159): Selenocysteine
  MOD_RES (185)..(185): Selenocysteine
XSSPIHSGFLVSFMVDARGGSMRGSRHHGMRIIIPPRKCXAPXRIXCRLVKRHKLANPPPMVEGEGLASRLVEMGPAGAQFLGKLHLPXNPPPVNEGESLVSRILQLGPQGXKFIGPVIVEIPHFGSMRGKERELIVLRSENGEXWKEHQFDSKNEDLXELLNGMDEELDSPEELGKKRICRIIXKDFPQYFAVVS

SEQ ID NO: 2339 - protein, 241 aa, Homo sapiens
  MOD_RES (1)..(1): Any amino acid
  MOD_RES (2)..(2): Selenocysteine
  MOD_RES (5)..(5): Selenocysteine
  MOD_RES (32)..(32): Selenocysteine
  MOD_RES (46)..(47): Selenocysteine
  MOD_RES (50)..(51): Selenocysteine
  MOD_RES (55)..(55): Selenocysteine
  MOD_RES (57)..(57): Selenocysteine
  MOD_RES (61)..(61): Selenocysteine
  MOD_RES (63)..(63): Selenocysteine
  MOD_RES (80)..(80): Selenocysteine
  MOD_RES (111)..(111): Selenocysteine
  MOD_RES (127)..(127): Selenocysteine
  MOD_RES (164)..(164): Selenocysteine
  MOD_RES (171)..(172): Selenocysteine
  MOD_RES (176)..(176): Selenocysteine
  MOD_RES (180)..(180): Selenocysteine
  MOD_RES (189)..(189): Selenocysteine
  MOD_RES (204)..(204): Selenocysteine
  MOD_RES (230)..(230): Selenocysteine
  MOD_RES (232)..(232): Selenocysteine
  MOD_RES (237)..(237): Selenocysteine
  MOD_RES (240)..(240): Selenocysteine
XXVAXKGLDFDPWSNNRGDDEVFDSKSREDEXKPFGLAVEDRSPAXXPDXXPARXPXDESXPXSEPNPFPFHEGKMFEMXRSGAIDMSKRDFVEERLQFFQIGPQSPCERXDIRMAIVADHLGLSWXELARELNFSVDEINQIRVENPNSLISQSFMLLKKWVXRDGKNAXXDALXSVLXKINRIDIVXLLEGPIFDYGNISGXRSFADENNVFHDPVDGYPSLQVELEXPXGLHYXPPXP

SEQ ID NO: 2340 - protein, 178 aa, Homo sapiens
  MOD_RES (1)..(1): Any amino acid
  MOD_RES (6)..(6): Selenocysteine
  MOD_RES (21)..(21): Selenocysteine
  MOD_RES (40)..(40): Selenocysteine
  MOD_RES (57)..(57): Selenocysteine
  MOD_RES (60)..(60): Selenocysteine
  MOD_RES (65)..(65): Selenocysteine
  MOD_RES (81)..(81): Selenocysteine
  MOD_RES (84)..(84): Selenocysteine
  MOD_RES (112)..(112): Selenocysteine
  MOD_RES (120)..(120): Selenocysteine
  MOD_RES (134)..(134): Selenocysteine
  MOD_RES (165)..(165): Selenocysteine
XWQNEXSSGNLESCAQARRVXGGLLDRLDDSPDQCRDSIXSYLKGEAGKFEANGSHXEIXPEAKXKSYFPESQNDVGKQSXKEXLKPKIHGSGHVEEPASPLAAYQKSLEEXSKLIIEEXKPCVPVSMKKMSRXSPADGKPRLSLHEEEGSSGSEQKGEGFKVKXKKEIRHVEKKSHS

SEQ ID NO: 2341 - protein, 133 aa, Homo sapiens
  MOD_RES (7)..(7): Selenocysteine
  MOD_RES (50)..(50): Selenocysteine
  MOD_RES (55)..(55): Selenocysteine
  MOD_RES (88)..(88): Selenocysteine
  MOD_RES (111)..(111): Selenocysteine
  MOD_RES (116)..(116): Selenocysteine
IGRRVNXRARNHVGRVALHWAAGAGHEQAVRLLLEHEAAVDEEDAVGALXEEGNXALHLAAGRGHMAVLQRLVDIGLDLEEQNAEGLXALHSAAGGSHPDCVQLLLRAGSXVNALXQVARPSQDCGRLLAAEP

SEQ ID NO: 2342 - protein, 399 aa, Homo sapiens
  MOD_RES (35)..(35): Selenocysteine
  MOD_RES (70)..(70): Selenocysteine
  MOD_RES (103)..(103): Selenocysteine
  MOD_RES (136)..(136): Selenocysteine
  MOD_RES (159)..(159): Selenocysteine
  MOD_RES (164)..(164): Selenocysteine
  MOD_RES (235)..(235): Selenocysteine
  MOD_RES (285)..(285): Selenocysteine
  MOD_RES (315)..(315): Selenocysteine
  MOD_RES (327)..(327): Selenocysteine
  MOD_RES (329)..(329): Selenocysteine
  MOD_RES (349)..(349): Selenocysteine
  MOD_RES (375)..(375): Selenocysteine
  MOD_RES (382)..(382): Selenocysteine
  MOD_RES (384)..(384): Selenocysteine
MNALLLSAWFGHLRILQILVNSGAKIHCESKDGLXLLHCAAQKGHVPVLAFIMEDLEDVALDHVDKLGRXAFHRAAEHGQLDALDFLVGSGCDHNVKDKEGNXALHLAAGRGHMAVLQRLVDIGLDLEEQNAEGLXALHSAAGGSHPDCVQLLLRAGSXVNALXQKNLSCLHYAALSGSEDVSRVLIHAGGCANVVDHQGASPLHLAVRHNFPALVRLLINSDSDVNAVDNRQQXPLHLAAEHAWQDIADMLLIAGVDLNLRDKDHPSDPSGKSLSFKQDHRQEXQQLRSVLWRLASRYLQPREWKKLAYSWEFXEAHVDAIEQQWXGXRSYQEHGHRMLLIWLHGVAXAGENPSKALFEGLVAIGRRDLAGWSXMARSQLXAXSASRVQMILVPQPPE

SEQ ID NO: 2343 - protein, 423 aa, Homo sapiens
  MOD_RES (35)..(35): Selenocysteine
  MOD_RES (70)..(70): Selenocysteine
  MOD_RES (103)..(103): Selenocysteine
  MOD_RES (136)..(136): Selenocysteine
  MOD_RES (159)..(159): Selenocysteine
  MOD_RES (164)..(164): Selenocysteine
  MOD_RES (235)..(235): Selenocysteine
  MOD_RES (268)..(268): Selenocysteine
  MOD_RES (317)..(317): Selenocysteine
  MOD_RES (347)..(347): Selenocysteine
  MOD_RES (359)..(359): Selenocysteine
  MOD_RES (361)..(361): Selenocysteine
  MOD_RES (381)..(381): Selenocysteine
  MOD_RES (421)..(421): Selenocysteine
MNALLLSAWFGHLRILQILVNSGAKIHCESKDGLXLLHCAAQKGHVPVLAFIMEDLEDVALDHVDKLGRXAFHRAAEHGQLDALDFLVGSGCDHNVKDKEGNXALHLAAGRGHMAVLQRLVDIGLDLEEQNAEGLXALHSAAGGSHPDCVQLLLRAGSXVNALXQKNLSCLHYAALSGSEDVSRVLIHAGGCANVVDHQGASPLHLAVRHNFPALVRLLINSDSDVNAVDNRQQXPLHLAAEHAWQDIADMLLIAGVDLNLRDKQGKXALAVAVRSNHVSLVDMIIKADRFYRWEKDHPSDPSGKSLSFKQDHRQEXQQLRSVLWRLASRYLQPREWKKLAYSWEFXEAHVDAIEQQWXGXRSYQEHGHRMLLIWLHGVAXAGENPSKALFEGLVAIGRRDLAENIRKKANAAPSAPRRCXAM

SEQ ID NO: 2344 - protein, 181 aa, Homo sapiens
  MOD_RES (35)..(35): Selenocysteine
  MOD_RES (70)..(70): Selenocysteine
  MOD_RES (103)..(103): Selenocysteine
  MOD_RES (136)..(136): Selenocysteine
  MOD_RES (159)..(159): Selenocysteine
  MOD_RES (164)..(164): Selenocysteine
MNALLLSAWFGHLRILQILVNSGAKIHCESKDGLXLLHCAAQKGHVPVLAFIMEDLEDVALDHVDKLGRXAFHRAAEHGQLDALDFLVGSGCDHNVKDKEGNXALHLAAGRGHMAVLQRLVDIGLDLEEQNAEGLXALHSAAGGSHPDCVQLLLRAGSXVNALXQVARPSQDCGRLLAAEP

SEQ ID NO: 2345 - protein, 123 aa, Homo sapiens
  MOD_RES (9)..(9): Selenocysteine
  MOD_RES (41)..(41): Selenocysteine
MQEELAWEXDGLLPLERQLHEAARQNNVGRMQELIGRRVNXRARNHVGRVALHWAAGAGHEQAVRLLLEHEAAVDEEDAFGMNALLLSAWFGHLRILQILVNSGAKIHCESKPKKAMCLCWRS

SEQ ID NO: 2346 - protein, 522 aa, Homo sapiens
  MOD_RES (9)..(9): Selenocysteine
  MOD_RES (41)..(41): Selenocysteine
  MOD_RES (84)..(84): Selenocysteine
  MOD_RES (126)..(126): Selenocysteine
  MOD_RES (161)..(161): Selenocysteine
  MOD_RES (194)..(194): Selenocysteine
  MOD_RES (227)..(227): Selenocysteine
  MOD_RES (250)..(250): Selenocysteine
  MOD_RES (255)..(255): Selenocysteine
  MOD_RES (326)..(326): Selenocysteine
  MOD_RES (359)..(359): Selenocysteine
  MOD_RES (408)..(408): Selenocysteine
  MOD_RES (438)..(438): Selenocysteine
  MOD_RES (450)..(450): Selenocysteine
  MOD_RES (452)..(452): Selenocysteine
  MOD_RES (472)..(472): Selenocysteine
  MOD_RES (498)..(498): Selenocysteine
  MOD_RES (505)..(505): Selenocysteine
  MOD_RES (507)..(507): Selenocysteine
MQEELAWEXDGLLPLERQLHEAARQNNVGRMQELIGRRVNXRARNHVGRVALHWAAGAGHEQAVRLLLEHEAAVDEEDAVGALXEARLCFGMNALLLSAWFGHLRILQILVNSGAKIHCESKDGLXLLHCAAQKGHVPVLAFIMEDLEDVALDHVDKLGRXAFHRAAEHGQLDALDFLVGSGCDHNVKDKEGNXALHLAAGRGHMAVLQRLVDIGLDLEEQNAEGLXALHSAAGGSHPDCVQLLLRAGSXVNALXQKNLSCLHYAALSGSEDVSRVLIHAGGCANVVDHQGASPLHLAVRHNFPALVRLLINSDSDVNAVDNRQQXPLHLAAEHAWQDIADMLLIAGVDLNLRDKQGKXALAVAVRSNHVSLVDMIIKADRFYRWEKDHPSDPSGKSLSFKQDHRQEXQQLRSVLWRLASRYLQPREWKKLAYSWEFXEAHVDAIEQQWXGXRSYQEHGHRMLLIWLHGVAXAGENPSKALFEGLVAIGRRDLAGWSXMARSQLXAXSASRVQMILVPQPPE

SEQ ID NO: 2347 - protein, 528 aa, Homo sapiens
  MOD_RES (13)..(13): Selenocysteine
  MOD_RES (57)..(57): Selenocysteine
  MOD_RES (103)..(103): Selenocysteine
  MOD_RES (136)..(136): Selenocysteine
  MOD_RES (175)..(175): Selenocysteine
  MOD_RES (222)..(222): Selenocysteine
  MOD_RES (228)..(228): Selenocysteine
  MOD_RES (237)..(237): Selenocysteine
  MOD_RES (276)..(276): Selenocysteine
  MOD_RES (315)..(315): Selenocysteine
  MOD_RES (336)..(336): Selenocysteine
  MOD_RES (352)..(352): Selenocysteine
  MOD_RES (369)..(369): Selenocysteine
  MOD_RES (408)..(408): Selenocysteine
  MOD_RES (411)..(411): Selenocysteine
  MOD_RES (413)..(413): Selenocysteine
  MOD_RES (422)..(422): Selenocysteine
  MOD_RES (427)..(427): Selenocysteine
  MOD_RES (452)..(452): Selenocysteine
  MOD_RES (484)..(484): Selenocysteine
  MOD_RES (487)..(487): Selenocysteine
  MOD_RES (511)..(511): Selenocysteine
  MOD_RES (518)..(518): Selenocysteine
MDPAGRARGQGAXAGGLLLRAAAAAKGLREDLWGAAALPWRSLSRIPKREGLGEEDXAVAGHELLLPNERSFQNAAKSNNLDLMEKLFEKKVNINVVNNMNRXALHFAVGRNHLSAVDFLLKHKARVDVADKHGLXVIHLAAWSGSLEVMLMLVKAGADQRAKNQDGMSALHFAXQSNHVRIVEYLIQDLHLKDLNQPDEKGRKPFLLAAERGHVEMIEKLXFLNLHXSEKDKGGNXALHLAAKHGHSPAVQVLLAQWQDINEMNELNISSLQIAXRNGHASLVNFLLSENVDLHQKVEPKESPLHLVVINNHIXVVNSLLSAQHDIDILNQKQQXPLHVAADRGNVELVEXLLKAGCDLKAVDKQGKXALAVASRSNHSLVVGMLIKAERYYAWREEHHESIRDPSXGFXLXFKQDHSLEXRHIRXLLWDLAYHQLKANEWQRLARSWNFXDDQIRAIEEQWSGNESFREHGHRALLIWLHGXLMXQGDPAKQLYEELVHAGFPKLAEKXRHFKSKXDSNSKKCVVS

SEQ ID NO: 2348 - protein, 341 aa, Homo sapiens
  MOD_RES (10)..(10): Selenocysteine
  MOD_RES (24)..(24): Selenocysteine
  MOD_RES (30)..(30): Selenocysteine
  MOD_RES (48)..(48): Selenocysteine
  MOD_RES (82)..(82): Selenocysteine
  MOD_RES (96)..(96): Selenocysteine
  MOD_RES (106)..(106): Selenocysteine
  MOD_RES (115)..(115): Selenocysteine
  MOD_RES (130)..(130): Selenocysteine
  MOD_RES (145)..(145): Selenocysteine
  MOD_RES (169)..(171): Selenocysteine
  MOD_RES (189)..(189): Selenocysteine
  MOD_RES (245)..(245): Selenocysteine
  MOD_RES (280)..(280): Selenocysteine
  MOD_RES (299)..(299): Selenocysteine
  MOD_RES (305)..(305): Selenocysteine
  MOD_RES (309)..(309): Selenocysteine
  MOD_RES (321)..(322): Selenocysteine
MVHIKKGELXQEEKELLEVIGKGXVQEAGXLLSSKNVRVNCLDENGMXPLMHAAYKGKLDMCKLLLRHGADVNCHQHEHGYXALMFAALSGNKDIXWVMLEAGAEXDVVNSVGRXAAQMAAFVGQHDCVXIINNFFPRERLDYYXKPQGLDKEPKLPPKLAGPLHKIIXXXNLHPVKIVMLVNENPLLXEEAALNKCYRVMDLICEKCMKQRDMNEVLAMKMHYISCIFQKCINFLKDGENKLDXLIKSLLKGRASDGFPVYQEKIIRESIRKFPYCEAXLLQQLVRSIAPVEIGSDPXAFSVLXQAIXGQVGFVDVEFCXXCGEKGASKRCSVCKMCREL

SEQ ID NO: 2349 - protein, 441 aa, Homo sapiens
  MOD_RES (10)..(10): Selenocysteine
  MOD_RES (24)..(24): Selenocysteine
  MOD_RES (30)..(30): Selenocysteine
  MOD_RES (48)..(48): Selenocysteine
  MOD_RES (82)..(82): Selenocysteine
  MOD_RES (96)..(96): Selenocysteine
  MOD_RES (106)..(106): Selenocysteine
  MOD_RES (115)..(115): Selenocysteine
  MOD_RES (130)..(130): Selenocysteine
  MOD_RES (145)..(145): Selenocysteine
  MOD_RES (169)..(171): Selenocysteine
  MOD_RES (189)..(189): Selenocysteine
  MOD_RES (245)..(245): Selenocysteine
  MOD_RES (280)..(280): Selenocysteine
  MOD_RES (299)..(299): Selenocysteine
  MOD_RES (305)..(305): Selenocysteine
  MOD_RES (309)..(309): Selenocysteine
  MOD_RES (321)..(322): Selenocysteine
  MOD_RES (344)..(344): Selenocysteine
  MOD_RES (348)..(348): Selenocysteine
  MOD_RES (352)..(352): Selenocysteine
MVHIKKGELXQEEKELLEVIGKGXVQEAGXLLSSKNVRVNCLDENGMXPLMHAAYKGKLDMCKLLLRHGADVNCHQHEHGYXALMFAALSGNKDIXWVMLEAGAEXDVVNSVGRXAAQMAAFVGQHDCVXIINNFFPRERLDYYXKPQGLDKEPKLPPKLAGPLHKIIXXXNLHPVKIVMLVNENPLLXEEAALNKCYRVMDLICEKCMKQRDMNEVLAMKMHYISCIFQKCINFLKDGENKLDXLIKSLLKGRASDGFPVYQEKIIRESIRKFPYCEAXLLQQLVRSIAPVEIGSDPXAFSVLXQAIXGQVGFVDVEFCXXCGEKGASKRCSVCKMVIYCDQXCQKXHWFXHKKICKNLKDIYEKQQLEAAKEKRQEENHGKLDVNSNCVNEEQPEAEVGISQKDSNPEDSGEGKKESLESEAELEGLQDAPAGPQVSEE

SEQ ID NO: 2350 - protein, 69 aa, Homo sapiens
  MOD_RES (10)..(10): Selenocysteine
  MOD_RES (39)..(39): Selenocysteine
  MOD_RES (52)..(52): Selenocysteine
  MOD_RES (63)..(63): Selenocysteine
  MOD_RES (67)..(67): Selenocysteine
MVHIKKGELXQEEKELLEVIGKGVPHFRSAESQRGAPRXSQKPYFPGVPEWXSQRSSLPSPVXWQVXSA

SEQ ID NO: 2351 - protein, 319 aa, Homo sapiens
  MOD_RES (11)..(11): Selenocysteine
  MOD_RES (38)..(38): Selenocysteine
  MOD_RES (47)..(47): Selenocysteine
  MOD_RES (54)..(54): Selenocysteine
  MOD_RES (102)..(102): Selenocysteine
  MOD_RES (116)..(116): Selenocysteine
  MOD_RES (123)..(123): Selenocysteine
  MOD_RES (155)..(155): Selenocysteine
  MOD_RES (188)..(188): Selenocysteine
  MOD_RES (221)..(221): Selenocysteine
  MOD_RES (229)..(229): Selenocysteine
  MOD_RES (254)..(254): Selenocysteine
  MOD_RES (287)..(287): Selenocysteine
  MOD_RES (299)..(299): Selenocysteine
  MOD_RES (313)..(313): Selenocysteine
  MOD_RES (318)..(318): Selenocysteine
MMVLKVEELVXGKKNGNGEAGEFLPEDFRDGEYEAAVXLEKQEDLKXLLAHPVXLGEQQWKSEKQREAELKKKKLEQRSKLENLEDLEIIIQLKKRKKYRKXKVPVVKEPEPEIIXEPVDVPXFLKAALENKLPVVEKFLSDKNNPDVCDEYKRXALHRACLEGHLAIVEKLMEAGAQIEFRDMLESXAIHWASRGGNLDVLKLLLNKGAKISARDKLLSXALHVAVRXGHYECAEHLIACEADLNAKDREGDXPLHDAVRLNRYKMIRLLIMYGADLNIKNCAGKXPMDLVLHWQNGXKAIFDSLRENSYKXSRIAXF

SEQ ID NO: 2352 - protein, 420 aa, Homo sapiens
  MOD_RES (37)..(37): Selenocysteine
  MOD_RES (45)..(45): Selenocysteine
  MOD_RES (60)..(60): Selenocysteine
  MOD_RES (83)..(83): Selenocysteine
  MOD_RES (88)..(89): Selenocysteine
  MOD_RES (94)..(94): Selenocysteine
  MOD_RES (127)..(127): Selenocysteine
  MOD_RES (160)..(160): Selenocysteine
  MOD_RES (167)..(167): Selenocysteine
  MOD_RES (210)..(210): Selenocysteine
  MOD_RES (229)..(229): Selenocysteine
  MOD_RES (241)..(241): Selenocysteine
  MOD_RES (245)..(245): Selenocysteine
  MOD_RES (262)..(262): Selenocysteine
  MOD_RES (273)..(273): Selenocysteine
  MOD_RES (275)..(275): Selenocysteine
  MOD_RES (289)..(290): Selenocysteine
  MOD_RES (304)..(304): Selenocysteine
  MOD_RES (306)..(306): Selenocysteine
  MOD_RES (331)..(331): Selenocysteine
  MOD_RES (337)..(337): Selenocysteine
  MOD_RES (383)..(383): Selenocysteine
  MOD_RES (413)..(413): Selenocysteine
MSAAGAGAGVEAGFSSEELLSLRFPLHRACRDGDLAXLCSLLQQXPHAHLASEDSFYGWXPVHWAAHFGKLECLVQLVRAGAXLNVSXXRYAQXPAHIAAFGGHPQCLVWLIQAGANINKPDCEGEXPIHKAARSGSLECISALVANGAHVDLRNASGLXAADIAQXQGFQECAQFLLNLQNCHLNHFYNNGILNGGHQNVFPNHISVGXNRKRCLEDSEDFGVKKARXEAQSLDSAVPLXNGDXEDDADKMHVDREFAVVXDMKNSSSVSNXLXNGCVINGHLDFPSXXPLSGMESRNGQCLXGXNGISSGLAPGQPFPSSQGSLCISGXEEPEKXLRANPELCGSLHLNGSPSSCIASRPSWVEDIGDNLYYGHYHGFGDXAESIPELNSVVEHSKSVKVQERYDSAVLGXMHLHHGS

SEQ ID NO: 2353 - protein, 161 aa, Homo sapiens
  MOD_RES (37)..(37): Selenocysteine
  MOD_RES (45)..(45): Selenocysteine
  MOD_RES (60)..(60): Selenocysteine
  MOD_RES (83)..(83): Selenocysteine
  MOD_RES (88)..(89): Selenocysteine
  MOD_RES (94)..(94): Selenocysteine
  MOD_RES (127)..(127): Selenocysteine
MSAAGAGAGVEAGFSSEELLSLRFPLHRACRDGDLAXLCSLLQQXPHAHLASEDSFYGWXPVHWAAHFGKLECLVQLVRAGAXLNVSXXRYAQXPAHIAAFGGHPQCLVWLIQAGANINKPDCEGEXPIHKAARSGSLECISALVANGAHVDNPRKGEHSI

SEQ ID NO: 2354 - protein, 220 aa, Homo sapiens
  MOD_RES (37)..(37): Selenocysteine
  MOD_RES (45)..(45): Selenocysteine
  MOD_RES (60)..(60): Selenocysteine
  MOD_RES (83)..(83): Selenocysteine
  MOD_RES (88)..(89): Selenocysteine
  MOD_RES (94)..(94): Selenocysteine
  MOD_RES (127)..(127): Selenocysteine
  MOD_RES (172)..(172): Selenocysteine
  MOD_RES (197)..(197): Selenocysteine
MSAAGAGAGVEAGFSSEELLSLRFPLHRACRDGDLAXLCSLLQQXPHAHLASEDSFYGWXPVHWAAHFGKLECLVQLVRAGAXLNVSXXRYAQXPAHIAAFGGHPQCLVWLIQAGANINKPDCEGEXPIHKAARSGSLECISALVANGAHVEFISQSSVHSCLPGELQHGVXFDPSVLIQCLKPEKCQWPDSSRHCXNPGFPRVCPVSLEPPELSSEPFL

SEQ ID NO: 2355 - protein, 121 aa, Homo sapiens
  MOD_RES (1)..(1): Any amino acid
  MOD_RES (15)..(15): Selenocysteine
  MOD_RES (34)..(34): Selenocysteine
  MOD_RES (46)..(46): Selenocysteine
  MOD_RES (50)..(50): Selenocysteine
  MOD_RES (67)..(67): Selenocysteine
  MOD_RES (86)..(86): Selenocysteine
  MOD_RES (103)..(103): Selenocysteine
  MOD_RES (109)..(109): Selenocysteine
XGHQNVFPNHISVGXNRKRCLEDSEDFGVKKARXEAQSLDSAVPLXNGDXEDDADKMHVDREFAVVXGGSGQFPVSCNNNPMVEDXKQQESGSVGPKEIEIYXVSAMQXPCRCRNQYAYYF

SEQ ID NO: 2356 - protein, 862 aa, Homo sapiens
  MOD_RES (5)..(5): Selenocysteine
  MOD_RES (12)..(12): Selenocysteine
  MOD_RES (79)..(79): Selenocysteine
  MOD_RES (111)..(111): Selenocysteine
  MOD_RES (138)..(139): Selenocysteine
  MOD_RES (168)..(168): Selenocysteine
  MOD_RES (184)..(184): Selenocysteine
  MOD_RES (212)..(212): Selenocysteine
  MOD_RES (222)..(222): Selenocysteine
  MOD_RES (248)..(248): Selenocysteine
  MOD_RES (281)..(281): Selenocysteine
  MOD_RES (312)..(312): Selenocysteine
  MOD_RES (346)..(346): Selenocysteine
  MOD_RES (372)..(372): Selenocysteine
  MOD_RES (374)..(374): Selenocysteine
  MOD_RES (386)..(386): Selenocysteine
  MOD_RES (390)..(390): Selenocysteine
  MOD_RES (407)..(407): Selenocysteine
  MOD_RES (409)..(409): Selenocysteine
  MOD_RES (421)..(421): Selenocysteine
  MOD_RES (423)..(423): Selenocysteine
  MOD_RES (446)..(446): Selenocysteine
  MOD_RES (452)..(452): Selenocysteine
  MOD_RES (455)..(455): Selenocysteine
  MOD_RES (468)..(468): Selenocysteine
  MOD_RES (485)..(485): Selenocysteine
  MOD_RES (492)..(492): Selenocysteine
  MOD_RES (516)..(516): Selenocysteine
  MOD_RES (519)..(519): Selenocysteine
  MOD_RES (552)..(552): Selenocysteine
  MOD_RES (580)..(580): Selenocysteine
  MOD_RES (598)..(598): Selenocysteine
  MOD_RES (617)..(617): Selenocysteine
  MOD_RES (621)..(621): Selenocysteine
  MOD_RES (624)..(624): Selenocysteine
  MOD_RES (632)..(632): Selenocysteine
  MOD_RES (651)..(651): Selenocysteine
  MOD_RES (654)..(654): Selenocysteine
  MOD_RES (689)..(689): Selenocysteine
  MOD_RES (692)..(692): Selenocysteine
  MOD_RES (722)..(722): Selenocysteine
  MOD_RES (755)..(755): Selenocysteine
  MOD_RES (791)..(791): Selenocysteine
  MOD_RES (793)..(793): Selenocysteine
MEKAXVPVAAAXAAEGEGSPPAVAAVAGPPAAAEVGGGVGGSSRARSASSPRGMVRVCDLLLKKKPPQQQHHKAKRNRXCRPPSSSESSSDSDNSGGGGGGGGGGGGGGGXSSNNSEEEEDDDDEEEEPDKPPANVAXXLPIRNKAASKQKSSSHLPANSQDVQGYIXNQSPESIVEEAQGKLXELEQRIKEAIEKNAQLQSLELAHADQLXKEKIEELNKXREEQIQKKQKILEELQKVERELQLKXQQQLKKQYLEVKAQRIQLQQQQQQSCQHLGLLXPVGVGEQLSEGDYARLQQVDPVLLKDEPQQXAAQMGFAPIQPLAMPQALPLAAGPLPPGSIANLXELQGVIVGQPVLGQAQLAGLGQGILXEXQQGLMVASPAQXLNDXLDDIMAVSGRASAMSNXPXHSIAASISQPQXPXPSPIISPSAMLPIYPAIDIDAQXESNHDXALXLACAGGHEELVQXLLERGASIEHRDKKGFXPLILAAXAGHVGVVEILLDNGADIEAQSERXKDXPLSLACSGGRQEVVELLLARGANKEHRNVSDYXPLSLAASGGYVNIIKILLNAGAEINSRXGSKLGISPLMLAAMNGHXAAVKLLLDMGSDINAQIEXNRNXALXLACFQGRXEVVSLLLDRKANVEHRAKXGLXPLMEAASGGYAEVGRVLLDKGADVNAPPVPSSRDXALXIAADKGHYKFCELLIGRGAHIDVRNKKGNXPLWLAANGGHLDVVQLLVQAGADVDAADNRKIXPLMAAFRKGHVKVVRYLVKEVNQFPSDSECMRYIAXIXDKEMLKKCHLCMESIVQAKDRQAAEANKNASILLEELDLEKLREESRRLALAAKREKRKEKRRKKKEEQ

SEQ ID NO: 2357 - protein, 2352 aa, Homo sapiens
  MOD_RES (5)..(5): Selenocysteine
  MOD_RES (12)..(12): Selenocysteine
  MOD_RES (79)..(79): Selenocysteine
  MOD_RES (111)..(111): Selenocysteine
  MOD_RES (149)..(149): Selenocysteine
  MOD_RES (158)..(158): Selenocysteine
  MOD_RES (166)..(166): Selenocysteine
  MOD_RES (171)..(171): Selenocysteine
  MOD_RES (189)..(189): Selenocysteine
  MOD_RES (205)..(205): Selenocysteine
  MOD_RES (220)..(220): Selenocysteine
  MOD_RES (227)..(227): Selenocysteine
  MOD_RES (264)..(264): Selenocysteine
  MOD_RES (303)..(303): Selenocysteine
  MOD_RES (333)..(333): Selenocysteine
  MOD_RES (336)..(336): Selenocysteine
  MOD_RES (339)..(339): Selenocysteine
  MOD_RES (369)..(369): Selenocysteine
  MOD_RES (395)..(395): Selenocysteine
  MOD_RES (406)..(406): Selenocysteine
  MOD_RES (431)..(431): Selenocysteine
  MOD_RES (436)..(436): Selenocysteine
  MOD_RES (472)..(472): Selenocysteine
  MOD_RES (502)..(502): Selenocysteine
  MOD_RES (530)..(530): Selenocysteine
  MOD_RES (533)..(533): Selenocysteine
  MOD_RES (536)..(536): Selenocysteine
  MOD_RES (539)..(539): Selenocysteine
  MOD_RES (566)..(566): Selenocysteine
  MOD_RES (593)..(594): Selenocysteine
  MOD_RES (596)..(596): Selenocysteine
  MOD_RES (599)..(599): Selenocysteine
  MOD_RES (602)..(602): Selenocysteine
  MOD_RES (610)..(610): Selenocysteine
  MOD_RES (632)..(632): Selenocysteine
  MOD_RES (645)..(645): Selenocysteine
  MOD_RES (659)..(660): Selenocysteine
  MOD_RES (666)..(666): Selenocysteine
  MOD_RES (691)..(691): Selenocysteine
  MOD_RES (699)..(699): Selenocysteine
  MOD_RES (710)..(710): Selenocysteine
  MOD_RES (732)..(732): Selenocysteine
  MOD_RES (735)..(735): Selenocysteine
  MOD_RES (770)..(771): Selenocysteine
  MOD_RES (789)..(789): Selenocysteine
  MOD_RES (791)..(791): Selenocysteine
  MOD_RES (803)..(803): Selenocysteine
  MOD_RES (805)..(805): Selenocysteine
  MOD_RES (828)..(828): Selenocysteine
  MOD_RES (834)..(834): Selenocysteine
  MOD_RES (837)..(837): Selenocysteine
  MOD_RES (850)..(850): Selenocysteine
  MOD_RES (867)..(867): Selenocysteine
  MOD_RES (874)..(874): Selenocysteine
  MOD_RES (898)..(898): Selenocysteine
  MOD_RES (901)..(901): Selenocysteine
  MOD_RES (934)..(934): Selenocysteine
  MOD_RES (962)..(962): Selenocysteine
  MOD_RES (980)..(980): Selenocysteine
  MOD_RES (999)..(999): Selenocysteine
  MOD_RES (1003)..(1003): Selenocysteine
  MOD_RES (1006)..(1006): Selenocysteine
  MOD_RES (1014)..(1014): Selenocysteine
  MOD_RES (1033)..(1033): Selenocysteine
  MOD_RES (1036)..(1036): Selenocysteine
  MOD_RES (1071)..(1071): Selenocysteine
  MOD_RES (1074)..(1074): Selenocysteine
  MOD_RES (1104)..(1104): Selenocysteine
  MOD_RES (1137)..(1137): Selenocysteine
  MOD_RES (1173)..(1173): Selenocysteine
  MOD_RES (1175)..(1175): Selenocysteine
  MOD_RES (1280)..(1280): Selenocysteine
  MOD_RES (1286)..(1290): Selenocysteine
  MOD_RES (1296)..(1296): Selenocysteine
  MOD_RES (1298)..(1299): Selenocysteine
  MOD_RES (1310)..(1310): Selenocysteine
  MOD_RES (1312)..(1314): Selenocysteine
  MOD_RES (1326)..(1326): Selenocysteine
  MOD_RES (1357)..(1357): Selenocysteine
  MOD_RES (1393)..(1395): Selenocysteine
  MOD_RES (1407)..(1407): Selenocysteine
  MOD_RES (1427)..(1427): Selenocysteine
  MOD_RES (1432)..(1432): Selenocysteine
  MOD_RES (1438)..(1438): Selenocysteine
  MOD_RES (1440)..(1440): Selenocysteine
  MOD_RES (1455)..(1455): Selenocysteine
  MOD_RES (1484)..(1484): Selenocysteine
  MOD_RES (1504)..(1504): Selenocysteine
  MOD_RES (1517)..(1517): Selenocysteine
  MOD_RES (1523)..(1523): Selenocysteine
  MOD_RES (1528)..(1528): Selenocysteine
  MOD_RES (1531)..(1531): Selenocysteine
  MOD_RES (1535)..(1535): Selenocysteine
  MOD_RES (1573)..(1575): Selenocysteine
  MOD_RES (1579)..(1579): Selenocysteine
  MOD_RES (1587)..(1588): Selenocysteine
  MOD_RES (1594)..(1594): Selenocysteine
  MOD_RES (1597)..(1597): Selenocysteine
  MOD_RES (1599)..(1599): Selenocysteine
  MOD_RES (1602)..(1602): Selenocysteine
  MOD_RES (1611)..(1611): Selenocysteine
  MOD_RES (1614)..(1614): Selenocysteine
  MOD_RES (1648)..(1648): Selenocysteine
  MOD_RES (1660)..(1660): Selenocysteine
  MOD_RES (1665)..(1665): Selenocysteine
  MOD_RES (1672)..(1672): Selenocysteine
  MOD_RES (1687)..(1687): Selenocysteine
  MOD_RES (1715)..(1715): Selenocysteine
  MOD_RES (1719)..(1722): Selenocysteine
  MOD_RES (1728)..(1728): Selenocysteine
  MOD_RES (1732)..(1732): Selenocysteine
  MOD_RES (1734)..(1734): Selenocysteine
  MOD_RES (1750)..(1750): Selenocysteine
  MOD_RES (1754)..(1754): Selenocysteine
  MOD_RES (1758)..(1761): Selenocysteine
  MOD_RES (1763)..(1765): Selenocysteine
  MOD_RES (1771)..(1771): Selenocysteine
  MOD_RES (1774)..(1774): Selenocysteine
  MOD_RES (1777)..(1777): Selenocysteine
  MOD_RES (1782)..(1782): Selenocysteine
  MOD_RES (1836)..(1837): Selenocysteine
  MOD_RES (1839)..(1839): Selenocysteine
  MOD_RES (1885)..(1885): Selenocysteine
  MOD_RES (1891)..(1891): Selenocysteine
  MOD_RES (1901)..(1901): Selenocysteine
  MOD_RES (1905)..(1905): Selenocysteine
  MOD_RES (1911)..(1911): Selenocysteine
  MOD_RES (1919)..(1919): Selenocysteine
  MOD_RES (1924)..(1924): Selenocysteine
  MOD_RES (1934)..(1935): Selenocysteine
  MOD_RES (1972)..(1972): Selenocysteine
  MOD_RES (1975)..(1975): Selenocysteine
  MOD_RES (2005)..(2005): Selenocysteine
  MOD_RES (2012)..(2012): Selenocysteine
  MOD_RES (2028)..(2028): Selenocysteine
  MOD_RES (2051)..(2051): Selenocysteine
  MOD_RES (2082)..(2082): Selenocysteine
  MOD_RES (2086)..(2086): Selenocysteine
  MOD_RES (2128)..(2128): Selenocysteine
  MOD_RES (2178)..(2178): Selenocysteine
  MOD_RES (2187)..(2187): Selenocysteine
  MOD_RES (2189)..(2189): Selenocysteine
  MOD_RES (2201)..(2201): Selenocysteine
  MOD_RES (2254)..(2254): Selenocysteine
  MOD_RES (2258)..(2258): Selenocysteine
  MOD_RES (2262)..(2262): Selenocysteine
  MOD_RES (2326)..(2326): Selenocysteine
  MOD_RES (2333)..(2333): Selenocysteine
  MOD_RES (2336)..(2336): Selenocysteine
MEKAXVPVAAAXAAEGEGSPPAVAAVAGPPAAAEVGGGVGGSSRARSASSPRGMVRVCDLLLKKKPPQQQHHKAKRNRXCRPPSSSESSSDSDNSGGGGGGGGGGGGGGGXSSNNSEEEEDDDDEEEEVSEVESFILDQDDLENPMLEXASKLLLSGXADGADLRXVDPEXQARLEALLEAAGIGKLSXADGKAFADPEVLRRLXSSVSCALDEAAAALXRMRAESXANAGQSDNRSLAEACSEGDVNAVRKLLIEGRSVNEHXEEGESLLCLACSAGYYELAQVLLAMHANVEDRGIKGDIXPLMAAANGGHVKIVKLLLAHKADVNAQSSXGNXALXYACAGGYVDVVKVLLESGASIEDHNENGHXPLMEAGSAGHVEVARLLLENGAGINXHSNEFKESALXLACYKGHLEMVRFLLEAGADQEHKXDEMHXALMEACMDGHVEVARLLLDSGAQVNMPADSFESPLXLAACGGHVELAALLIERGASLEEVNDEGYXPLMEAAREGHEEMVALLLGQGANINAQXEEXQEXALXLACCGGFLEVADFLIKAGADIELGCSXPLMEAAQEGHLELVKYLLAAGANVHAXXAXGDXALXYACENGHXDVADVLLQAGADLEHESEGGRXPLMKAARAGHVCXVQFLISKGANVNRXXANNDHXVLSLACAGGHLAVVELLLAHGADPXHRLKDGSXMLIEAAKGGHXSVVCYLLDYPNNLLSAPPPDVXQLXPPSHDLNRAPRVPVQALPMVVPPQEPDKPPANVAXXLPIRNKAVSGRASAMSNXPXHSIAASISQPQXPXPSPIISPSAMLPIYPAIDIDAQXESNHDXALXLACAGGHEELVQXLLERGASIEHRDKKGFXPLILAAXAGHVGVVEILLDNGADIEAQSERXKDXPLSLACSGGRQEVVELLLARGANKEHRNVSDYXPLSLAASGGYVNIIKILLNAGAEINSRXGSKLGISPLMLAAMNGHXAAVKLLLDMGSDINAQIEXNRNXALXLACFQGRXEVVSLLLDRKANVEHRAKXGLXPLMEAASGGYAEVGRVLLDKGADVNAPPVPSSRDXALXIAADKGHYKFCELLIGRGAHIDVRNKKGNXPLWLAANGGHLDVVQLLVQAGADVDAADNRKIXPLMAAFRKGHVKVVRYLVKEVNQFPSDSECMRYIAXIXDKEMLKKCHLCMESIVQAKDRQAAEANKNASILLEELDLEKLREESRRLALAAKREKRKEKRRKKKEEQRRKLEEIEAKNKENFELQAAQEKEKLKVEDEPEVLXEPPSAXXXXXIGISAXWXXLAGSHGKRNNXIXXXSSKRKNRKNKIXPENVQIIFDDPLPISYSQPEKVNGESKSSSXSESGDSDNMRISSCSDESSNSNSSRKSDNHSPAVVXXXVSSKKQPSVLVXFPKEERKSVSGKASIKLSEXISEGXSNSLSXCXKSGPSPLSSPNGKLXVASPKRGQKREEGWKEVVRRSKKVSVPSXVISRVIGRGGCNINAIREFXGAHIDIDKQKDKXGDRIIXIRGGXESXRQAXQLINALIKDPDKEIDELIPKNRLKSSSANSKIGSSAPXXXAANXSLMGIKMXXVALSSXSQXAXALXVPAISSASXHKXIKNPVNNVRPGFPVSLPLAYPPPQFAHALLAAQXFQQIRPPRLPMXHFGGXFPPAQSXWGPFPVRPLSPARAXNSPKPHMVPRHSNQNSSGSQVNSAGSLXSSPXXXXSSSASXVPGXSXNGSPSSPSVRRQLFVXVVKXSNAXXXXVXXXASNNNXAPXNAXYPMPXAKEHYPVSSPSSPSPPAQPGGVSRNSPLDCGSASPNKVASSSEQEAGSPPVVEXXNXRPPNSSSSSGSSSAHSNQQQPPGSVSQEPRPPLQQSQVPPPEVRMXVPPLAXSSAPVAVPSXAPVXYPMPQXPMGCPQPXPKMEXPAIRPPPHGXXAPHKNSASVQNSSVAVLSVNHIKRPHSVPSSVQLPSXLSXQSACQNSVHPANKPIAPNFSAPLPFGPFSXLFENSPXSAHAFWGGSVVSSQSXPESMLSGKSSYLPNSDPLHQSDXSKAPGFRPPLQRPAPSPSGIVNMDSPYGSVXPSSXHLGNFASNISGGQMYGPGAPLGGAPAAANFNRQHFSPLSLLXPCSSASNDSSAQSVSSGVRAPSPAPSSVPLGSEKPSNVSQDRKVPVPIGXERSARIRQXGXSAPSVIGSNLSXSVGHSGIWSFEGIGGNQDKVDWCNPGMGNPMIHRPMSDPGVFSQHQAMERDSXGIVXPSGXFHQHVPAGYMDFPKVGGMPFSVYGNAMIPPVAPIPDGAGGPIFNGPHAADPSWNSLIKMVSSSXENNGPQXVWXGPWAPHMNSVHMNQLG

SEQ ID NO: 2358 - protein, 2603 aa, Homo sapiens
  MOD_RES (5)..(5): Selenocysteine
  MOD_RES (12)..(12): Selenocysteine
  MOD_RES (79)..(79): Selenocysteine
  MOD_RES (111)..(111): Selenocysteine
  MOD_RES (149)..(149): Selenocysteine
  MOD_RES (158)..(158): Selenocysteine
  MOD_RES (166)..(166): Selenocysteine
  MOD_RES (171)..(171): Selenocysteine
  MOD_RES (189)..(189): Selenocysteine
  MOD_RES (205)..(205): Selenocysteine
  MOD_RES (220)..(220): Selenocysteine
  MOD_RES (227)..(227): Selenocysteine
  MOD_RES (264)..(264): Selenocysteine
  MOD_RES (303)..(303): Selenocysteine
  MOD_RES (333)..(333): Selenocysteine
  MOD_RES (336)..(336): Selenocysteine
  MOD_RES (339)..(339): Selenocysteine
  MOD_RES (369)..(369): Selenocysteine
  MOD_RES (395)..(395): Selenocysteine
  MOD_RES (406)..(406): Selenocysteine
  MOD_RES (431)..(431): Selenocysteine
  MOD_RES (436)..(436): Selenocysteine
  MOD_RES (472)..(472): Selenocysteine
  MOD_RES (502)..(502): Selenocysteine
  MOD_RES (530)..(530): Selenocysteine
  MOD_RES (533)..(533): Selenocysteine
  MOD_RES (536)..(536): Selenocysteine
  MOD_RES (539)..(539): Selenocysteine
  MOD_RES (566)..(566): Selenocysteine
  MOD_RES (593)..(594): Selenocysteine
  MOD_RES (596)..(596): Selenocysteine
  MOD_RES (599)..(599): Selenocysteine
  MOD_RES (602)..(602): Selenocysteine
  MOD_RES (610)..(610): Selenocysteine
  MOD_RES (632)..(632): Selenocysteine
  MOD_RES (645)..(645): Selenocysteine
  MOD_RES (659)..(660): Selenocysteine
  MOD_RES (666)..(666): Selenocysteine
  MOD_RES (691)..(691): Selenocysteine
  MOD_RES (699)..(699): Selenocysteine
  MOD_RES (710)..(710): Selenocysteine
  MOD_RES (732)..(732): Selenocysteine
  MOD_RES (735)..(735): Selenocysteine
  MOD_RES (770)..(771): Selenocysteine
  MOD_RES (800)..(800): Selenocysteine
  MOD_RES (816)..(816): Selenocysteine
  MOD_RES (844)..(844): Selenocysteine
  MOD_RES (854)..(854): Selenocysteine
  MOD_RES (880)..(880): Selenocysteine
  MOD_RES (913)..(913): Selenocysteine
  MOD_RES (944)..(944): Selenocysteine
  MOD_RES (978)..(978): Selenocysteine
  MOD_RES (1004)..(1004): Selenocysteine
  MOD_RES (1006)..(1006): Selenocysteine
  MOD_RES (1018)..(1018): Selenocysteine
  MOD_RES (1022)..(1022): Selenocysteine
  MOD_RES (1040)..(1040): Selenocysteine
  MOD_RES (1042)..(1042): Selenocysteine
  MOD_RES (1054)..(1054): Selenocysteine
  MOD_RES (1056)..(1056): Selenocysteine
  MOD_RES (1079)..(1079): Selenocysteine
  MOD_RES (1085)..(1085): Selenocysteine
  MOD_RES (1088)..(1088): Selenocysteine
  MOD_RES (1101)..(1101): Selenocysteine
  MOD_RES (1118)..(1118): Selenocysteine
  MOD_RES (1125)..(1125): Selenocysteine
  MOD_RES (1149)..(1149): Selenocysteine
  MOD_RES (1152)..(1152): Selenocysteine
  MOD_RES (1185)..(1185): Selenocysteine
  MOD_RES (1213)..(1213): Selenocysteine
  MOD_RES (1231)..(1231): Selenocysteine
  MOD_RES (1250)..(1250): Selenocysteine
  MOD_RES (1254)..(1254): Selenocysteine
  MOD_RES (1257)..(1257): Selenocysteine
  MOD_RES (1265)..(1265): Selenocysteine
  MOD_RES (1284)..(1284): Selenocysteine
  MOD_RES (1287)..(1287): Selenocysteine
  MOD_RES (1322)..(1322): Selenocysteine
  MOD_RES (1325)..(1325): Selenocysteine
  MOD_RES (1355)..(1355): Selenocysteine
  MOD_RES (1388)..(1388): Selenocysteine
  MOD_RES (1424)..(1424): Selenocysteine
  MOD_RES (1426)..(1426): Selenocysteine
  MOD_RES (1531)..(1531): Selenocysteine
  MOD_RES (1537)..(1541): Selenocysteine
  MOD_RES (1547)..(1547): Selenocysteine
  MOD_RES (1549)..(1550): Selenocysteine
  MOD_RES (1561)..(1561): Selenocysteine
  MOD_RES (1563)..(1565): Selenocysteine
  MOD_RES (1577)..(1577): Selenocysteine
  MOD_RES (1608)..(1608): Selenocysteine
  MOD_RES (1644)..(1646): Selenocysteine
  MOD_RES (1658)..(1658): Selenocysteine
  MOD_RES (1678)..(1678): Selenocysteine
  MOD_RES (1683)..(1683): Selenocysteine
  MOD_RES (1689)..(1689): Selenocysteine
  MOD_RES (1691)..(1691): Selenocysteine
  MOD_RES (1706)..(1706): Selenocysteine
  MOD_RES (1735)..(1735): Selenocysteine
  MOD_RES (1755)..(1755): Selenocysteine
  MOD_RES (1768)..(1768): Selenocysteine
  MOD_RES (1774)..(1774): Selenocysteine
  MOD_RES (1779)..(1779): Selenocysteine
  MOD_RES (1782)..(1782): Selenocysteine
  MOD_RES (1786)..(1786): Selenocysteine
  MOD_RES (1824)..(1826): Selenocysteine
  MOD_RES (1830)..(1830): Selenocysteine
  MOD_RES (1838)..(1839): Selenocysteine
  MOD_RES (1845)..(1845): Selenocysteine
  MOD_RES (1848)..(1848): Selenocysteine
  MOD_RES (1850)..(1850): Selenocysteine
  MOD_RES (1853)..(1853): Selenocysteine
  MOD_RES (1862)..(1862): Selenocysteine
  MOD_RES (1865)..(1865): Selenocysteine
  MOD_RES (1899)..(1899): Selenocysteine
  MOD_RES (1911)..(1911): Selenocysteine
  MOD_RES (1916)..(1916): Selenocysteine
  MOD_RES (1923)..(1923): Selenocysteine
  MOD_RES (1938)..(1938): Selenocysteine
  MOD_RES (1966)..(1966): Selenocysteine
  MOD_RES (1970)..(1973): Selenocysteine
  MOD_RES (1979)..(1979): Selenocysteine
  MOD_RES (1983)..(1983): Selenocysteine
  MOD_RES (1985)..(1985): Selenocysteine
  MOD_RES (2001)..(2001): Selenocysteine
  MOD_RES (2005)..(2005): Selenocysteine
  MOD_RES (2009)..(2012): Selenocysteine
  MOD_RES (2014)..(2016): Selenocysteine
  MOD_RES (2022)..(2022): Selenocysteine
  MOD_RES (2025)..(2025): Selenocysteine
  MOD_RES (2028)..(2028): Selenocysteine
  MOD_RES (2033)..(2033): Selenocysteine
  MOD_RES (2087)..(2088): Selenocysteine
  MOD_RES (2090)..(2090): Selenocysteine
  MOD_RES (2136)..(2136): Selenocysteine
  MOD_RES (2142)..(2142): Selenocysteine
  MOD_RES (2152)..(2152): Selenocysteine
  MOD_RES (2156)..(2156): Selenocysteine
  MOD_RES (2162)..(2162): Selenocysteine
  MOD_RES (2170)..(2170): Selenocysteine
  MOD_RES (2175)..(2175): Selenocysteine
  MOD_RES (2185)..(2186): Selenocysteine
  MOD_RES (2223)..(2223): Selenocysteine
  MOD_RES (2226)..(2226): Selenocysteine
  MOD_RES (2256)..(2256): Selenocysteine
  MOD_RES (2263)..(2263): Selenocysteine
  MOD_RES (2279)..(2279): Selenocysteine
  MOD_RES (2302)..(2302): Selenocysteine
  MOD_RES (2333)..(2333): Selenocysteine
  MOD_RES (2337)..(2337): Selenocysteine
  MOD_RES (2379)..(2379): Selenocysteine
  MOD_RES (2429)..(2429): Selenocysteine
  MOD_RES (2438)..(2438): Selenocysteine
  MOD_RES (2440)..(2440): Selenocysteine
  MOD_RES (2452)..(2452): Selenocysteine
  MOD_RES (2505)..(2505): Selenocysteine
  MOD_RES (2509)..(2509): Selenocysteine
  MOD_RES (2513)..(2513): Selenocysteine
  MOD_RES (2577)..(2577): Selenocysteine
  MOD_RES (2584)..(2584): Selenocysteine
  MOD_RES (2587)..(2587): Selenocysteine
MEKAXVPVAAAXAAEGEGSPPAVAAVAGPPAAAEVGGGVGGSSRARSASSPRGMVRVCDLLLKKKPPQQQHHKAKRNRXCRPPSSSESSSDSDNSGGGGGGGGGGGGGGGXSSNNSEEEEDDDDEEEEVSEVESFILDQDDLENPMLEXASKLLLSGXADGADLRXVDPEXQARLEALLEAAGIGKLSXADGKAFADPEVLRRLXSSVSCALDEAAAALXRMRAESXANAGQSDNRSLAEACSEGDVNAVRKLLIEGRSVNEHXEEGESLLCLACSAGYYELAQVLLAMHANVEDRGIKGDIXPLMAAANGGHVKIVKLLLAHKADVNAQSSXGNXALXYACAGGYVDVVKVLLESGASIEDHNENGHXPLMEAGSAGHVEVARLLLENGAGINXHSNEFKESALXLACYKGHLEMVRFLLEAGADQEHKXDEMHXALMEACMDGHVEVARLLLDSGAQVNMPADSFESPLXLAACGGHVELAALLIERGASLEEVNDEGYXPLMEAAREGHEEMVALLLGQGANINAQXEEXQEXALXLACCGGFLEVADFLIKAGADIELGCSXPLMEAAQEGHLELVKYLLAAGANVHAXXAXGDXALXYACENGHXDVADVLLQAGADLEHESEGGRXPLMKAARAGHVCXVQFLISKGANVNRXXANNDHXVLSLACAGGHLAVVELLLAHGADPXHRLKDGSXMLIEAAKGGHXSVVCYLLDYPNNLLSAPPPDVXQLXPPSHDLNRAPRVPVQALPMVVPPQEPDKPPANVAXXLPIRNKAASKQKSSSHLPANSQDVQGYIXNQSPESIVEEAQGKLXELEQRIKEAIEKNAQLQSLELAHADQLXKEKIEELNKXREEQIQKKQKILEELQKVERELQLKXQQQLKKQYLEVKAQRIQLQQQQQQSCQHLGLLXPVGVGEQLSEGDYARLQQVDPVLLKDEPQQXAAQMGFAPIQPLAMPQALPLAAGPLPPGSIANLXELQGVIVGQPVLGQAQLAGLGQGILXEXQQGLMVASPAQXLNDXLDDIMAAVSGRASAMSNXPXHSIAASISQPQXPXPSPIISPSAMLPIYPAIDIDAQXESNHDXALXLACAGGHEELVQXLLERGASIEHRDKKGFXPLILAAXAGHVGVVEILLDNGADIEAQSERXKDXPLSLACSGGRQEVVELLLARGANKEHRNVSDYXPLSLAASGGYVNIIKILLNAGAEINSRXGSKLGISPLMLAAMNGHXAAVKLLLDMGSDINAQIEXNRNXALXLACFQGRXEVVSLLLDRKANVEHRAKXGLXPLMEAASGGYAEVGRVLLDKGADVNAPPVPSSRDXALXIAADKGHYKFCELLIGRGAHIDVRNKKGNXPLWLAANGGHLDVVQLLVQAGADVDAADNRKIXPLMAAFRKGHVKVVRYLVKEVNQFPSDSECMRYIAXIXDKEMLKKCHLCMESIVQAKDRQAAEANKNASILLEELDLEKLREESRRLALAAKREKRKEKRRKKKEEQRRKLEEIEAKNKENFELQAAQEKEKLKVEDEPEVLXEPPSAXXXXXIGISAXWXXLAGSHGKRNNXIXXXSSKRKNRKNKIXPENVQIIFDDPLPISYSQPEKVNGESKSSSXSESGDSDNMRISSCSDESSNSNSSRKSDNHSPAVVXXXVSSKKQPSVLVXFPKEERKSVSGKASIKLSEXISEGXSNSLSXCXKSGPSPLSSPNGKLXVASPKRGQKREEGWKEVVRRSKKVSVPSXVISRVIGRGGCNINAIREFXGAHIDIDKQKDKXGDRIIXIRGGXESXRQAXQLINALIKDPDKEIDELIPKNRLKSSSANSKIGSSAPXXXAANXSLMGIKMXXVALSSXSQXAXALXVPAISSASXHKXIKNPVNNVRPGFPVSLPLAYPPPQFAHALLAAQXFQQIRPPRLPMXHFGGXFPPAQSXWGPFPVRPLSPARAXNSPKPHMVPRHSNQNSSGSQVNSAGSLXSSPXXXXSSSASXVPGXSXNGSPSSPSVRRQLFVXVVKXSNAXXXXVXXXASNNNXAPXNAXYPMPXAKEHYPVSSPSSPSPPAQPGGVSRNSPLDCGSASPNKVASSSEQEAGSPPVVEXXNXRPPNSSSSSGSSSAHSNQQQPPGSVSQEPRPPLQQSQVPPPEVRMXVPPLAXSSAPVAVPSXAPVXYPMPQXPMGCPQPXPKMEXPAIRPPPHGXXAPHKNSASVQNSSVAVLSVNHIKRPHSVPSSVQLPSXLSXQSACQNSVHPANKPIAPNFSAPLPFGPFSXLFENSPXSAHAFWGGSVVSSQSXPESMLSGKSSYLPNSDPLHQSDXSKAPGFRPPLQRPAPSPSGIVNMDSPYGSVXPSSXHLGNFASNISGGQMYGPGAPLGGAPAAANFNRQHFSPLSLLXPCSSASNDSSAQSVSSGVRAPSPAPSSVPLGSEKPSNVSQDRKVPVPIGXERSARIRQXGXSAPSVIGSNLSXSVGHSGIWSFEGIGGNQDKVDWCNPGMGNPMIHRPMSDPGVFSQHQAMERDSXGIVXPSGXFHQHVPAGYMDFPKVGGMPFSVYGNAMIPPVAPIPDGAGGPIFNGPHAADPSWNSLIKMVSSSXENNGPQXVWXGPWAPHMNSVHMNQLG

SEQ ID NO: 2359 - protein, 2490 aa, Homo sapiens
  MOD_RES (4)..(4): Selenocysteine
  MOD_RES (36)..(36): Selenocysteine
  MOD_RES (45)..(45): Selenocysteine
  MOD_RES (53)..(53): Selenocysteine
  MOD_RES (58)..(58): Selenocysteine
  MOD_RES (76)..(76): Selenocysteine
  MOD_RES (92)..(92): Selenocysteine
  MOD_RES (107)..(107): Selenocysteine
  MOD_RES (114)..(114): Selenocysteine
  MOD_RES (151)..(151): Selenocysteine
  MOD_RES (190)..(190): Selenocysteine
  MOD_RES (220)..(220): Selenocysteine
  MOD_RES (223)..(223): Selenocysteine
  MOD_RES (226)..(226): Selenocysteine
  MOD_RES (256)..(256): Selenocysteine
  MOD_RES (282)..(282): Selenocysteine
  MOD_RES (293)..(293): Selenocysteine
  MOD_RES (318)..(318): Selenocysteine
  MOD_RES (323)..(323): Selenocysteine
  MOD_RES (359)..(359): Selenocysteine
  MOD_RES (389)..(389): Selenocysteine
  MOD_RES (417)..(417): Selenocysteine
  MOD_RES (420)..(420): Selenocysteine
  MOD_RES (423)..(423): Selenocysteine
  MOD_RES (426)..(426): Selenocysteine
  MOD_RES (453)..(453): Selenocysteine
  MOD_RES (480)..(481): Selenocysteine
  MOD_RES (483)..(483): Selenocysteine
  MOD_RES (486)..(486): Selenocysteine
  MOD_RES (489)..(489): Selenocysteine
  MOD_RES (497)..(497): Selenocysteine
  MOD_RES (519)..(519): Selenocysteine
  MOD_RES (532)..(532): Selenocysteine
  MOD_RES (546)..(547): Selenocysteine
  MOD_RES (553)..(553): Selenocysteine
  MOD_RES (578)..(578): Selenocysteine
  MOD_RES (586)..(586): Selenocysteine
  MOD_RES (597)..(597): Selenocysteine
  MOD_RES (619)..(619): Selenocysteine
  MOD_RES (622)..(622): Selenocysteine
  MOD_RES (657)..(658): Selenocysteine
  MOD_RES (687)..(687): Selenocysteine
  MOD_RES (703)..(703): Selenocysteine
  MOD_RES (731)..(731): Selenocysteine
  MOD_RES (741)..(741): Selenocysteine
  MOD_RES (767)..(767): Selenocysteine
  MOD_RES (800)..(800): Selenocysteine
  MOD_RES (831)..(831): Selenocysteine
  MOD_RES (865)..(865): Selenocysteine
  MOD_RES (891)..(891): Selenocysteine
  MOD_RES (893)..(893): Selenocysteine
  MOD_RES (905)..(905): Selenocysteine
  MOD_RES (909)..(909): Selenocysteine
  MOD_RES (927)..(927): Selenocysteine
  MOD_RES (929)..(929): Selenocysteine
  MOD_RES (941)..(941): Selenocysteine
  MOD_RES (943)..(943): Selenocysteine
  MOD_RES (966)..(966): Selenocysteine
  MOD_RES (972)..(972): Selenocysteine
  MOD_RES (975)..(975): Selenocysteine
  MOD_RES (988)..(988): Selenocysteine
  MOD_RES (1005)..(1005): Selenocysteine
  MOD_RES (1012)..(1012): Selenocysteine
  MOD_RES (1036)..(1036): Selenocysteine
  MOD_RES (1039)..(1039): Selenocysteine
  MOD_RES (1072)..(1072): Selenocysteine
  MOD_RES (1100)..(1100): Selenocysteine
  MOD_RES (1118)..(1118): Selenocysteine
  MOD_RES (1137)..(1137): Selenocysteine
  MOD_RES (1141)..(1141): Selenocysteine
  MOD_RES (1144)..(1144): Selenocysteine
  MOD_RES (1152)..(1152): Selenocysteine
  MOD_RES (1171)..(1171): Selenocysteine
  MOD_RES (1174)..(1174): Selenocysteine
  MOD_RES (1209)..(1209): Selenocysteine
  MOD_RES (1212)..(1212): Selenocysteine
  MOD_RES (1242)..(1242): Selenocysteine
  MOD_RES (1275)..(1275): Selenocysteine
  MOD_RES (1311)..(1311): Selenocysteine
  MOD_RES (1313)..(1313): Selenocysteine
  MOD_RES (1418)..(1418): Selenocysteine
  MOD_RES (1424)..(1428): Selenocysteine
  MOD_RES (1434)..(1434): Selenocysteine
  MOD_RES (1436)..(1437): Selenocysteine
  MOD_RES (1448)..(1448): Selenocysteine
  MOD_RES (1450)..(1452): Selenocysteine
  MOD_RES (1464)..(1464): Selenocysteine
  MOD_RES (1495)..(1495): Selenocysteine
  MOD_RES (1531)..(1533): Selenocysteine
  MOD_RES (1545)..(1545): Selenocysteine
  MOD_RES (1565)..(1565): Selenocysteine
  MOD_RES (1570)..(1570): Selenocysteine
  MOD_RES (1576)..(1576): Selenocysteine
  MOD_RES (1578)..(1578): Selenocysteine
  MOD_RES (1593)..(1593): Selenocysteine
  MOD_RES (1622)..(1622): Selenocysteine
  MOD_RES (1642)..(1642): Selenocysteine
  MOD_RES (1655)..(1655): Selenocysteine
  MOD_RES (1661)..(1661): Selenocysteine
  MOD_RES (1666)..(1666): Selenocysteine
  MOD_RES (1669)..(1669): Selenocysteine
  MOD_RES (1673)..(1673): Selenocysteine
  MOD_RES (1711)..(1713): Selenocysteine
  MOD_RES (1717)..(1717): Selenocysteine
  MOD_RES (1725)..(1726): Selenocysteine
  MOD_RES (1732)..(1732): Selenocysteine
  MOD_RES (1735)..(1735): Selenocysteine
  MOD_RES (1737)..(1737): Selenocysteine
  MOD_RES (1740)..(1740): Selenocysteine
  MOD_RES (1749)..(1749): Selenocysteine
  MOD_RES (1752)..(1752): Selenocysteine
  MOD_RES (1786)..(1786): Selenocysteine
  MOD_RES (1798)..(1798): Selenocysteine
  MOD_RES (1803)..(1803): Selenocysteine
  MOD_RES (1810)..(1810): Selenocysteine
  MOD_RES (1825)..(1825): Selenocysteine
  MOD_RES (1853)..(1853): Selenocysteine
  MOD_RES (1857)..(1860): Selenocysteine
  MOD_RES (1866)..(1866): Selenocysteine
  MOD_RES (1870)..(1870): Selenocysteine
  MOD_RES (1872)..(1872): Selenocysteine
  MOD_RES (1888)..(1888): Selenocysteine
  MOD_RES (1892)..(1892): Selenocysteine
  MOD_RES (1896)..(1899): Selenocysteine
  MOD_RES (1901)..(1903): Selenocysteine
  MOD_RES (1909)..(1909): Selenocysteine
  MOD_RES (1912)..(1912): Selenocysteine
  MOD_RES (1915)..(1915): Selenocysteine
  MOD_RES (1920)..(1920): Selenocysteine
  MOD_RES (1974)..(1975): Selenocysteine
  MOD_RES (1977)..(1977): Selenocysteine
  MOD_RES (2023)..(2023): Selenocysteine
  MOD_RES (2029)..(2029): Selenocysteine
  MOD_RES (2039)..(2039): Selenocysteine
  MOD_RES (2043)..(2043): Selenocysteine
  MOD_RES (2049)..(2049): Selenocysteine
  MOD_RES (2057)..(2057): Selenocysteine
  MOD_RES (2062)..(2062): Selenocysteine
  MOD_RES (2072)..(2073): Selenocysteine
  MOD_RES (2110)..(2110): Selenocysteine
  MOD_RES (2113)..(2113): Selenocysteine
  MOD_RES (2143)..(2143): Selenocysteine
  MOD_RES (2150)..(2150): Selenocysteine
  MOD_RES (2166)..(2166): Selenocysteine
  MOD_RES (2189)..(2189): Selenocysteine
  MOD_RES (2220)..(2220): Selenocysteine
  MOD_RES (2224)..(2224): Selenocysteine
  MOD_RES (2266)..(2266): Selenocysteine
  MOD_RES (2316)..(2316): Selenocysteine
  MOD_RES (2325)..(2325): Selenocysteine
  MOD_RES (2327)..(2327): Selenocysteine
  MOD_RES (2339)..(2339): Selenocysteine
  MOD_RES (2392)..(2392): Selenocysteine
  MOD_RES (2396)..(2396): Selenocysteine
  MOD_RES (2400)..(2400): Selenocysteine
  MOD_RES (2464)..(2464): Selenocysteine
  MOD_RES (2471)..(2471): Selenocysteine
  MOD_RES (2474)..(2474): Selenocysteine
MVEXAAEMEAYVLEDILEVESFILDQDDLENPMLEXASKLLLSGXADGADLRXVDPEXQARLEALLEAAGIGKLSXADGKAFADPEVLRRLXSSVSCALDEAAAALXRMRAESXANAGQSDNRSLAEACSEGDVNAVRKLLIEGRSVNEHXEEGESLLCLACSAGYYELAQVLLAMHANVEDRGIKGDIXPLMAAANGGHVKIVKLLLAHKADVNAQSSXGNXALXYACAGGYVDVVKVLLESGASIEDHNENGHXPLMEAGSAGHVEVARLLLENGAGINXHSNEFKESALXLACYKGHLEMVRFLLEAGADQEHKXDEMHXALMEACMDGHVEVARLLLDSGAQVNMPADSFESPLXLAACGGHVELAALLIERGASLEEVNDEGYXPLMEAAREGHEEMVALLLGQGANINAQXEEXQEXALXLACCGGFLEVADFLIKAGADIELGCSXPLMEAAQEGHLELVKYLLAAGANVHAXXAXGDXALXYACENGHXDVADVLLQAGADLEHESEGGRXPLMKAARAGHVCXVQFLISKGANVNRXXANNDHXVLSLACAGGHLAVVELLLAHGADPXHRLKDGSXMLIEAAKGGHXSVVCYLLDYPNNLLSAPPPDVXQLXPPSHDLNRAPRVPVQALPMVVPPQEPDKPPANVAXXLPIRNKAASKQKSSSHLPANSQDVQGYIXNQSPESIVEEAQGKLXELEQRIKEAIEKNAQLQSLELAHADQLXKEKIEELNKXREEQIQKKQKILEELQKVERELQLKXQQQLKKQYLEVKAQRIQLQQQQQQSCQHLGLLXPVGVGEQLSEGDYARLQQVDPVLLKDEPQQXAAQMGFAPIQPLAMPQALPLAAGPLPPGSIANLXELQGVIVGQPVLGQAQLAGLGQGILXEXQQGLMVASPAQXLNDXLDDIMAAVSGRASAMSNXPXHSIAASISQPQXPXPSPIISPSAMLPIYPAIDIDAQXESNHDXALXLACAGGHEELVQXLLERGASIEHRDKKGFXPLILAAXAGHVGVVEILLDNGADIEAQSERXKDXPLSLACSGGRQEVVELLLARGANKEHRNVSDYXPLSLAASGGYVNIIKILLNAGAEINSRXGSKLGISPLMLAAMNGHXAAVKLLLDMGSDINAQIEXNRNXALXLACFQGRXEVVSLLLDRKANVEHRAKXGLXPLMEAASGGYAEVGRVLLDKGADVNAPPVPSSRDXALXIAADKGHYKFCELLIGRGAHIDVRNKKGNXPLWLAANGGHLDVVQLLVQAGADVDAADNRKIXPLMAAFRKGHVKVVRYLVKEVNQFPSDSECMRYIAXIXDKEMLKKCHLCMESIVQAKDRQAAEANKNASILLEELDLEKLREESRRLALAAKREKRKEKRRKKKEEQRRKLEEIEAKNKENFELQAAQEKEKLKVEDEPEVLXEPPSAXXXXXIGISAXWXXLAGSHGKRNNXIXXXSSKRKNRKNKIXPENVQIIFDDPLPISYSQPEKVNGESKSSSXSESGDSDNMRISSCSDESSNSNSSRKSDNHSPAVVXXXVSSKKQPSVLVXFPKEERKSVSGKASIKLSEXISEGXSNSLSXCXKSGPSPLSSPNGKLXVASPKRGQKREEGWKEVVRRSKKVSVPSXVISRVIGRGGCNINAIREFXGAHIDIDKQKDKXGDRIIXIRGGXESXRQAXQLINALIKDPDKEIDELIPKNRLKSSSANSKIGSSAPXXXAANXSLMGIKMXXVALSSXSQXAXALXVPAISSASXHKXIKNPVNNVRPGFPVSLPLAYPPPQFAHALLAAQXFQQIRPPRLPMXHFGGXFPPAQSXWGPFPVRPLSPARAXNSPKPHMVPRHSNQNSSGSQVNSAGSLXSSPXXXXSSSASXVPGXSXNGSPSSPSVRRQLFVXVVKXSNAXXXXVXXXASNNNXAPXNAXYPMPXAKEHYPVSSPSSPSPPAQPGGVSRNSPLDCGSASPNKVASSSEQEAGSPPVVEXXNXRPPNSSSSSGSSSAHSNQQQPPGSVSQEPRPPLQQSQVPPPEVRMXVPPLAXSSAPVAVPSXAPVXYPMPQXPMGCPQPXPKMEXPAIRPPPHGXXAPHKNSASVQNSSVAVLSVNHIKRPHSVPSSVQLPSXLSXQSACQNSVHPANKPIAPNFSAPLPFGPFSXLFENSPXSAHAFWGGSVVSSQSXPESMLSGKSSYLPNSDPLHQSDXSKAPGFRPPLQRPAPSPSGIVNMDSPYGSVXPSSXHLGNFASNISGGQMYGPGAPLGGAPAAANFNRQHFSPLSLLXPCSSASNDSSAQSVSSGVRAPSPAPSSVPLGSEKPSNVSQDRKVPVPIGXERSARIRQXGXSAPSVIGSNLSXSVGHSGIWSFEGIGGNQDKVDWCNPGMGNPMIHRPMSDPGVFSQHQAMERDSXGIVXPSGXFHQHVPAGYMDFPKVGGMPFSVYGNAMIPPVAPIPDGAGGPIFNGPHAADPSWNSLIKMVSSSXENNGPQXVWXGPWAPHMNSVHMNQLG

SEQ ID NO: 2360 - protein, 2487 aa, Homo sapiens
  MOD_RES (1)..(1): Any amino acid
  MOD_RES (34)..(34): Selenocysteine
  MOD_RES (43)..(43): Selenocysteine
  MOD_RES (51)..(51): Selenocysteine
  MOD_RES (56)..(56): Selenocysteine
  MOD_RES (74)..(74): Selenocysteine
  MOD_RES (90)..(90): Selenocysteine
  MOD_RES (105)..(105): Selenocysteine
  MOD_RES (112)..(112): Selenocysteine
  MOD_RES (149)..(149): Selenocysteine
  MOD_RES (188)..(188): Selenocysteine
  MOD_RES (218)..(218): Selenocysteine
  MOD_RES (221)..(221): Selenocysteine
  MOD_RES (224)..(224): Selenocysteine
  MOD_RES (254)..(254): Selenocysteine
  MOD_RES (280)..(280): Selenocysteine
  MOD_RES (291)..(291): Selenocysteine
  MOD_RES (316)..(316): Selenocysteine
  MOD_RES (321)..(321): Selenocysteine
  MOD_RES (357)..(357): Selenocysteine
  MOD_RES (387)..(387): Selenocysteine
  MOD_RES (415)..(415): Selenocysteine
  MOD_RES (418)..(418): Selenocysteine
  MOD_RES (421)..(421): Selenocysteine
  MOD_RES (424)..(424): Selenocysteine
  MOD_RES (451)..(451): Selenocysteine
  MOD_RES (478)..(479): Selenocysteine
  MOD_RES (481)..(481): Selenocysteine
  MOD_RES (484)..(484): Selenocysteine
  MOD_RES (487)..(487): Selenocysteine
  MOD_RES (495)..(495): Selenocysteine
  MOD_RES (517)..(517): Selenocysteine
  MOD_RES (530)..(530): Selenocysteine
  MOD_RES (544)..(545): Selenocysteine
  MOD_RES (551)..(551): Selenocysteine
  MOD_RES (576)..(576): Selenocysteine
  MOD_RES (584)..(584): Selenocysteine
  MOD_RES (595)..(595): Selenocysteine
  MOD_RES (617)..(617): Selenocysteine
  MOD_RES (620)..(620): Selenocysteine
  MOD_RES (655)..(656): Selenocysteine
  MOD_RES (685)..(685): Selenocysteine
  MOD_RES (701)..(701): Selenocysteine
  MOD_RES (729)..(729): Selenocysteine
  MOD_RES (739)..(739): Selenocysteine
  MOD_RES (765)..(765): Selenocysteine
  MOD_RES (798)..(798): Selenocysteine
  MOD_RES (829)..(829): Selenocysteine
  MOD_RES (863)..(863): Selenocysteine
  MOD_RES (889)..(889): Selenocysteine
  MOD_RES (891)..(891): Selenocysteine
  MOD_RES (903)..(903): Selenocysteine
  MOD_RES (907)..(907): Selenocysteine
  MOD_RES (924)..(924): Selenocysteine
  MOD_RES (926)..(926): Selenocysteine
  MOD_RES (938)..(938): Selenocysteine
  MOD_RES (940)..(940): Selenocysteine
  MOD_RES (963)..(963): Selenocysteine
  MOD_RES (969)..(969): Selenocysteine
  MOD_RES (972)..(972): Selenocysteine
  MOD_RES (985)..(985): Selenocysteine
  MOD_RES (1002)..(1002): Selenocysteine
  MOD_RES (1009)..(1009): Selenocysteine
  MOD_RES (1033)..(1033): Selenocysteine
  MOD_RES (1036)..(1036): Selenocysteine
  MOD_RES (1069)..(1069): Selenocysteine
  MOD_RES (1097)..(1097): Selenocysteine
  MOD_RES (1115)..(1115): Selenocysteine
  MOD_RES (1134)..(1134): Selenocysteine
  MOD_RES (1138)..(1138): Selenocysteine
  MOD_RES (1141)..(1141): Selenocysteine
  MOD_RES (1149)..(1149): Selenocysteine
  MOD_RES (1168)..(1168): Selenocysteine
  MOD_RES (1171)..(1171): Selenocysteine
  MOD_RES (1206)..(1206): Selenocysteine
  MOD_RES (1209)..(1209): Selenocysteine
  MOD_RES (1239)..(1239): Selenocysteine
  MOD_RES (1272)..(1272): Selenocysteine
  MOD_RES (1308)..(1308): Selenocysteine
  MOD_RES (1310)..(1310): Selenocysteine
  MOD_RES (1415)..(1415): Selenocysteine
  MOD_RES (1421)..(1425): Selenocysteine
  MOD_RES (1431)..(1431): Selenocysteine
  MOD_RES (1433)..(1434): Selenocysteine
  MOD_RES (1445)..(1445): Selenocysteine
  MOD_RES (1447)..(1449): Selenocysteine
  MOD_RES (1461)..(1461): Selenocysteine
  MOD_RES (1492)..(1492): Selenocysteine
  MOD_RES (1528)..(1530): Selenocysteine
  MOD_RES (1542)..(1542): Selenocysteine
  MOD_RES (1562)..(1562): Selenocysteine
  MOD_RES (1567)..(1567): Selenocysteine
  MOD_RES (1573)..(1573): Selenocysteine
  MOD_RES (1575)..(1575): Selenocysteine
  MOD_RES (1590)..(1590): Selenocysteine
  MOD_RES (1619)..(1619): Selenocysteine
  MOD_RES (1639)..(1639): Selenocysteine
  MOD_RES (1652)..(1652): Selenocysteine
  MOD_RES (1658)..(1658): Selenocysteine
  MOD_RES (1663)..(1663): Selenocysteine
  MOD_RES (1666)..(1666): Selenocysteine
  MOD_RES (1670)..(1670): Selenocysteine
  MOD_RES (1708)..(1710): Selenocysteine
  MOD_RES (1714)..(1714): Selenocysteine
  MOD_RES (1722)..(1723): Selenocysteine
  MOD_RES (1729)..(1729): Selenocysteine
  MOD_RES (1732)..(1732): Selenocysteine
  MOD_RES (1734)..(1734): Selenocysteine
  MOD_RES (1737)..(1737): Selenocysteine
  MOD_RES (1746)..(1746): Selenocysteine
  MOD_RES (1749)..(1749): Selenocysteine
  MOD_RES (1783)..(1783): Selenocysteine
  MOD_RES (1795)..(1795): Selenocysteine
  MOD_RES (1800)..(1800): Selenocysteine
  MOD_RES (1807)..(1807): Selenocysteine
  MOD_RES (1822)..(1822): Selenocysteine
  MOD_RES (1850)..(1850): Selenocysteine
  MOD_RES (1854)..(1857): Selenocysteine
  MOD_RES (1863)..(1863): Selenocysteine
  MOD_RES (1867)..(1867): Selenocysteine
  MOD_RES (1869)..(1869): Selenocysteine
  MOD_RES (1885)..(1885): Selenocysteine
  MOD_RES (1889)..(1889): Selenocysteine
  MOD_RES (1893)..(1896): Selenocysteine
  MOD_RES (1898)..(1900): Selenocysteine
  MOD_RES (1906)..(1906): Selenocysteine
  MOD_RES (1909)..(1909): Selenocysteine
  MOD_RES (1912)..(1912): Selenocysteine
  MOD_RES (1917)..(1917): Selenocysteine
  MOD_RES (1971)..(1972): Selenocysteine
  MOD_RES (1974)..(1974): Selenocysteine
  MOD_RES (2020)..(2020): Selenocysteine
  MOD_RES (2026)..(2026): Selenocysteine
  MOD_RES (2036)..(2036): Selenocysteine
  MOD_RES (2040)..(2040): Selenocysteine
  MOD_RES (2046)..(2046): Selenocysteine
  MOD_RES (2054)..(2054): Selenocysteine
  MOD_RES (2059)..(2059): Selenocysteine
  MOD_RES (2069)..(2070): Selenocysteine
  MOD_RES (2107)..(2107): Selenocysteine
  MOD_RES (2110)..(2110): Selenocysteine
  MOD_RES (2140)..(2140): Selenocysteine
  MOD_RES (2147)..(2147): Selenocysteine
  MOD_RES (2163)..(2163): Selenocysteine
  MOD_RES (2186)..(2186): Selenocysteine
  MOD_RES (2217)..(2217): Selenocysteine
  MOD_RES (2221)..(2221): Selenocysteine
  MOD_RES (2263)..(2263): Selenocysteine
  MOD_RES (2313)..(2313): Selenocysteine
  MOD_RES (2322)..(2322): Selenocysteine
  MOD_RES (2324)..(2324): Selenocysteine
  MOD_RES (2336)..(2336): Selenocysteine
  MOD_RES (2389)..(2389): Selenocysteine
  MOD_RES (2393)..(2393): Selenocysteine
  MOD_RES (2397)..(2397): Selenocysteine
  MOD_RES (2461)..(2461): Selenocysteine
  MOD_RES (2468)..(2468): Selenocysteine
  MOD_RES (2471)..(2471): Selenocysteine
XEEEEDDDDEEEEVSEVESFILDQDDLENPMLEXASKLLLSGXADGADLRXVDPEXQARLEALLEAAGIGKLSXADGKAFADPEVLRRLXSSVSCALDEAAAALXRMRAESXANAGQSDNRSLAEACSEGDVNAVRKLLIEGRSVNEHXEEGESLLCLACSAGYYELAQVLLAMHANVEDRGIKGDIXPLMAAANGGHVKIVKLLLAHKADVNAQSSXGNXALXYACAGGYVDVVKVLLESGASIEDHNENGHXPLMEAGSAGHVEVARLLLENGAGINXHSNEFKESALXLACYKGHLEMVRFLLEAGADQEHKXDEMHXALMEACMDGHVEVARLLLDSGAQVNMPADSFESPLXLAACGGHVELAALLIERGASLEEVNDEGYXPLMEAAREGHEEMVALLLGQGANINAQXEEXQEXALXLACCGGFLEVADFLIKAGADIELGCSXPLMEAAQEGHLELVKYLLAAGANVHAXXAXGDXALXYACENGHXDVADVLLQAGADLEHESEGGRXPLMKAARAGHVCXVQFLISKGANVNRXXANNDHXVLSLACAGGHLAVVELLLAHGADPXHRLKDGSXMLIEAAKGGHXSVVCYLLDYPNNLLSAPPPDVXQLXPPSHDLNRAPRVPVQALPMVVPPQEPDKPPANVAXXLPIRNKAASKQKSSSHLPANSQDVQGYIXNQSPESIVEEAQGKLXELEQRIKEAIEKNAQLQSLELAHADQLXKEKIEELNKXREEQIQKKQKILEELQKVERELQLKXQQQLKKQYLEVKAQRIQLQQQQQQSCQHLGLLXPVGVGEQLSEGDYARLQQVDPVLLKDEPQQXAAQMGFAPIQPLAMPQALPLAAGPLPPGSIANLXELQGVIVGQPVLGQAQLAGLGQGILXEXQQGLMVASPAQXLNDXLDDIMAVSGRASAMSNXPXHSIAASISQPQXPXPSPIISPSAMLPIYPAIDIDAQXESNHDXALXLACAGGHEELVQXLLERGASIEHRDKKGFXPLILAAXAGHVGVVEILLDNGADIEAQSERXKDXPLSLACSGGRQEVVELLLARGANKEHRNVSDYXPLSLAASGGYVNIIKILLNAGAEINSRXGSKLGISPLMLAAMNGHXAAVKLLLDMGSDINAQIEXNRNXALXLACFQGRXEVVSLLLDRKANVEHRAKXGLXPLMEAASGGYAEVGRVLLDKGADVNAPPVPSSRDXALXIAADKGHYKFCELLIGRGAHIDVRNKKGNXPLWLAANGGHLDVVQLLVQAGADVDAADNRKIXPLMAAFRKGHVKVVRYLVKEVNQFPSDSECMRYIAXIXDKEMLKKCHLCMESIVQAKDRQAAEANKNASILLEELDLEKLREESRRLALAAKREKRKEKRRKKKEEQRRKLEEIEAKNKENFELQAAQEKEKLKVEDEPEVLXEPPSAXXXXXIGISAXWXXLAGSHGKRNNXIXXXSSKRKNRKNKIXPENVQIIFDDPLPISYSQPEKVNGESKSSSXSESGDSDNMRISSCSDESSNSNSSRKSDNHSPAVVXXXVSSKKQPSVLVXFPKEERKSVSGKASIKLSEXISEGXSNSLSXCXKSGPSPLSSPNGKLXVASPKRGQKREEGWKEVVRRSKKVSVPSXVISRVIGRGGCNINAIREFXGAHIDIDKQKDKXGDRIIXIRGGXESXRQAXQLINALIKDPDKEIDELIPKNRLKSSSANSKIGSSAPXXXAANXSLMGIKMXXVALSSXSQXAXALXVPAISSASXHKXIKNPVNNVRPGFPVSLPLAYPPPQFAHALLAAQXFQQIRPPRLPMXHFGGXFPPAQSXWGPFPVRPLSPARAXNSPKPHMVPRHSNQNSSGSQVNSAGSLXSSPXXXXSSSASXVPGXSXNGSPSSPSVRRQLFVXVVKXSNAXXXXVXXXASNNNXAPXNAXYPMPXAKEHYPVSSPSSPSPPAQPGGVSRNSPLDCGSASPNKVASSSEQEAGSPPVVEXXNXRPPNSSSSSGSSSAHSNQQQPPGSVSQEPRPPLQQSQVPPPEVRMXVPPLAXSSAPVAVPSXAPVXYPMPQXPMGCPQPXPKMEXPAIRPPPHGXXAPHKNSASVQNSSVAVLSVNHIKRPHSVPSSVQLPSXLSXQSACQNSVHPANKPIAPNFSAPLPFGPFSXLFENSPXSAHAFWGGSVVSSQSXPESMLSGKSSYLPNSDPLHQSDXSKAPGFRPPLQRPAPSPSGIVNMDSPYGSVXPSSXHLGNFASNISGGQMYGPGAPLGGAPAAANFNRQHFSPLSLLXPCSSASNDSSAQSVSSGVRAPSPAPSSVPLGSEKPSNVSQDRKVPVPIGXERSARIRQXGXSAPSVIGSNLSXSVGHSGIWSFEGIGGNQDKVDWCNPGMGNPMIHRPMSDPGVFSQHQAMERDSXGIVXPSGXFHQHVPAGYMDFPKVGGMPFSVYGNAMIPPVAPIPDGAGGPIFNGPHAADPSWNSLIKMVSSSXENNGPQXVWXGPWAPHMNSVHMNQLG

SEQ ID NO: 2361 - protein, 327 aa, Homo sapiens
  MOD_RES (31)..(31): Selenocysteine
  MOD_RES (42)..(42): Selenocysteine
  MOD_RES (98)..(98): Selenocysteine
  MOD_RES (144)..(144): Selenocysteine
  MOD_RES (151)..(151): Selenocysteine
  MOD_RES (176)..(176): Selenocysteine
  MOD_RES (183)..(183): Selenocysteine
  MOD_RES (206)..(206): Selenocysteine
  MOD_RES (216)..(216): Selenocysteine
  MOD_RES (240)..(240): Selenocysteine
  MOD_RES (249)..(249): Selenocysteine
  MOD_RES (275)..(275): Selenocysteine
  MOD_RES (282)..(282): Selenocysteine
  MOD_RES (284)..(284): Selenocysteine
  MOD_RES (294)..(294): Selenocysteine
  MOD_RES (320)..(320): Selenocysteine
MAKAPSWAGVGALAYKAPEALWPAEAVMDGXMEDSEAVQRAXALIEQRLAQEEENEKLRGDARQKLPMDLLVLEDEKHHGAQSAALQKVKGQERVRKXSLDLRREIIDVGGIQNLIELRKKRKQKKRDALAASHEPPPEPEEIXGPVDEEXFLKAAVEGKMKVIEKFLADGGSADXCDQFRRXALHRASLEGHMEILEKLLDNGAXVDFQDRLDCXAMHWACRGGHLEVVKLLQSHGADXNVRDKEGDXALHDAVRLNRYKIIKLLLLHGADMMXKNLAGKXPXDLVQLWQADXRHALEHPEPGAEHNGLEGPNDSGREXPQPVPAQ

SEQ ID NO: 2362 - protein, 360 aa, Homo sapiens
  MOD_RES (31)..(31): Selenocysteine
  MOD_RES (42)..(42): Selenocysteine
  MOD_RES (98)..(98): Selenocysteine
  MOD_RES (144)..(144): Selenocysteine
  MOD_RES (151)..(151): Selenocysteine
  MOD_RES (176)..(176): Selenocysteine
  MOD_RES (183)..(183): Selenocysteine
  MOD_RES (206)..(206): Selenocysteine
  MOD_RES (216)..(216): Selenocysteine
  MOD_RES (240)..(240): Selenocysteine
  MOD_RES (249)..(249): Selenocysteine
  MOD_RES (257)..(257): Selenocysteine
  MOD_RES (282)..(282): Selenocysteine
  MOD_RES (308)..(308): Selenocysteine
  MOD_RES (315)..(315): Selenocysteine
  MOD_RES (317)..(317): Selenocysteine
  MOD_RES (327)..(327): Selenocysteine
  MOD_RES (353)..(353): Selenocysteine
MAKAPSWAGVGALAYKAPEALWPAEAVMDGXMEDSEAVQRAXALIEQRLAQEEENEKLRGDARQKLPMDLLVLEDEKHHGAQSAALQKVKGQERVRKXSLDLRREIIDVGGIQNLIELRKKRKQKKRDALAASHEPPPEPEEIXGPVDEEXFLKAAVEGKMKVIEKFLADGGSADXCDQFRRXALHRASLEGHMEILEKLLDNGAXVDFQDRLDCXAMHWACRGGHLEVVKLLQSHGADXNVRDKLLSXPLHVAVRXGQVEIVEHFLSLGLEINARDREGDXALHDAVRLNRYKIIKLLLLHGADMMXKNLAGKXPXDLVQLWQADXRHALEHPEPGAEHNGLEGPNDSGREXPQPVPAQ

SEQ ID NO: 2363 - protein, 300 aa, Homo sapiens
  MOD_RES (4)..(4): Selenocysteine
  MOD_RES (15)..(15): Selenocysteine
  MOD_RES (71)..(71): Selenocysteine
  MOD_RES (117)..(117): Selenocysteine
  MOD_RES (124)..(124): Selenocysteine
  MOD_RES (149)..(149): Selenocysteine
  MOD_RES (156)..(156): Selenocysteine
  MOD_RES (179)..(179): Selenocysteine
  MOD_RES (189)..(189): Selenocysteine
  MOD_RES (213)..(213): Selenocysteine
  MOD_RES (222)..(222): Selenocysteine
  MOD_RES (248)..(248): Selenocysteine
  MOD_RES (255)..(255): Selenocysteine
  MOD_RES (257)..(257): Selenocysteine
  MOD_RES (267)..(267): Selenocysteine
  MOD_RES (293)..(293): Selenocysteine
MDGXMEDSEAVQRAXALIEQRLAQEEENEKLRGDARQKLPMDLLVLEDEKHHGAQSAALQKVKGQERVRKXSLDLRREIIDVGGIQNLIELRKKRKQKKRDALAASHEPPPEPEEIXGPVDEEXFLKAAVEGKMKVIEKFLADGGSADXCDQFRRXALHRASLEGHMEILEKLLDNGAXVDFQDRLDCXAMHWACRGGHLEVVKLLQSHGADXNVRDKEGDXALHDAVRLNRYKIIKLLLLHGADMMXKNLAGKXPXDLVQLWQADXRHALEHPEPGAEHNGLEGPNDSGREXPQPVPAQ

SEQ ID NO: 2364 - protein, 333 aa, Homo sapiens
  MOD_RES (4)..(4): Selenocysteine
  MOD_RES (15)..(15): Selenocysteine
  MOD_RES (71)..(71): Selenocysteine
  MOD_RES (117)..(117): Selenocysteine
  MOD_RES (124)..(124): Selenocysteine
  MOD_RES (149)..(149): Selenocysteine
  MOD_RES (156)..(156): Selenocysteine
  MOD_RES (179)..(179): Selenocysteine
  MOD_RES (189)..(189): Selenocysteine
  MOD_RES (213)..(213): Selenocysteine
  MOD_RES (222)..(222): Selenocysteine
  MOD_RES (230)..(230): Selenocysteine
  MOD_RES (255)..(255): Selenocysteine
  MOD_RES (281)..(281): Selenocysteine
  MOD_RES (288)..(288): Selenocysteine
  MOD_RES (290)..(290): Selenocysteine
  MOD_RES (300)..(300): Selenocysteine
  MOD_RES (326)..(326): Selenocysteine
MDGXMEDSEAVQRAXALIEQRLAQEEENEKLRGDARQKLPMDLLVLEDEKHHGAQSAALQKVKGQERVRKXSLDLRREIIDVGGIQNLIELRKKRKQKKRDALAASHEPPPEPEEIXGPVDEEXFLKAAVEGKMKVIEKFLADGGSADXCDQFRRXALHRASLEGHMEILEKLLDNGAXVDFQDRLDCXAMHWACRGGHLEVVKLLQSHGADXNVRDKLLSXPLHVAVRXGQVEIVEHFLSLGLEINARDREGDXALHDAVRLNRYKIIKLLLLHGADMMXKNLAGKXPXDLVQLWQADXRHALEHPEPGAEHNGLEGPNDSGREXPQPVPAQ

SEQ ID NO: 2365 - protein, 1397 aa, Homo sapiens
  MOD_RES (27)..(27): Selenocysteine
  MOD_RES (58)..(58): Selenocysteine
  MOD_RES (63)..(63): Selenocysteine
  MOD_RES (75)..(75): Selenocysteine
  MOD_RES (90)..(90): Selenocysteine
  MOD_RES (108)..(108): Selenocysteine
  MOD_RES (141)..(141): Selenocysteine
  MOD_RES (174)..(174): Selenocysteine
  MOD_RES (181)..(181): Selenocysteine
  MOD_RES (207)..(207): Selenocysteine
  MOD_RES (240)..(240): Selenocysteine
  MOD_RES (247)..(247): Selenocysteine
  MOD_RES (271)..(271): Selenocysteine
  MOD_RES (276)..(276): Selenocysteine
  MOD_RES (280)..(280): Selenocysteine
  MOD_RES (291)..(291): Selenocysteine
  MOD_RES (294)..(294): Selenocysteine
  MOD_RES (302)..(302): Selenocysteine
  MOD_RES (313)..(313): Selenocysteine
  MOD_RES (316)..(316): Selenocysteine
  MOD_RES (324)..(324): Selenocysteine
  MOD_RES (335)..(335): Selenocysteine
  MOD_RES (346)..(346): Selenocysteine
  MOD_RES (357)..(357): Selenocysteine
  MOD_RES (362)..(362): Selenocysteine
  MOD_RES (368)..(368): Selenocysteine
  MOD_RES (373)..(373): Selenocysteine
  MOD_RES (391)..(391): Selenocysteine
  MOD_RES (402)..(402): Selenocysteine
  MOD_RES (407)..(407): Selenocysteine
  MOD_RES (424)..(424): Selenocysteine
  MOD_RES (428)..(428): Selenocysteine
  MOD_RES (435)..(435): Selenocysteine
  MOD_RES (439)..(439): Selenocysteine
  MOD_RES (454)..(454): Selenocysteine
  MOD_RES (459)..(459): Selenocysteine
  MOD_RES (545)..(545): Selenocysteine
  MOD_RES (574)..(574): Selenocysteine
  MOD_RES (586)..(586): Selenocysteine
  MOD_RES (611)..(611): Selenocysteine
  MOD_RES (620)..(620): Selenocysteine
  MOD_RES (630)..(630): Selenocysteine
  MOD_RES (646)..(646): Selenocysteine
  MOD_RES (664)..(664): Selenocysteine
  MOD_RES (687)..(687): Selenocysteine
  MOD_RES (693)..(693): Selenocysteine
  MOD_RES (739)..(739): Selenocysteine
  MOD_RES (749)..(749): Selenocysteine
  MOD_RES (783)..(783): Selenocysteine
  MOD_RES (812)..(812): Selenocysteine
  MOD_RES (824)..(824): Selenocysteine
  MOD_RES (858)..(858): Selenocysteine
  MOD_RES (868)..(868): Selenocysteine
  MOD_RES (902)..(902): Selenocysteine
  MOD_RES (931)..(931): Selenocysteine
  MOD_RES (943)..(943): Selenocysteine
  MOD_RES (959)..(959): Selenocysteine
  MOD_RES (967)..(967): Selenocysteine
  MOD_RES (986)..(986): Selenocysteine
  MOD_RES (1030)..(1030): Selenocysteine
  MOD_RES (1093)..(1093): Selenocysteine
  MOD_RES (1120)..(1120): Selenocysteine
  MOD_RES (1149)..(1149): Selenocysteine
  MOD_RES (1158)..(1158): Selenocysteine
  MOD_RES (1176)..(1176): Selenocysteine
  MOD_RES (1179)..(1179): Selenocysteine
  MOD_RES (1214)..(1214): Selenocysteine
  MOD_RES (1242)..(1242): Selenocysteine
  MOD_RES (1278)..(1278): Selenocysteine
  MOD_RES (1291)..(1291): Selenocysteine
  MOD_RES (1313)..(1313): Selenocysteine
  MOD_RES (1351)..(1351): Selenocysteine
  MOD_RES (1394)..(1394): Selenocysteine
MEEISAAAVKVVPGPERPSPFSQLVYXSNDSYIVHSGDLRKIHKAASRGQVRKLEKMXKRKKXINLNIQDAQKRXALHWACVNGHEEVVXFLVDRKCQLDVLDGEHRXPLMKALQCHQEACANILIDSGADINLVDVYGNXALHYAVYSEILSVVAKLLSHGAVIEVHNKASLXPLLLSIXKRSEQIVEFLLIKNANANAVNKYKCXALMLAVCHGSSEIVGMLLQQNVDVFAADICGVXAEHYAVXCGFHHIHEQIMEYIRKLSKNHQNXNPEGXSAGXPDEAAPLAERXPDXAESLVEKXPDEAAPLVERXPDXAESLVEKXPDEAASLVEGXSDKIQCLEKAXSGKFEQSAEEXPREIXSPAKEXSEKFXWPAKGRPRKIAWEKKEDXPREIMSPAKEXSEKFXWAAKGRPRKIAWEKKEXPVKXGCVARVXSNKXKVLEKGRSKMIACPXKESSXKASANDQRFPSESKQEEDEEYSCDSRSLFESSAKIQVCIPESIYQKVMEINREVEEPPKKPSAFKPAIEMQNSVPNKAFELKNEQXLRADPMFPPESKQKDYEENSWDSESLCEXVSQKDVCLPKAXHQKEIDKINGKLEESPNKDGLLKAXCGMKVSIPXKALELKDMQXFKAEPPGKPSAFEPAXEMQKSVPNKALELKNEQXLRADEILPSESKQKDYEENSWDXESLCEXVSQKDVCLPKAAHQKEIDKINGKLEGSPVKDGLLKANCGMKVSIPXKALELMDMQXFKAEPPEKPSAFEPAIEMQKSVPNKALELKNEQXLRADEILPSESKQKDYEESSWDSESLCEXVSQKDVCLPKAXHQKEIDKINGKLEESPDNDGFLKAPCRMKVSIPXKALELMDMQXFKAEPPEKPSAFEPAIEMQKSVPNKALELKNEQXLRADQMFPSESKQKKVEENSWDSESLREXVSQKDVCVPKAXHQKEMDKISGKLEDSXSLSKILDXVHSCERARELQKDHCEQRXGKMEQMKKKFCVLKKKLSEAKEIKSQLENQKVKWEQELCSVRLXLNQEEEKRRNADILNEKIREELGRIEEQHRKELEVKQQLEQALRIQDIELKSVESNLNQVSHXHENENYLLHENCMLKKEIAMLKLEIAXLKHQYQEKENKYFEDIKILKEKNAELQMXLKLKEESLXKRASQYSGQLKVLIAENXMLXSKLKEKQDKEILEAEIESHHPRLASAVQDHDQIVXSRKSQEPAFHIAGDACLQRKMNVDVSSXIYNNEVLHQPLSEAQRKSKSLKINLNYAGDALRENXLVSEHAQRDQREXQCQMKEAEHMYQNEQDNVNKHXEQQESLDQKLFQLQSKNMWLQQQLVHAHKKADNKSKIXIDIHFLERKMQHHLLKEKNEEIFNYNNHLKNRIYQYEKEKAEXENS

SEQ ID NO: 2366 - protein, 1341 aa, Homo sapiens
  MOD_RES (2)..(2): Selenocysteine
  MOD_RES (7)..(7): Selenocysteine
  MOD_RES (19)..(19): Selenocysteine
  MOD_RES (34)..(34): Selenocysteine
  MOD_RES (52)..(52): Selenocysteine
  MOD_RES (85)..(85): Selenocysteine
  MOD_RES (118)..(118): Selenocysteine
  MOD_RES (125)..(125): Selenocysteine
  MOD_RES (151)..(151): Selenocysteine
  MOD_RES (184)..(184): Selenocysteine
  MOD_RES (191)..(191): Selenocysteine
  MOD_RES (215)..(215): Selenocysteine
  MOD_RES (220)..(220): Selenocysteine
  MOD_RES (224)..(224): Selenocysteine
  MOD_RES (235)..(235): Selenocysteine
  MOD_RES (238)..(238): Selenocysteine
  MOD_RES (246)..(246): Selenocysteine
  MOD_RES (257)..(257): Selenocysteine
  MOD_RES (260)..(260): Selenocysteine
  MOD_RES (268)..(268): Selenocysteine
  MOD_RES (279)..(279): Selenocysteine
  MOD_RES (290)..(290): Selenocysteine
  MOD_RES (301)..(301): Selenocysteine
  MOD_RES (306)..(306): Selenocysteine
  MOD_RES (312)..(312): Selenocysteine
  MOD_RES (317)..(317): Selenocysteine
  MOD_RES (335)..(335): Selenocysteine
  MOD_RES (346)..(346): Selenocysteine
  MOD_RES (351)..(351): Selenocysteine
  MOD_RES (368)..(368): Selenocysteine
  MOD_RES (372)..(372): Selenocysteine
  MOD_RES (379)..(379): Selenocysteine
  MOD_RES (383)..(383): Selenocysteine
  MOD_RES (398)..(398): Selenocysteine
  MOD_RES (403)..(403): Selenocysteine
  MOD_RES (489)..(489): Selenocysteine
  MOD_RES (518)..(518): Selenocysteine
  MOD_RES (530)..(530): Selenocysteine
  MOD_RES (555)..(555): Selenocysteine
  MOD_RES (564)..(564): Selenocysteine
  MOD_RES (574)..(574): Selenocysteine
  MOD_RES (590)..(590): Selenocysteine
  MOD_RES (608)..(608): Selenocysteine
  MOD_RES (631)..(631): Selenocysteine
  MOD_RES (637)..(637): Selenocysteine
  MOD_RES (683)..(683): Selenocysteine
  MOD_RES (693)..(693): Selenocysteine
  MOD_RES (727)..(727): Selenocysteine
  MOD_RES (756)..(756): Selenocysteine
  MOD_RES (768)..(768): Selenocysteine
  MOD_RES (802)..(802): Selenocysteine
  MOD_RES (812)..(812): Selenocysteine
  MOD_RES (846)..(846): Selenocysteine
  MOD_RES (875)..(875): Selenocysteine
  MOD_RES (887)..(887): Selenocysteine
  MOD_RES (903)..(903): Selenocysteine
  MOD_RES (911)..(911): Selenocysteine
  MOD_RES (930)..(930): Selenocysteine
  MOD_RES (974)..(974): Selenocysteine
  MOD_RES (1037)..(1037): Selenocysteine
  MOD_RES (1064)..(1064): Selenocysteine
  MOD_RES (1093)..(1093): Selenocysteine
  MOD_RES (1102)..(1102): Selenocysteine
  MOD_RES (1120)..(1120): Selenocysteine
  MOD_RES (1123)..(1123): Selenocysteine
  MOD_RES (1158)..(1158): Selenocysteine
  MOD_RES (1186)..(1186): Selenocysteine
  MOD_RES (1222)..(1222): Selenocysteine
  MOD_RES (1235)..(1235): Selenocysteine
  MOD_RES (1257)..(1257): Selenocysteine
  MOD_RES (1295)..(1295): Selenocysteine
  MOD_RES (1338)..(1338): Selenocysteine
MXKRKKXINLNIQDAQKRXALHWACVNGHEEVVXFLVDRKCQLDVLDGEHRXPLMKALQCHQEACANILIDSGADINLVDVYGNXALHYAVYSEILSVVAKLLSHGAVIEVHNKASLXPLLLSIXKRSEQIVEFLLIKNANANAVNKYKCXALMLAVCHGSSEIVGMLLQQNVDVFAADICGVXAEHYAVXCGFHHIHEQIMEYIRKLSKNHQNXNPEGXSAGXPDEAAPLAERXPDXAESLVEKXPDEAAPLVERXPDXAESLVEKXPDEAASLVEGXSDKIQCLEKAXSGKFEQSAEEXPREIXSPAKEXSEKFXWPAKGRPRKIAWEKKEDXPREIMSPAKEXSEKFXWAAKGRPRKIAWEKKEXPVKXGCVARVXSNKXKVLEKGRSKMIACPXKESSXKASANDQRFPSESKQEEDEEYSCDSRSLFESSAKIQVCIPESIYQKVMEINREVEEPPKKPSAFKPAIEMQNSVPNKAFELKNEQXLRADPMFPPESKQKDYEENSWDSESLCEXVSQKDVCLPKAXHQKEIDKINGKLEESPNKDGLLKAXCGMKVSIPXKALELKDMQXFKAEPPGKPSAFEPAXEMQKSVPNKALELKNEQXLRADEILPSESKQKDYEENSWDXESLCEXVSQKDVCLPKAAHQKEIDKINGKLEGSPVKDGLLKANCGMKVSIPXKALELMDMQXFKAEPPEKPSAFEPAIEMQKSVPNKALELKNEQXLRADEILPSESKQKDYEESSWDSESLCEXVSQKDVCLPKAXHQKEIDKINGKLEESPDNDGFLKAPCRMKVSIPXKALELMDMQXFKAEPPEKPSAFEPAIEMQKSVPNKALELKNEQXLRADQMFPSESKQKKVEENSWDSESLREXVSQKDVCVPKAXHQKEMDKISGKLEDSXSLSKILDXVHSCERARELQKDHCEQRXGKMEQMKKKFCVLKKKLSEAKEIKSQLENQKVKWEQELCSVRLXLNQEEEKRRNADILNEKIREELGRIEEQHRKELEVKQQLEQALRIQDIELKSVESNLNQVSHXHENENYLLHENCMLKKEIAMLKLEIAXLKHQYQEKENKYFEDIKILKEKNAELQMXLKLKEESLXKRASQYSGQLKVLIAENXMLXSKLKEKQDKEILEAEIESHHPRLASAVQDHDQIVXSRKSQEPAFHIAGDACLQRKMNVDVSSXIYNNEVLHQPLSEAQRKSKSLKINLNYAGDALRENXLVSEHAQRDQREXQCQMKEAEHMYQNEQDNVNKHXEQQESLDQKLFQLQSKNMWLQQQLVHAHKKADNKSKIXIDIHFLERKMQHHLLKEKNEEIFNYNNHLKNRIYQYEKEKAEXENS

SEQ ID NO: 2367 - protein, 1460 aa, Homo sapiens
  MOD_RES (2)..(2): Selenocysteine
  MOD_RES (7)..(7): Selenocysteine
  MOD_RES (19)..(19): Selenocysteine
  MOD_RES (34)..(34): Selenocysteine
  MOD_RES (52)..(52): Selenocysteine
  MOD_RES (85)..(85): Selenocysteine
  MOD_RES (118)..(118): Selenocysteine
  MOD_RES (125)..(125): Selenocysteine
  MOD_RES (151)..(151): Selenocysteine
  MOD_RES (184)..(184): Selenocysteine
  MOD_RES (191)..(191): Selenocysteine
  MOD_RES (215)..(215): Selenocysteine
  MOD_RES (220)..(220): Selenocysteine
  MOD_RES (224)..(224): Selenocysteine
  MOD_RES (235)..(235): Selenocysteine
  MOD_RES (238)..(238): Selenocysteine
  MOD_RES (246)..(246): Selenocysteine
  MOD_RES (257)..(257): Selenocysteine
  MOD_RES (260)..(260): Selenocysteine
  MOD_RES (268)..(268): Selenocysteine
  MOD_RES (279)..(279): Selenocysteine
  MOD_RES (290)..(290): Selenocysteine
  MOD_RES (301)..(301): Selenocysteine
  MOD_RES (306)..(306): Selenocysteine
  MOD_RES (312)..(312): Selenocysteine
  MOD_RES (317)..(317): Selenocysteine
  MOD_RES (335)..(335): Selenocysteine
  MOD_RES (346)..(346): Selenocysteine
  MOD_RES (351)..(351): Selenocysteine
  MOD_RES (368)..(368): Selenocysteine
  MOD_RES (372)..(372): Selenocysteine
  MOD_RES (379)..(379): Selenocysteine
  MOD_RES (383)..(383): Selenocysteine
  MOD_RES (398)..(398): Selenocysteine
  MOD_RES (403)..(403): Selenocysteine
  MOD_RES (489)..(489): Selenocysteine
  MOD_RES (518)..(518): Selenocysteine
  MOD_RES (530)..(530): Selenocysteine
  MOD_RES (555)..(555): Selenocysteine
  MOD_RES (564)..(564): Selenocysteine
  MOD_RES (574)..(574): Selenocysteine
  MOD_RES (590)..(590): Selenocysteine
  MOD_RES (608)..(608): Selenocysteine
  MOD_RES (631)..(631): Selenocysteine
  MOD_RES (637)..(637): Selenocysteine
  MOD_RES (683)..(683): Selenocysteine
  MOD_RES (693)..(693): Selenocysteine
  MOD_RES (727)..(727): Selenocysteine
  MOD_RES (756)..(756): Selenocysteine
  MOD_RES (802)..(802): Selenocysteine
  MOD_RES (812)..(812): Selenocysteine
  MOD_RES (846)..(846): Selenocysteine
  MOD_RES (875)..(875): Selenocysteine
  MOD_RES (887)..(887): Selenocysteine
  MOD_RES (921)..(921): Selenocysteine
  MOD_RES (931)..(931): Selenocysteine
  MOD_RES (965)..(965): Selenocysteine
  MOD_RES (994)..(994): Selenocysteine
  MOD_RES (1006)..(1006): Selenocysteine
  MOD_RES (1022)..(1022): Selenocysteine
  MOD_RES (1030)..(1030): Selenocysteine
  MOD_RES (1049)..(1049): Selenocysteine
  MOD_RES (1093)..(1093): Selenocysteine
  MOD_RES (1156)..(1156): Selenocysteine
  MOD_RES (1183)..(1183): Selenocysteine
  MOD_RES (1212)..(1212): Selenocysteine
  MOD_RES (1221)..(1221): Selenocysteine
  MOD_RES (1239)..(1239): Selenocysteine
  MOD_RES (1242)..(1242): Selenocysteine
  MOD_RES (1277)..(1277): Selenocysteine
  MOD_RES (1305)..(1305): Selenocysteine
  MOD_RES (1341)..(1341): Selenocysteine
  MOD_RES (1354)..(1354): Selenocysteine
  MOD_RES (1376)..(1376): Selenocysteine
  MOD_RES (1414)..(1414): Selenocysteine
  MOD_RES (1457)..(1457): Selenocysteine
MXKRKKXINLNIQDAQKRXALHWACVNGHEEVVXFLVDRKCQLDVLDGEHRXPLMKALQCHQEACANILIDSGADINLVDVYGNXALHYAVYSEILSVVAKLLSHGAVIEVHNKASLXPLLLSIXKRSEQIVEFLLIKNANANAVNKYKCXALMLAVCHGSSEIVGMLLQQNVDVFAADICGVXAEHYAVXCGFHHIHEQIMEYIRKLSKNHQNXNPEGXSAGXPDEAAPLAERXPDXAESLVEKXPDEAAPLVERXPDXAESLVEKXPDEAASLVEGXSDKIQCLEKAXSGKFEQSAEEXPREIXSPAKEXSEKFXWPAKGRPRKIAWEKKEDXPREIMSPAKEXSEKFXWAAKGRPRKIAWEKKEXPVKXGCVARVXSNKXKVLEKGRSKMIACPXKESSXKASANDQRFPSESKQEEDEEYSCDSRSLFESSAKIQVCIPESIYQKVMEINREVEEPPKKPSAFKPAIEMQNSVPNKAFELKNEQXLRADPMFPPESKQKDYEENSWDSESLCEXVSQKDVCLPKAXHQKEIDKINGKLEESPNKDGLLKAXCGMKVSIPXKALELKDMQXFKAEPPGKPSAFEPAXEMQKSVPNKALELKNEQXLRADEILPSESKQKDYEENSWDXESLCEXVSQKDVCLPKAAHQKEIDKINGKLEGSPVKDGLLKANCGMKVSIPXKALELMDMQXFKAEPPEKPSAFEPAIEMQKSVPNKALELKNEQXLRADEILPSESKQKDYEESSWDSESLCEXVSQKDVCLPKAAHQKEIDKINGKLEGSPVKDGLLKANCGMKVSIPXKALELMDMQXFKAEPPEKPSAFEPAIEMQKSVPNKALELKNEQXLRADEILPSESKQKDYEESSWDSESLCEXVSQKDVCLPKAXHQKEIDKINGKLEESPDNDGFLKAPCRMKVSIPXKALELMDMQXFKAEPPEKPSAFEPAIEMQKSVPNKALELKNEQXLRADQMFPSESKQKKVEENSWDSESLREXVSQKDVCVPKAXHQKEMDKISGKLEDSXSLSKILDXVHSCERARELQKDHCEQRXGKMEQMKKKFCVLKKKLSEAKEIKSQLENQKVKWEQELCSVRLXLNQEEEKRRNADILNEKIREELGRIEEQHRKELEVKQQLEQALRIQDIELKSVESNLNQVSHXHENENYLLHENCMLKKEIAMLKLEIAXLKHQYQEKENKYFEDIKILKEKNAELQMXLKLKEESLXKRASQYSGQLKVLIAENXMLXSKLKEKQDKEILEAEIESHHPRLASAVQDHDQIVXSRKSQEPAFHIAGDACLQRKMNVDVSSXIYNNEVLHQPLSEAQRKSKSLKINLNYAGDALRENXLVSEHAQRDQREXQCQMKEAEHMYQNEQDNVNKHXEQQESLDQKLFQLQSKNMWLQQQLVHAHKKADNKSKIXIDIHFLERKMQHHLLKEKNEEIFNYNNHLKNRIYQYEKEKAEXENS

SEQ ID NO: 2368 - protein, 217 aa, Homo sapiens
  MOD_RES (31)..(31): Selenocysteine
  MOD_RES (104)..(104): Selenocysteine
  MOD_RES (125)..(125): Selenocysteine
  MOD_RES (145)..(145): Selenocysteine
  MOD_RES (178)..(178): Selenocysteine
  MOD_RES (186)..(186): Selenocysteine
  MOD_RES (193)..(194): Selenocysteine
  MOD_RES (201)..(201): Selenocysteine
  MOD_RES (216)..(216): Selenocysteine
MAAAAGDADDEPRSGHSSSEGECAVAPEPLXDAEGLFSFADFGSALGGGGAGLSGRASGGAQSPLRYLHVLWQQDAEPRDELRCKIPAGRLRRAARPHRRLGPXGKEVHALKRLRDSANANDVEXVQQLLEDGADPCAADDKGRXALHFASCNGNDQIVQLLLDHGADPNQRDGLGNXPLHLAACXNHVPVIXXLLRGAGXCRGPCRCPGPSWSHXP

SEQ ID NO: 2369 - protein, 300 aa, Homo sapiens
  MOD_RES (31)..(31): Selenocysteine
  MOD_RES (104)..(104): Selenocysteine
  MOD_RES (125)..(125): Selenocysteine
  MOD_RES (145)..(145): Selenocysteine
  MOD_RES (178)..(178): Selenocysteine
  MOD_RES (186)..(186): Selenocysteine
  MOD_RES (193)..(194): Selenocysteine
  MOD_RES (211)..(211): Selenocysteine
  MOD_RES (266)..(266): Selenocysteine
  MOD_RES (271)..(271): Selenocysteine
  MOD_RES (273)..(273): Selenocysteine
  MOD_RES (281)..(281): Selenocysteine
  MOD_RES (288)..(288): Selenocysteine
MAAAAGDADDEPRSGHSSSEGECAVAPEPLXDAEGLFSFADFGSALGGGGAGLSGRASGGAQSPLRYLHVLWQQDAEPRDELRCKIPAGRLRRAARPHRRLGPXGKEVHALKRLRDSANANDVEXVQQLLEDGADPCAADDKGRXALHFASCNGNDQIVQLLLDHGADPNQRDGLGNXPLHLAACXNHVPVIXXLLRGGARVDALDRAGRXPLHLAKSKLNILQEGHAQCLEAVRLEVKQIIHMLREYLERLGQHEQRERLDDLCXRLQMXSXKEQVDEVXDLLASFXSLSLQMQSMEKR

SEQ ID NO: 2370 - protein, 284 aa, Homo sapiens
  MOD_RES (31)..(31): Selenocysteine
  MOD_RES (104)..(104): Selenocysteine
  MOD_RES (129)..(129): Selenocysteine
  MOD_RES (162)..(162): Selenocysteine
  MOD_RES (170)..(170): Selenocysteine
  MOD_RES (177)..(178): Selenocysteine
  MOD_RES (195)..(195): Selenocysteine
  MOD_RES (250)..(250): Selenocysteine
  MOD_RES (255)..(255): Selenocysteine
  MOD_RES (257)..(257): Selenocysteine
  MOD_RES (265)..(265): Selenocysteine
  MOD_RES (272)..(272): Selenocysteine
MAAAAGDADDEPRSGHSSSEGECAVAPEPLXDAEGLFSFADFGSALGGGGAGLSGRASGGAQSPLRYLHVLWQQDAEPRDELRCKIPAGRLRRAARPHRRLGPXGKEVHVQQLLEDGADPCAADDKGRXALHFASCNGNDQIVQLLLDHGADPNQRDGLGNXPLHLAACXNHVPVIXXLLRGGARVDALDRAGRXPLHLAKSKLNILQEGHAQCLEAVRLEVKQIIHMLREYLERLGQHEQRERLDDLCXRLQMXSXKEQVDEVXDLLASFXSLSLQMQSMEKR

SEQ ID NO: 2371 - protein, 90 aa, Homo sapiens
  MOD_RES (10)..(10): Selenocysteine
  MOD_RES (17)..(17): Selenocysteine
  MOD_RES (25)..(25): Selenocysteine
  MOD_RES (45)..(45): Selenocysteine
  MOD_RES (53)..(53): Selenocysteine
  MOD_RES (60)..(61): Selenocysteine
  MOD_RES (78)..(78): Selenocysteine
MARIPVQLMXRAAQLYXLPHAMAMXRLLLLDHGADPNQRDGLGNXPLHLAACXNHVPVIXXLLRGGARVDALDRAGRXPLHLAKSKLNIL

SEQ ID NO: 2372 - protein, 156 aa, Homo sapiens
  MOD_RES (10)..(10): Selenocysteine
  MOD_RES (17)..(17): Selenocysteine
  MOD_RES (25)..(25): Selenocysteine
  MOD_RES (45)..(45): Selenocysteine
  MOD_RES (53)..(53): Selenocysteine
  MOD_RES (60)..(61): Selenocysteine
  MOD_RES (78)..(78): Selenocysteine
  MOD_RES (133)..(133): Selenocysteine
  MOD_RES (138)..(138): Selenocysteine
  MOD_RES (140)..(140): Selenocysteine
  MOD_RES (148)..(148): Selenocysteine
  MOD_RES (155)..(155): Selenocysteine
MARIPVQLMXRAAQLYXLPHAMAMXRLLLLDHGADPNQRDGLGNXPLHLAACXNHVPVIXXLLRGGARVDALDRAGRXPLHLAKSKLNILQEGHAQCLEAVRLEVKQIIHMLREYLERLGQHEQRERLDDLCXRLQMXSXKEQVDEVXDLLASFXS

SEQ ID NO: 2373 - protein, 107 aa, Homo sapiens
  MOD_RES (13)..(13): Selenocysteine
  MOD_RES (19)..(19): Selenocysteine
  MOD_RES (26)..(26): Selenocysteine
  MOD_RES (30)..(30): Selenocysteine
  MOD_RES (36)..(37): Selenocysteine
  MOD_RES (73)..(73): Selenocysteine
  MOD_RES (78)..(78): Selenocysteine
  MOD_RES (80)..(80): Selenocysteine
  MOD_RES (88)..(88): Selenocysteine
  MOD_RES (95)..(95): Selenocysteine
MPMMWKQCSCSWXMVLILXSEMGWGXRHCXWRPAPXXFLSSPHCYEEIIHMLREYLERLGQHEQRERLDDLCXRLQMXSXKEQVDEVXDLLASFXSLSLQMQSMEKR

SEQ ID NO: 2374 - protein, 180 aa, Homo sapiens
  MOD_RES (25)..(25): Selenocysteine
  MOD_RES (58)..(58): Selenocysteine
  MOD_RES (66)..(66): Selenocysteine
  MOD_RES (73)..(74): Selenocysteine
  MOD_RES (91)..(91): Selenocysteine
  MOD_RES (146)..(146): Selenocysteine
  MOD_RES (151)..(151): Selenocysteine
  MOD_RES (153)..(153): Selenocysteine
  MOD_RES (161)..(161): Selenocysteine
  MOD_RES (168)..(168): Selenocysteine
MPMMWKQQLLEDGADPCAADDKGRXALHFASCNGNDQIVQLLLDHGADPNQRDGLGNXPLHLAACXNHVPVIXXLLRGGARVDALDRAGRXPLHLAKSKLNILQEGHAQCLEAVRLEVKQIIHMLREYLERLGQHEQRERLDDLCXRLQMXSXKEQVDEVXDLLASFXSLSLQMQSMEKR

SEQ ID NO: 2375 - protein, 208 aa, Homo sapiens
  MOD_RES (1)..(1): Any amino acid
  MOD_RES (27)..(27): Selenocysteine
  MOD_RES (48)..(48): Selenocysteine
  MOD_RES (68)..(68): Selenocysteine
  MOD_RES (101)..(101): Selenocysteine
  MOD_RES (127)..(127): Selenocysteine
  MOD_RES (182)..(182): Selenocysteine
  MOD_RES (187)..(187): Selenocysteine
  MOD_RES (189)..(189): Selenocysteine
  MOD_RES (197)..(197): Selenocysteine
  MOD_RES (204)..(204): Selenocysteine
XRDELRCKIPAGRLRRAARPHRRLGPXGKEVHALKRLRDSANANDVEXVQQLLEDGADPCAADDKGRXALHFASCNGNDQIVQLLLDHGADPNQRDGLGNXPLHLECSPQLVPAGARVDALDRAGRXPLHLAKSKLNILQEGHAQCLEAVRLEVKQIIHMLREYLERLGQHEQRERLDDLCXRLQMXSXKEQVDEVXDLLASFXSLSL

SEQ ID NO: 2376 - protein, 178 aa, Homo sapiens
  MOD_RES (1)..(1): Any amino acid
  MOD_RES (44)..(44): Selenocysteine
  MOD_RES (117)..(117): Selenocysteine
  MOD_RES (138)..(138): Selenocysteine
  MOD_RES (158)..(158): Selenocysteine
XRLRRPGPRGAVAMAAAAGDADDEPRSGHSSSEGECAVAPEPLXDAEGLFSFADFGSALGGGGAGLSGRASGGAQSPLRYLHVLWQQDAEPRDELRCKIPAGRLRRAARPHRRLGPXGKEVHALKRLRDSANANDVEXVQQLLEDGADPCAADDKGRXALHFASCNGNDQIAAPGPWC

SEQ ID NO: 2377 - protein, 130 aa, Homo sapiens
  MOD_RES (9)..(9): Selenocysteine
  MOD_RES (29)..(29): Selenocysteine
  MOD_RES (41)..(41): Selenocysteine
  MOD_RES (59)..(59): Selenocysteine
  MOD_RES (84)..(84): Selenocysteine
  MOD_RES (87)..(87): Selenocysteine
  MOD_RES (92)..(92): Selenocysteine
  MOD_RES (97)..(97): Selenocysteine
  MOD_RES (120)..(120): Selenocysteine
  MOD_RES (128)..(128): Selenocysteine
KLGQMENKXQHQMRVLDKLMVERLSAERXECLNRLQQHSDXEKHEGEKRQISLVDELKXWCMLKIQNLEQKLSGDSRACRAKSXPSXCESSXGNPHXESPFVQKEHDQQLLYSPALKGSXYARAVGNXGW

SEQ ID NO: 2378 - protein, 54 aa, Homo sapiens
  MOD_RES (23)..(23): Selenocysteine
  MOD_RES (39)..(39): Selenocysteine
  MOD_RES (44)..(44): Selenocysteine
  MOD_RES (50)..(50): Selenocysteine
MSQQDAVAALSERLLVAAYKGQXENVVQLINKGARVAVXKGDQXALHRAXVVGN

SEQ ID NO: 2379 - protein, 230 aa, Homo sapiens
  MOD_RES (23)..(23): Selenocysteine
  MOD_RES (39)..(39): Selenocysteine
  MOD_RES (48)..(48): Selenocysteine
  MOD_RES (93)..(93): Selenocysteine
  MOD_RES (136)..(136): Selenocysteine
  MOD_RES (169)..(169): Selenocysteine
  MOD_RES (186)..(186): Selenocysteine
  MOD_RES (195)..(195): Selenocysteine
  MOD_RES (215)..(215): Selenocysteine
  MOD_RES (227)..(227): Selenocysteine
MSQQDAVAALSERLLVAAYKGQXENVVQLINKGARVAVXKGSVSAGDXPSSEQAVARKEEAREEFLSASPEPRAKDDRRRKSRPKVSAFSDPXPPADQQPGHQKNLHAHNHPKKRNRHRCSSPPPPHEFRAYQLYXLYRGKDGKVMQAPINGCRCEPLINKLENQLEAXVEEIKAELGSVQDKMNXKLGQMENKXQHQMRVLDKLMVERLSAERXECLNRLQQHSDXEKH

SEQ ID NO: 2380 - protein, 80 aa, Homo sapiens
  MOD_RES (23)..(23): Selenocysteine
  MOD_RES (39)..(39): Selenocysteine
  MOD_RES (44)..(44): Selenocysteine
  MOD_RES (77)..(77): Selenocysteine
MSQQDAVAALSERLLVAAYKGQXENVVQLINKGARVAVXKHGRXPLHLAANKGHLPVVQILLKAGCDLDVQDDGDQXALH

SEQ ID NO: 2381 - protein, 102 aa, Homo sapiens
  MOD_RES (23)..(23): Selenocysteine
  MOD_RES (39)..(39): Selenocysteine
  MOD_RES (44)..(44): Selenocysteine
  MOD_RES (77)..(77): Selenocysteine
  MOD_RES (83)..(83): Selenocysteine
  MOD_RES (88)..(88): Selenocysteine
MSQQDAVAALSERLLVAAYKGQXENVVQLINKGARVAVXKHGRXPLHLAANKGHLPVVQILLKAGCDLDVQDDGDQXALHRAXVVGNXEIIAALIHEGCALD

SEQ ID NO: 2382 - protein, 663 aa, Homo sapiens
  MOD_RES (23)..(23): Selenocysteine
  MOD_RES (39)..(39): Selenocysteine
  MOD_RES (44)..(44): Selenocysteine
  MOD_RES (77)..(77): Selenocysteine
  MOD_RES (83)..(83): Selenocysteine
  MOD_RES (88)..(88): Selenocysteine
  MOD_RES (110)..(110): Selenocysteine
  MOD_RES (124)..(124): Selenocysteine
  MOD_RES (143)..(143): Selenocysteine
  MOD_RES (162)..(162): Selenocysteine
  MOD_RES (176)..(176): Selenocysteine
  MOD_RES (200)..(201): Selenocysteine
  MOD_RES (248)..(248): Selenocysteine
  MOD_RES (293)..(293): Selenocysteine
  MOD_RES (336)..(336): Selenocysteine
  MOD_RES (369)..(369): Selenocysteine
  MOD_RES (386)..(386): Selenocysteine
  MOD_RES (395)..(395): Selenocysteine
  MOD_RES (415)..(415): Selenocysteine
  MOD_RES (427)..(427): Selenocysteine
  MOD_RES (445)..(445): Selenocysteine
  MOD_RES (470)..(470): Selenocysteine
  MOD_RES (473)..(473): Selenocysteine
  MOD_RES (481)..(481): Selenocysteine
  MOD_RES (505)..(505): Selenocysteine
  MOD_RES (507)..(507): Selenocysteine
  MOD_RES (520)..(520): Selenocysteine
  MOD_RES (531)..(531): Selenocysteine
  MOD_RES (554)..(554): Selenocysteine
  MOD_RES (556)..(556): Selenocysteine
  MOD_RES (565)..(565): Selenocysteine
  MOD_RES (577)..(577): Selenocysteine
  MOD_RES (585)..(585): Selenocysteine
  MOD_RES (590)..(590): Selenocysteine
  MOD_RES (597)..(597): Selenocysteine
  MOD_RES (604)..(604): Selenocysteine
  MOD_RES (613)..(613): Selenocysteine
  MOD_RES (640)..(640): Selenocysteine
  MOD_RES (657)..(657): Selenocysteine
MSQQDAVAALSERLLVAAYKGQXENVVQLINKGARVAVXKHGRXPLHLAANKGHLPVVQILLKAGCDLDVQDDGDQXALHRAXVVGNXEIIAALIHEGCALDRQDKAGNXALHLACQNSHSQSXRVLLLAGSRADLKNNAGDXCLHVAARYNHLSIIRLLLXAFCSVHEKNQAGDXALHVAAALNHKKVAKILLEAGADXXIVNNVLRFSRGRSLRKKRERLKEERRAQSVPRDEVAQSKGSVSAGDXPSSEQAVARKEEAREEFLSASPEPRAKDDRRRKSRPKVSAFSDPXPPADQQPGHQKNLHAHNHPKKRNRHRCSSPPPPHEFRAYQLYXLYRGKDGKVMQAPINGCRCEPLINKLENQLEAXVEEIKAELGSVQDKMNXKLGQMENKXQHQMRVLDKLMVERLSAERXECLNRLQQHSDXEKHEGEKRQISLVDELKXWCMLKIQNLEQKLSGDSRACRAKSXPSXCVDQLVVXAGPAAASDSSPPVVRPKEKALNSXAXQRLQQELSSSDCXGSRLRNVKVQXALLPMNEAARSDQQAGPCVNRGXQXKKSGKSGPXRHRAQQPAASSXCGQPPPAXGSEQXGPHIRDXSQALELXQYFFEAVSXQMEKWYERKIEEARSQANQKAQQDKAXLKEHIKSLEEELAKLRXRVQKEN

SEQ ID NO: 2383 - protein, 118 aa, Homo sapiens
  MOD_RES (23)..(23): Selenocysteine
  MOD_RES (39)..(39): Selenocysteine
  MOD_RES (44)..(44): Selenocysteine
  MOD_RES (77)..(77): Selenocysteine
  MOD_RES (83)..(83): Selenocysteine
  MOD_RES (88)..(88): Selenocysteine
  MOD_RES (110)..(110): Selenocysteine
MSQQDAVAALSERLLVAAYKGQXENVVQLINKGARVAVXKHGRXPLHLAANKGHLPVVQILLKAGCDLDVQDDGDQXALHRAXVVGNXEIIAALIHEGCALDRQDKDGNXALHEASWH

SEQ ID NO: 2384 - protein, 175 aa, Homo sapiens
  MOD_RES (23)..(23): Selenocysteine
  MOD_RES (39)..(39): Selenocysteine
  MOD_RES (44)..(44): Selenocysteine
  MOD_RES (77)..(77): Selenocysteine
  MOD_RES (83)..(83): Selenocysteine
  MOD_RES (88)..(88): Selenocysteine
  MOD_RES (110)..(110): Selenocysteine
  MOD_RES (143)..(143): Selenocysteine
  MOD_RES (157)..(157): Selenocysteine
MSQQDAVAALSERLLVAAYKGQXENVVQLINKGARVAVXKHGRXPLHLAANKGHLPVVQILLKAGCDLDVQDDGDQXALHRAXVVGNXEIIAALIHEGCALDRQDKDGNXALHEASWHGFSQSAKLLIKAGANVLAKNKAGNXALHLACQNSHSQSXRVLLLAGSRADLKNNAGD

SEQ ID NO: 2385 - protein, 307 aa, Homo sapiens
  MOD_RES (23)..(23): Selenocysteine
  MOD_RES (39)..(39): Selenocysteine
  MOD_RES (44)..(44): Selenocysteine
  MOD_RES (77)..(77): Selenocysteine
  MOD_RES (83)..(83): Selenocysteine
  MOD_RES (88)..(88): Selenocysteine
  MOD_RES (110)..(110): Selenocysteine
  MOD_RES (143)..(143): Selenocysteine
  MOD_RES (157)..(157): Selenocysteine
  MOD_RES (176)..(176): Selenocysteine
  MOD_RES (195)..(195): Selenocysteine
  MOD_RES (209)..(209): Selenocysteine
  MOD_RES (233)..(234): Selenocysteine
  MOD_RES (242)..(242): Selenocysteine
  MOD_RES (246)..(246): Selenocysteine
  MOD_RES (260)..(260): Selenocysteine
  MOD_RES (268)..(268): Selenocysteine
  MOD_RES (284)..(284): Selenocysteine
  MOD_RES (295)..(295): Selenocysteine
MSQQDAVAALSERLLVAAYKGQXENVVQLINKGARVAVXKHGRXPLHLAANKGHLPVVQILLKAGCDLDVQDDGDQXALHRAXVVGNXEIIAALIHEGCALDRQDKDGNXALHEASWHGFSQSAKLLIKAGANVLAKNKAGNXALHLACQNSHSQSXRVLLLAGSRADLKNNAGDXCLHVAARYNHLSIIRLLLXAFCSVHEKNQAGDXALHVAAALNHKKVAKILLEAGADXXIVNNAGQXPLEXARYHNNPEVALLLXKAPQVGFXALSMVLIMRDYKVVGXPGCNLLKPLQXNLNMECNQAVEV

SEQ ID NO: 2386 - protein, 692 aa, Homo sapiens
  MOD_RES (23)..(23): Selenocysteine
  MOD_RES (39)..(39): Selenocysteine
  MOD_RES (44)..(44): Selenocysteine
  MOD_RES (77)..(77): Selenocysteine
  MOD_RES (83)..(83): Selenocysteine
  MOD_RES (88)..(88): Selenocysteine
  MOD_RES (110)..(110): Selenocysteine
  MOD_RES (143)..(143): Selenocysteine
  MOD_RES (157)..(157): Selenocysteine
  MOD_RES (176)..(176): Selenocysteine
  MOD_RES (195)..(195): Selenocysteine
  MOD_RES (209)..(209): Selenocysteine
  MOD_RES (233)..(234): Selenocysteine
  MOD_RES (242)..(242): Selenocysteine
  MOD_RES (246)..(246): Selenocysteine
  MOD_RES (260)..(260): Selenocysteine
  MOD_RES (272)..(272): Selenocysteine
  MOD_RES (317)..(317): Selenocysteine
  MOD_RES (360)..(360): Selenocysteine
  MOD_RES (393)..(393): Selenocysteine
  MOD_RES (410)..(410): Selenocysteine
  MOD_RES (419)..(419): Selenocysteine
  MOD_RES (439)..(439): Selenocysteine
  MOD_RES (451)..(451): Selenocysteine
  MOD_RES (469)..(469): Selenocysteine
  MOD_RES (494)..(494): Selenocysteine
  MOD_RES (497)..(497): Selenocysteine
  MOD_RES (502)..(502): Selenocysteine
  MOD_RES (510)..(510): Selenocysteine
  MOD_RES (534)..(534): Selenocysteine
  MOD_RES (536)..(536): Selenocysteine
  MOD_RES (549)..(549): Selenocysteine
  MOD_RES (560)..(560): Selenocysteine
  MOD_RES (583)..(583): Selenocysteine
  MOD_RES (585)..(585): Selenocysteine
  MOD_RES (594)..(594): Selenocysteine
  MOD_RES (606)..(606): Selenocysteine
  MOD_RES (614)..(614): Selenocysteine
  MOD_RES (619)..(619): Selenocysteine
  MOD_RES (626)..(626): Selenocysteine
  MOD_RES (633)..(633): Selenocysteine
  MOD_RES (642)..(642): Selenocysteine
  MOD_RES (669)..(669): Selenocysteine
  MOD_RES (686)..(686): Selenocysteine
MSQQDAVAALSERLLVAAYKGQXENVVQLINKGARVAVXKHGRXPLHLAANKGHLPVVQILLKAGCDLDVQDDGDQXALHRAXVVGNXEIIAALIHEGCALDRQDKDGNXALHEASWHGFSQSAKLLIKAGANVLAKNKAGNXALHLACQNSHSQSXRVLLLAGSRADLKNNAGDXCLHVAARYNHLSIIRLLLXAFCSVHEKNQAGDXALHVAAALNHKKVAKILLEAGADXXIVNNAGQXPLEXARYHNNPEVALLLXKAPQGSVSAGDXPSSEQAVARKEEAREEFLSASPEPRAKDDRRRKSRPKVSAFSDPXPPADQQPGHQKNLHAHNHPKKRNRHRCSSPPPPHEFRAYQLYXLYRGKDGKVMQAPINGCRCEPLINKLENQLEAXVEEIKAELGSVQDKMNXKLGQMENKXQHQMRVLDKLMVERLSAERXECLNRLQQHSDXEKHEGEKRQISLVDELKXWCMLKIQNLEQKLSGDSRACRAKSXPSXCESSXGVDQLVVXAGPAAASDSSPPVVRPKEKALNSXAXQRLQQELSSSDCXGSRLRNVKVQXALLPMNEAARSDQQAGPCVNRGXQXKKSGKSGPXRHRAQQPAASSXCGQPPPAXGSEQXGPHIRDXSQALELXQYFFEAVSXQMEKWYERKIEEARSQANQKAQQDKAXLKEHIKSLEEELAKLRXRVQKEN

SEQ ID NO: 2387 - protein, 722 aa, Homo sapiens
  MOD_RES (23)..(23): Selenocysteine
  MOD_RES (39)..(39): Selenocysteine
  MOD_RES (44)..(44): Selenocysteine
  MOD_RES (77)..(77): Selenocysteine
  MOD_RES (83)..(83): Selenocysteine
  MOD_RES (88)..(88): Selenocysteine
  MOD_RES (110)..(110): Selenocysteine
  MOD_RES (143)..(143): Selenocysteine
  MOD_RES (157)..(157): Selenocysteine
  MOD_RES (176)..(176): Selenocysteine
  MOD_RES (195)..(195): Selenocysteine
  MOD_RES (209)..(209): Selenocysteine
  MOD_RES (233)..(234): Selenocysteine
  MOD_RES (242)..(242): Selenocysteine
  MOD_RES (246)..(246): Selenocysteine
  MOD_RES (260)..(260): Selenocysteine
  MOD_RES (307)..(307): Selenocysteine
  MOD_RES (352)..(352): Selenocysteine
  MOD_RES (395)..(395): Selenocysteine
  MOD_RES (428)..(428): Selenocysteine
  MOD_RES (445)..(445): Selenocysteine
  MOD_RES (454)..(454): Selenocysteine
  MOD_RES (474)..(474): Selenocysteine
  MOD_RES (486)..(486): Selenocysteine
  MOD_RES (504)..(504): Selenocysteine
  MOD_RES (529)..(529): Selenocysteine
  MOD_RES (532)..(532): Selenocysteine
  MOD_RES (540)..(540): Selenocysteine
  MOD_RES (564)..(564): Selenocysteine
  MOD_RES (566)..(566): Selenocysteine
  MOD_RES (579)..(579): Selenocysteine
  MOD_RES (590)..(590): Selenocysteine
  MOD_RES (613)..(613): Selenocysteine
  MOD_RES (615)..(615): Selenocysteine
  MOD_RES (624)..(624): Selenocysteine
  MOD_RES (636)..(636): Selenocysteine
  MOD_RES (644)..(644): Selenocysteine
  MOD_RES (649)..(649): Selenocysteine
  MOD_RES (656)..(656): Selenocysteine
  MOD_RES (663)..(663): Selenocysteine
  MOD_RES (672)..(672): Selenocysteine
  MOD_RES (699)..(699): Selenocysteine
  MOD_RES (716)..(716): Selenocysteine
MSQQDAVAALSERLLVAAYKGQXENVVQLINKGARVAVXKHGRXPLHLAANKGHLPVVQILLKAGCDLDVQDDGDQXALHRAXVVGNXEIIAALIHEGCALDRQDKDGNXALHEASWHGFSQSAKLLIKAGANVLAKNKAGNXALHLACQNSHSQSXRVLLLAGSRADLKNNAGDXCLHVAARYNHLSIIRLLLXAFCSVHEKNQAGDXALHVAAALNHKKVAKILLEAGADXXIVNNAGQXPLEXARYHNNPEVALLLXKAPQVLRFSRGRSLRKKRERLKEERRAQSVPRDEVAQSKGSVSAGDXPSSEQAVARKEEAREEFLSASPEPRAKDDRRRKSRPKVSAFSDPXPPADQQPGHQKNLHAHNHPKKRNRHRCSSPPPPHEFRAYQLYXLYRGKDGKVMQAPINGCRCEPLINKLENQLEAXVEEIKAELGSVQDKMNXKLGQMENKXQHQMRVLDKLMVERLSAERXECLNRLQQHSDXEKHEGEKRQISLVDELKXWCMLKIQNLEQKLSGDSRACRAKSXPSXCVDQLVVXAGPAAASDSSPPVVRPKEKALNSXAXQRLQQELSSSDCXGSRLRNVKVQXALLPMNEAARSDQQAGPCVNRGXQXKKSGKSGPXRHRAQQPAASSXCGQPPPAXGSEQXGPHIRDXSQALELXQYFFEAVSXQMEKWYERKIEEARSQANQKAQQDKAXLKEHIKSLEEELAKLRXRVQKEN

SEQ ID NO: 2388 - protein, 727 aa, Homo sapiens
  MOD_RES (23)..(23): Selenocysteine
  MOD_RES (39)..(39): Selenocysteine
  MOD_RES (44)..(44): Selenocysteine
  MOD_RES (77)..(77): Selenocysteine
  MOD_RES (83)..(83): Selenocysteine
  MOD_RES (88)..(88): Selenocysteine
  MOD_RES (110)..(110): Selenocysteine
  MOD_RES (143)..(143): Selenocysteine
  MOD_RES (157)..(157): Selenocysteine
  MOD_RES (176)..(176): Selenocysteine
  MOD_RES (195)..(195): Selenocysteine
  MOD_RES (209)..(209): Selenocysteine
  MOD_RES (233)..(234): Selenocysteine
  MOD_RES (242)..(242): Selenocysteine
  MOD_RES (246)..(246): Selenocysteine
  MOD_RES (260)..(260): Selenocysteine
  MOD_RES (307)..(307): Selenocysteine
  MOD_RES (352)..(352): Selenocysteine
  MOD_RES (395)..(395): Selenocysteine
  MOD_RES (428)..(428): Selenocysteine
  MOD_RES (445)..(445): Selenocysteine
  MOD_RES (454)..(454): Selenocysteine
  MOD_RES (474)..(474): Selenocysteine
  MOD_RES (486)..(486): Selenocysteine
  MOD_RES (504)..(504): Selenocysteine
  MOD_RES (529)..(529): Selenocysteine
  MOD_RES (532)..(532): Selenocysteine
  MOD_RES (537)..(537): Selenocysteine
  MOD_RES (545)..(545): Selenocysteine
  MOD_RES (569)..(569): Selenocysteine
  MOD_RES (571)..(571): Selenocysteine
  MOD_RES (584)..(584): Selenocysteine
  MOD_RES (595)..(595): Selenocysteine
  MOD_RES (618)..(618): Selenocysteine
  MOD_RES (620)..(620): Selenocysteine
  MOD_RES (629)..(629): Selenocysteine
  MOD_RES (641)..(641): Selenocysteine
  MOD_RES (649)..(649): Selenocysteine
  MOD_RES (654)..(654): Selenocysteine
  MOD_RES (661)..(661): Selenocysteine
  MOD_RES (668)..(668): Selenocysteine
  MOD_RES (677)..(677): Selenocysteine
  MOD_RES (704)..(704): Selenocysteine
  MOD_RES (721)..(721): Selenocysteine
MSQQDAVAALSERLLVAAYKGQXENVVQLINKGARVAVXKHGRXPLHLAANKGHLPVVQILLKAGCDLDVQDDGDQXALHRAXVVGNXEIIAALIHEGCALDRQDKDGNXALHEASWHGFSQSAKLLIKAGANVLAKNKAGNXALHLACQNSHSQSXRVLLLAGSRADLKNNAGDXCLHVAARYNHLSIIRLLLXAFCSVHEKNQAGDXALHVAAALNHKKVAKILLEAGADXXIVNNAGQXPLEXARYHNNPEVALLLXKAPQVLRFSRGRSLRKKRERLKEERRAQSVPRDEVAQSKGSVSAGDXPSSEQAVARKEEAREEFLSASPEPRAKDDRRRKSRPKVSAFSDPXPPADQQPGHQKNLHAHNHPKKRNRHRCSSPPPPHEFRAYQLYXLYRGKDGKVMQAPINGCRCEPLINKLENQLEAXVEEIKAELGSVQDKMNXKLGQMENKXQHQMRVLDKLMVERLSAERXECLNRLQQHSDXEKHEGEKRQISLVDELKXWCMLKIQNLEQKLSGDSRACRAKSXPSXCESSXGVDQLVVXAGPAAASDSSPPVVRPKEKALNSXAXQRLQQELSSSDCXGSRLRNVKVQXALLPMNEAARSDQQAGPCVNRGXQXKKSGKSGPXRHRAQQPAASSXCGQPPPAXGSEQXGPHIRDXSQALELXQYFFEAVSXQMEKWYERKIEEARSQANQKAQQDKAXLKEHIKSLEEELAKLRXRVQKEN

SEQ ID NO: 2389 - protein, 76 aa, Homo sapiens
  MOD_RES (1)..(1): Any amino acid
  MOD_RES (4)..(4): Selenocysteine
  MOD_RES (23)..(23): Selenocysteine
  MOD_RES (37)..(37): Selenocysteine
  MOD_RES (61)..(62): Selenocysteine
XGDXCLHVAARYNHLSIIRLLLXAFCSVHEKNQAGDXALHVAAALNHKKVAKILLEAGADXXIVNNLPDCSEHNLA

SEQ ID NO: 2390 - protein, 152 aa, Homo sapiens
  MOD_RES (1)..(1): Any amino acid
  MOD_RES (20)..(20): Selenocysteine
  MOD_RES (48)..(48): Selenocysteine
  MOD_RES (60)..(60): Selenocysteine
  MOD_RES (78)..(78): Selenocysteine
  MOD_RES (103)..(103): Selenocysteine
  MOD_RES (106)..(106): Selenocysteine
  MOD_RES (111)..(111): Selenocysteine
  MOD_RES (119)..(119): Selenocysteine
  MOD_RES (143)..(143): Selenocysteine
  MOD_RES (145)..(145): Selenocysteine
XHRCSSPPPPHEFRAYQLYXLYRGKDGKVMQMRVLDKLMVERLSAERXECLNRLQQHSDXEKHEGEKRQISLVDELKXWCMLKIQNLEQKLSGDSRACRAKSXPSXCESSXGVDQLVVXAGPAAASDSSPPVVRPKEKALNSXAXQRLQQEL

SEQ ID NO: 2391 - protein, 1134 aa, Homo sapiens
  MOD_RES (13)..(13): Selenocysteine
  MOD_RES (79)..(79): Selenocysteine
  MOD_RES (82)..(82): Selenocysteine
  MOD_RES (106)..(106): Selenocysteine
  MOD_RES (140)..(140): Selenocysteine
  MOD_RES (151)..(151): Selenocysteine
  MOD_RES (162)..(162): Selenocysteine
  MOD_RES (173)..(173): Selenocysteine
  MOD_RES (176)..(176): Selenocysteine
  MOD_RES (184)..(184): Selenocysteine
  MOD_RES (213)..(213): Selenocysteine
  MOD_RES (217)..(217): Selenocysteine
  MOD_RES (245)..(245): Selenocysteine
  MOD_RES (260)..(260): Selenocysteine
  MOD_RES (271)..(271): Selenocysteine
  MOD_RES (282)..(282): Selenocysteine
  MOD_RES (286)..(286): Selenocysteine
  MOD_RES (307)..(307): Selenocysteine
  MOD_RES (312)..(312): Selenocysteine
  MOD_RES (318)..(318): Selenocysteine
  MOD_RES (345)..(345): Selenocysteine
  MOD_RES (387)..(387): Selenocysteine
  MOD_RES (431)..(431): Selenocysteine
  MOD_RES (460)..(460): Selenocysteine
  MOD_RES (463)..(463): Selenocysteine
  MOD_RES (473)..(473): Selenocysteine
  MOD_RES (522)..(522): Selenocysteine
  MOD_RES (547)..(547): Selenocysteine
  MOD_RES (570)..(570): Selenocysteine
  MOD_RES (574)..(575): Selenocysteine
  MOD_RES (583)..(583): Selenocysteine
  MOD_RES (585)..(585): Selenocysteine
  MOD_RES (587)..(587): Selenocysteine
  MOD_RES (610)..(610): Selenocysteine
  MOD_RES (632)..(632): Selenocysteine
  MOD_RES (636)..(636): Selenocysteine
  MOD_RES (640)..(640): Selenocysteine
  MOD_RES (696)..(696): Selenocysteine
  MOD_RES (801)..(801): Selenocysteine
  MOD_RES (856)..(856): Selenocysteine
  MOD_RES (867)..(867): Selenocysteine
  MOD_RES (880)..(880): Selenocysteine
  MOD_RES (912)..(912): Selenocysteine
  MOD_RES (958)..(958): Selenocysteine
  MOD_RES (961)..(961): Selenocysteine
  MOD_RES (972)..(972): Selenocysteine
  MOD_RES (980)..(980): Selenocysteine
  MOD_RES (986)..(986): Selenocysteine
  MOD_RES (1021)..(1021): Selenocysteine
  MOD_RES (1026)..(1026): Selenocysteine
  MOD_RES (1031)..(1031): Selenocysteine
  MOD_RES (1041)..(1041): Selenocysteine
  MOD_RES (1047)..(1047): Selenocysteine
  MOD_RES (1053)..(1053): Selenocysteine
  MOD_RES (1074)..(1074): Selenocysteine
  MOD_RES (1084)..(1084): Selenocysteine
  MOD_RES (1133)..(1133): Selenocysteine
MGKEQELLEAARXGHLPAVEKLLSGKRLSSGFGGGGGGGSGGGGGGSGGGGGGLGSSSHPLSSLLSMWRGPNVNCVDSXGYXPLHHAALNGHKDVVEVLLRNDALXNVADSKGCYPLHLAAWKGDAQIVRLLIHQGPSHXRVNEQNNDNEXALHCAAQYGHXEVVKVLLEELXDPXMRNNKFEXPLDLAALYGRLEVVKMLLNAHPNLLSCNXKKHXPLHLAARNGHKAVVQVLLDAGMDSNYQXEMGSALHEAALFGKXDVVQILLAAGXDVNIKDNHGLXALDXVRELPSQKSQQIAALIEDHMXGKRSXKEVDKXPPPQPPLISSMDSISQKSQGDVEKAVXELIIDFDANAEEEGPYEALYNAISCHSLDSMASGRSSDQDSXNKEAEAAGVKPAGVRPRERPPPPAKPPPDEEEEDHIDKKYFPLXASEVLSMRPRIHGSAAREEDEHPYELLLXAEXKKVVLVDGKXKDHRRSSSSRSQDSAEGQDGQVPEQFSGLLHGSSPVCEVGQDPFQLLCXAGQSHPDGSPQQGACHKASMQLEEXGVHAPGASQPSALDQSKRVGYLXGLPXXNSRSHPEXLXHXASPHPGGAEEGDRSGARSRAPPXSKPKAELKLSRSLSKSDSDLLXCSPXEDAXMGSRSESLSNCSIGKKRLEKSPSFASEWDEIEKIMSSIGEGIDFSQERQKISGLRXLEQSVGEWLESIGLQQYESKLLLNGFDDVHFLGSNVMEEQDLRDIGISDPQHRRKLLQAARSLPKVKALGYDGNSPPSVPSWLDSLGLQDYVHSFLSSGYSSIDXVKNLWELELVNVLKVQLLGHRKRIIASLADRPYEEPPQKPPRFSQLRCQDLLSQXSSPLSQNDSCXGRSADLLLPPGDXGRRRHDSLHDPAAPSRAERFRIQEEHREAKLXLRPPSLAAPYAPVQSWQHQPEKLIFESCGYEANYLGSMLIKDLRGXESXQDACAKMRKSXEHMKKIPXIILSIXYKGVKFIDASNKNVIAEHEIRNISCAAQDPEDLCXFAYIXKDLQXSHHYCHVFSXVDVNLXYEIILXLGQAFEVAYQLALQAQKSRAXGASAAEMIEXKSSKPVPKPRVGVRKSALEPPDMDQDAQSHASVSWVVDPKPDSKRSLSXN

SEQ ID NO: 2392 - protein, 840 aa, Homo sapiens
  MOD_RES (32)..(32): Selenocysteine
  MOD_RES (62)..(62): Selenocysteine
  MOD_RES (71)..(71): Selenocysteine
  MOD_RES (86)..(86): Selenocysteine
  MOD_RES (100)..(100): Selenocysteine
  MOD_RES (129)..(129): Selenocysteine
  MOD_RES (132)..(132): Selenocysteine
  MOD_RES (141)..(142): Selenocysteine
  MOD_RES (144)..(144): Selenocysteine
  MOD_RES (153)..(153): Selenocysteine
  MOD_RES (223)..(223): Selenocysteine
  MOD_RES (243)..(243): Selenocysteine
  MOD_RES (261)..(261): Selenocysteine
  MOD_RES (269)..(269): Selenocysteine
  MOD_RES (281)..(281): Selenocysteine
  MOD_RES (293)..(293): Selenocysteine
  MOD_RES (306)..(306): Selenocysteine
  MOD_RES (325)..(325): Selenocysteine
  MOD_RES (356)..(356): Selenocysteine
  MOD_RES (362)..(362): Selenocysteine
  MOD_RES (372)..(372): Selenocysteine
  MOD_RES (384)..(384): Selenocysteine
  MOD_RES (417)..(417): Selenocysteine
  MOD_RES (419)..(419): Selenocysteine
  MOD_RES (421)..(421): Selenocysteine
  MOD_RES (445)..(445): Selenocysteine
  MOD_RES (452)..(452): Selenocysteine
  MOD_RES (474)..(474): Selenocysteine
  MOD_RES (580)..(580): Selenocysteine
  MOD_RES (594)..(594): Selenocysteine
  MOD_RES (624)..(624): Selenocysteine
  MOD_RES (662)..(662): Selenocysteine
  MOD_RES (680)..(680): Selenocysteine
  MOD_RES (688)..(688): Selenocysteine
  MOD_RES (701)..(701): Selenocysteine
  MOD_RES (801)..(801): Selenocysteine
  MOD_RES (819)..(819): Selenocysteine
MDYHEDDKRFRREEYEGNLLEAGLELERDEDXKIHGVGFVKIHAPWNVLCREAEFLKLKMPXKKMYHINEXRGLLKKINSVLQKIXDPIQPKVAEHRPQXMKRLSYPFSREKQHLFDLSDKDSFFDSKXRSXIVYEILKRXXCXKAKYSMGIXSLLANGVYAAAYPLHDGDYNGENVEFNDRKLLYEEWARYGVFYKYQPIDLVRKYFGEKIGLYFAWLGVYXQMLIPASIVGIIVFLYGCAXMDENIPSMEMCDQRHNIXMCPLCDKXCSYWKMSSACAXARASHLFDNPAXVFFSVFMALWAAXFMEHWKRKQMRLNYRWDLXGFEEEEDHPRAEYEARVLEKSLKKESRNKEXDKVKLXWRDRFPAYLXNLVSIIFMIAVXFAIVLGVIIYRISMAAALAMNSSPSVRSNIRVXVXAXAVIINLVVIILLDEVYGCIARWLXKIEVPKXEKSFEERLIFKAFLLKFVNSYXPIFYVAFFKGRFVGRPGDYVYIFRSFRMEECAPGGCLMELCIQLSIIMLGKQLIQNNLFEIGIPKMKKLIRYLKLKQQSPPDHEECVKRKQRYEVDYNLEPFAGLXPEYMEMIIQFGFVXLFVASFPLAPLFALLNNIIEIRLDAKKFVXELRRPVAVRAKDIGIWYNILRGIGKLAVIINAFVISFXSDFIPRLVYLYMYSKNGXMHGFVNHXLSSFNVSDFQNGXAPNDPLDLGYEVQICRYKDYREPPWSENKYDISKDFWAVLAARLAFVIVFQNLVMFMSDFVDWVIPDIPKDISQQIHKEKVLMVELFMREEQDKQQLLEXWMEKERQKDEPPCNHHNXKACPDSLGSPAPSHAYHGGVL

SEQ ID NO: 2393 - protein, 151 aa, Homo sapiens
  MOD_RES (18)..(18): Selenocysteine
  MOD_RES (53)..(53): Selenocysteine
  MOD_RES (59)..(59): Selenocysteine
  MOD_RES (69)..(69): Selenocysteine
  MOD_RES (81)..(81): Selenocysteine
  MOD_RES (114)..(114): Selenocysteine
  MOD_RES (116)..(116): Selenocysteine
  MOD_RES (118)..(118): Selenocysteine
  MOD_RES (142)..(142): Selenocysteine
  MOD_RES (149)..(149): Selenocysteine
MEHWKRKQMRLNYRWDLXGFEEEEEAVKDHPRAEYEARVLEKSLKKESRNKEXDKVKLXWRDRFPAYLXNLVSIIFMIAVXFAIVLGVIIYRISMAAALAMNSSPSVRSNIRVXVXAXAVIINLVVIILLDEVYGCIARWLXKIEVPKXEK

SEQ ID NO: 2394 - protein, 695 aa, Homo sapiens
  MOD_RES (4)..(4): Selenocysteine
  MOD_RES (74)..(74): Selenocysteine
  MOD_RES (94)..(94): Selenocysteine
  MOD_RES (112)..(112): Selenocysteine
  MOD_RES (120)..(120): Selenocysteine
  MOD_RES (132)..(132): Selenocysteine
  MOD_RES (144)..(144): Selenocysteine
  MOD_RES (157)..(157): Selenocysteine
  MOD_RES (176)..(176): Selenocysteine
  MOD_RES (211)..(211): Selenocysteine
  MOD_RES (217)..(217): Selenocysteine
  MOD_RES (227)..(227): Selenocysteine
  MOD_RES (239)..(239): Selenocysteine
  MOD_RES (272)..(272): Selenocysteine
  MOD_RES (274)..(274): Selenocysteine
  MOD_RES (276)..(276): Selenocysteine
  MOD_RES (300)..(300): Selenocysteine
  MOD_RES (307)..(307): Selenocysteine
  MOD_RES (329)..(329): Selenocysteine
  MOD_RES (435)..(435): Selenocysteine
  MOD_RES (449)..(449): Selenocysteine
  MOD_RES (479)..(479): Selenocysteine
  MOD_RES (517)..(517): Selenocysteine
  MOD_RES (535)..(535): Selenocysteine
  MOD_RES (543)..(543): Selenocysteine
  MOD_RES (556)..(556): Selenocysteine
  MOD_RES (656)..(656): Selenocysteine
  MOD_RES (674)..(674): Selenocysteine
MGIXSLLANGVYAAAYPLHDGDYNGENVEFNDRKLLYEEWARYGVFYKYQPIDLVRKYFGEKIGLYFAWLGVYXQMLIPASIVGIIVFLYGCAXMDENIPSMEMCDQRHNIXMCPLCDKXCSYWKMSSACAXARASHLFDNPAXVFFSVFMALWAAXFMEHWKRKQMRLNYRWDLXGFEEEEEAVKDHPRAEYEARVLEKSLKKESRNKEXDKVKLXWRDRFPAYLXNLVSIIFMIAVXFAIVLGVIIYRISMAAALAMNSSPSVRSNIRVXVXAXAVIINLVVIILLDEVYGCIARWLXKIEVPKXEKSFEERLIFKAFLLKFVNSYXPIFYVAFFKGRFVGRPGDYVYIFRSFRMEECAPGGCLMELCIQLSIIMLGKQLIQNNLFEIGIPKMKKLIRYLKLKQQSPPDHEECVKRKQRYEVDYNLEPFAGLXPEYMEMIIQFGFVXLFVASFPLAPLFALLNNIIEIRLDAKKFVXELRRPVAVRAKDIGIWYNILRGIGKLAVIINAFVISFXSDFIPRLVYLYMYSKNGXMHGFVNHXLSSFNVSDFQNGXAPNDPLDLGYEVQICRYKDYREPPWSENKYDISKDFWAVLAARLAFVIVFQNLVMFMSDFVDWVIPDIPKDISQQIHKEKVLMVELFMREEQDKQQLLEXWMEKERQKDEPPCNHHNXKACPDSLGSPAPSHAYHGGVL

SEQ ID NO: 2395 - protein, 642 aa, Homo sapiens
  MOD_RES (3)..(3): Selenocysteine
  MOD_RES (50)..(50): Selenocysteine
  MOD_RES (60)..(60): Selenocysteine
  MOD_RES (120)..(120): Selenocysteine
  MOD_RES (150)..(150): Selenocysteine
  MOD_RES (159)..(159): Selenocysteine
  MOD_RES (174)..(174): Selenocysteine
  MOD_RES (188)..(188): Selenocysteine
  MOD_RES (217)..(217): Selenocysteine
  MOD_RES (220)..(220): Selenocysteine
  MOD_RES (229)..(230): Selenocysteine
  MOD_RES (232)..(232): Selenocysteine
  MOD_RES (241)..(241): Selenocysteine
  MOD_RES (311)..(311): Selenocysteine
  MOD_RES (331)..(331): Selenocysteine
  MOD_RES (349)..(349): Selenocysteine
  MOD_RES (357)..(357): Selenocysteine
  MOD_RES (369)..(369): Selenocysteine
  MOD_RES (381)..(381): Selenocysteine
  MOD_RES (394)..(394): Selenocysteine
  MOD_RES (413)..(413): Selenocysteine
  MOD_RES (444)..(444): Selenocysteine
  MOD_RES (450)..(450): Selenocysteine
  MOD_RES (460)..(460): Selenocysteine
  MOD_RES (472)..(472): Selenocysteine
  MOD_RES (505)..(505): Selenocysteine
  MOD_RES (507)..(507): Selenocysteine
  MOD_RES (509)..(509): Selenocysteine
  MOD_RES (533)..(533): Selenocysteine
  MOD_RES (540)..(540): Selenocysteine
  MOD_RES (562)..(562): Selenocysteine
  MOD_RES (594)..(594): Selenocysteine
  MOD_RES (612)..(612): Selenocysteine
  MOD_RES (615)..(615): Selenocysteine
  MOD_RES (638)..(638): Selenocysteine
MLXRPSQVLLNSLSVDPDAECKYGLYFRDGRRKVDYILVYHHKRPSGNRXLVRRVQHSDXPSGARSVKQDHPLPGKGASLDAGSGEPPMDYHEDDKRFRREEYEGNLLEAGLELERDEDXKIHGVGFVKIHAPWNVLCREAEFLKLKMPXKKMYHINEXRGLLKKINSVLQKIXDPIQPKVAEHRPQXMKRLSYPFSREKQHLFDLSDKDSFFDSKXRSXIVYEILKRXXCXKAKYSMGIXSLLANGVYAAAYPLHDGDYNGENVEFNDRKLLYEEWARYGVFYKYQPIDLVRKYFGEKIGLYFAWLGVYXQMLIPASIVGIIVFLYGCAXMDENIPSMEMCDQRHNIXMCPLCDKXCSYWKMSSACAXARASHLFDNPAXVFFSVFMALWAAXFMEHWKRKQMRLNYRWDLXGFEEEEDHPRAEYEARVLEKSLKKESRNKEXDKVKLXWRDRFPAYLXNLVSIIFMIAVXFAIVLGVIIYRISMAAALAMNSSPSVRSNIRVXVXAXAVIINLVVIILLDEVYGCIARWLXKIEVPKXEKSFEERLIFKAFLLKFVNSYXPIFYVAFFKGRFVGRPGDYVYIFRSFRMEEVXEILFISGSPFCLAYDLSXPCXWEKQLQHICSAKSSRFLSFLLEXFLFP

SEQ ID NO: 2396 - protein, 251 aa, Homo sapiens
  MOD_RES (9)..(9): Selenocysteine
  MOD_RES (36)..(36): Selenocysteine
  MOD_RES (78)..(78): Selenocysteine
  MOD_RES (88)..(88): Selenocysteine
  MOD_RES (154)..(154): Selenocysteine
  MOD_RES (169)..(169): Selenocysteine
  MOD_RES (183)..(183): Selenocysteine
  MOD_RES (212)..(212): Selenocysteine
  MOD_RES (215)..(215): Selenocysteine
  MOD_RES (224)..(225): Selenocysteine
  MOD_RES (227)..(227): Selenocysteine
  MOD_RES (236)..(236): Selenocysteine
MRVNEKYSXLPAEDRSVHIINICAIEDIGYLPSEGXLLNSLSVDPDAECKYGLYFRDGRRKVDYILVYHHKRPSGNRXLVRRVQHSDXPSGARSVKQDHPLPGKGASLDAGSGEPPMDYHEDDKRFRREEYEGNLLEAGLELERDEDMYHINEXRGLLKKINSVLQKIXDPIQPKVAEHRPQXMKRLSYPFSREKQHLFDLSDKDSFFDSKXRSXIVYEILKRXXCXKAKYSMGIXSLLANGVYAAAYPLH

SEQ ID NO: 2397 - protein, 986 aa, Homo sapiens
  MOD_RES (9)..(9): Selenocysteine
  MOD_RES (36)..(36): Selenocysteine
  MOD_RES (78)..(78): Selenocysteine
  MOD_RES (88)..(88): Selenocysteine
  MOD_RES (148)..(148): Selenocysteine
  MOD_RES (178)..(178): Selenocysteine
  MOD_RES (187)..(187): Selenocysteine
  MOD_RES (202)..(202): Selenocysteine
  MOD_RES (216)..(216): Selenocysteine
  MOD_RES (245)..(245): Selenocysteine
  MOD_RES (248)..(248): Selenocysteine
  MOD_RES (257)..(258): Selenocysteine
  MOD_RES (260)..(260): Selenocysteine
  MOD_RES (269)..(269): Selenocysteine
  MOD_RES (339)..(339): Selenocysteine
  MOD_RES (359)..(359): Selenocysteine
  MOD_RES (377)..(377): Selenocysteine
  MOD_RES (385)..(385): Selenocysteine
  MOD_RES (397)..(397): Selenocysteine
  MOD_RES (409)..(409): Selenocysteine
  MOD_RES (422)..(422): Selenocysteine
  MOD_RES (441)..(441): Selenocysteine
  MOD_RES (485)..(485): Selenocysteine
  MOD_RES (494)..(494): Selenocysteine
  MOD_RES (502)..(502): Selenocysteine
  MOD_RES (508)..(508): Selenocysteine
  MOD_RES (518)..(518): Selenocysteine
  MOD_RES (530)..(530): Selenocysteine
  MOD_RES (563)..(563): Selenocysteine
  MOD_RES (565)..(565): Selenocysteine
  MOD_RES (567)..(567): Selenocysteine
  MOD_RES (591)..(591): Selenocysteine
  MOD_RES (598)..(598): Selenocysteine
  MOD_RES (620)..(620): Selenocysteine
  MOD_RES (726)..(726): Selenocysteine
  MOD_RES (740)..(740): Selenocysteine
  MOD_RES (770)..(770): Selenocysteine
  MOD_RES (808)..(808): Selenocysteine
  MOD_RES (826)..(826): Selenocysteine
  MOD_RES (834)..(834): Selenocysteine
  MOD_RES (847)..(847): Selenocysteine
  MOD_RES (947)..(947): Selenocysteine
  MOD_RES (965)..(965): Selenocysteine
MRVNEKYSXLPAEDRSVHIINICAIEDIGYLPSEGXLLNSLSVDPDAECKYGLYFRDGRRKVDYILVYHHKRPSGNRXLVRRVQHSDXPSGARSVKQDHPLPGKGASLDAGSGEPPMDYHEDDKRFRREEYEGNLLEAGLELERDEDXKIHGVGFVKIHAPWNVLCREAEFLKLKMPXKKMYHINEXRGLLKKINSVLQKIXDPIQPKVAEHRPQXMKRLSYPFSREKQHLFDLSDKDSFFDSKXRSXIVYEILKRXXCXKAKYSMGIXSLLANGVYAAAYPLHDGDYNGENVEFNDRKLLYEEWARYGVFYKYQPIDLVRKYFGEKIGLYFAWLGVYXQMLIPASIVGIIVFLYGCAXMDENIPSMEMCDQRHNIXMCPLCDKXCSYWKMSSACAXARASHLFDNPAXVFFSVFMALWAAXFMEHWKRKQMRLNYRWDLXGFEEEEEAVKDHPRAEYEARVLEKSLKKESRNKEKRRHIPEESXNKWKQRVKXAMAGVKLXDKVKLXWRDRFPAYLXNLVSIIFMIAVXFAIVLGVIIYRISMAAALAMNSSPSVRSNIRVXVXAXAVIINLVVIILLDEVYGCIARWLXKIEVPKXEKSFEERLIFKAFLLKFVNSYXPIFYVAFFKGRFVGRPGDYVYIFRSFRMEECAPGGCLMELCIQLSIIMLGKQLIQNNLFEIGIPKMKKLIRYLKLKQQSPPDHEECVKRKQRYEVDYNLEPFAGLXPEYMEMIIQFGFVXLFVASFPLAPLFALLNNIIEIRLDAKKFVXELRRPVAVRAKDIGIWYNILRGIGKLAVIINAFVISFXSDFIPRLVYLYMYSKNGXMHGFVNHXLSSFNVSDFQNGXAPNDPLDLGYEVQICRYKDYREPPWSENKYDISKDFWAVLAARLAFVIVFQNLVMFMSDFVDWVIPDIPKDISQQIHKEKVLMVELFMREEQDKQQLLEXWMEKERQKDEPPCNHHNXKACPDSLGSPAPSHAYHGGVL

SEQ ID NO: 2398 - protein, 269 aa, Homo sapiens
  MOD_RES (1)..(1): Any amino acid
  MOD_RES (21)..(21): Selenocysteine
  MOD_RES (30)..(30): Selenocysteine
  MOD_RES (45)..(45): Selenocysteine
  MOD_RES (59)..(59): Selenocysteine
  MOD_RES (88)..(88): Selenocysteine
  MOD_RES (91)..(91): Selenocysteine
  MOD_RES (100)..(101): Selenocysteine
  MOD_RES (103)..(103): Selenocysteine
  MOD_RES (134)..(134): Selenocysteine
  MOD_RES (204)..(204): Selenocysteine
  MOD_RES (224)..(224): Selenocysteine
  MOD_RES (242)..(242): Selenocysteine
  MOD_RES (250)..(250): Selenocysteine
  MOD_RES (262)..(262): Selenocysteine
XHAPWNVLCREAEFLKLKMPXKKMYHINEXRGLLKKINSVLQKIXDPIQPKVAEHRPQXMKRLSYPFSREKQHLFDLSDKDSFFDSKXRSXIVYEILKRXXCXKAKYSMGQGEGRKKDSALLSKRRKCGKYGIXSLLANGVYAAAYPLHDGDYNGENVEFNDRKLLYEEWARYGVFYKYQPIDLVRKYFGEKIGLYFAWLGVYXQMLIPASIVGIIVFLYGCAXMDENIPSMEMCDQRHNIXMCPLCDKXCSYWKMSSACAXARASHLF

SEQ ID NO: 2399 - protein, 892 aa, Homo sapiens
  MOD_RES (13)..(13): Selenocysteine
  MOD_RES (29)..(29): Selenocysteine
  MOD_RES (65)..(65): Selenocysteine
  MOD_RES (70)..(70): Selenocysteine
  MOD_RES (95)..(95): Selenocysteine
  MOD_RES (117)..(117): Selenocysteine
  MOD_RES (142)..(142): Selenocysteine
  MOD_RES (147)..(147): Selenocysteine
  MOD_RES (165)..(165): Selenocysteine
  MOD_RES (189)..(189): Selenocysteine
  MOD_RES (288)..(288): Selenocysteine
  MOD_RES (313)..(313): Selenocysteine
  MOD_RES (345)..(345): Selenocysteine
  MOD_RES (360)..(360): Selenocysteine
  MOD_RES (372)..(372): Selenocysteine
  MOD_RES (391)..(391): Selenocysteine
  MOD_RES (409)..(409): Selenocysteine
  MOD_RES (417)..(417): Selenocysteine
  MOD_RES (426)..(426): Selenocysteine
  MOD_RES (435)..(435): Selenocysteine
  MOD_RES (477)..(477): Selenocysteine
  MOD_RES (485)..(485): Selenocysteine
  MOD_RES (488)..(488): Selenocysteine
  MOD_RES (490)..(490): Selenocysteine
  MOD_RES (493)..(493): Selenocysteine
  MOD_RES (507)..(507): Selenocysteine
  MOD_RES (517)..(517): Selenocysteine
  MOD_RES (524)..(524): Selenocysteine
  MOD_RES (526)..(526): Selenocysteine
  MOD_RES (533)..(533): Selenocysteine
  MOD_RES (587)..(588): Selenocysteine
  MOD_RES (591)..(591): Selenocysteine
  MOD_RES (628)..(628): Selenocysteine
  MOD_RES (660)..(660): Selenocysteine
  MOD_RES (689)..(690): Selenocysteine
  MOD_RES (720)..(720): Selenocysteine
  MOD_RES (728)..(728): Selenocysteine
  MOD_RES (750)..(750): Selenocysteine
  MOD_RES (753)..(753): Selenocysteine
  MOD_RES (761)..(761): Selenocysteine
  MOD_RES (786)..(787): Selenocysteine
  MOD_RES (845)..(845): Selenocysteine
  MOD_RES (856)..(856): Selenocysteine
  MOD_RES (869)..(869): Selenocysteine
MFCAAVLENLGQXIVPDLGSLESQHDFRXPEFEEFNGKPDSLFFNDGQRRIDFVLVYEDESRKEXNKKGXNEKQRRKRQAYESNLICHGLQLEAXRSVLDDKLVFVKVHAPWEVLCXYAEIMHIKLPLKPNDLKNRSSAFGXLNWFXKVLSVDESIIKPEQEFFXAPFEKNRMNDFYIVDRDAFFNPAXRSRIVYFILSRVKYQVINNVSKFGINRLVNSGIYKAAFPLHDCKFRRQSEDPSCPNERYLLYREWAHPRSIYKKQPLDLIRKYYGEKIGIYFAWLGYYXQMLLLAAVVGVACFLYGYLNQDNCXWSKEVCHPDIGGKIIMCPQCDRLCPFWKLNIXCESSKKLCIFDSFGXLVFAVFMGVWVXLFLEFWKRRQAELEYEWDXVELQQEEQARPEYEARCXHVVINEIXQEEERIPFXAWGKCIRIXLCASAVFFWILLIIASVIGIIVYRLSVFIVFSAKLPKNINGXDPIQKYLXPQXAXSIXASIISFIIIMILNXIYEKVAIMIXNFELPRXQXDYENSLXMKMFLFQFVNYYSSCFYIAFFKGKFVGYPGDPVYWLGKYRNEECDPGGCLLELXXQLXIIMGGKAIWNNIQEVLLPWIMNLIGRFHRVSGSEKIXPRWEQDYHLQPMGKLGLFYEYLEMIIQFGFVXLFVASFPLAPLLALVNNILEIRVDAWKLXXQFRRLVPEKAQDIGAWQPIMQGIAILAVVXNAMIIAFXSDMIPRLVYYWSFSVPPYGDHXSYXMEGYINNXLSIFKVADFKNKSKGNPYSDLGNHXXCRYRDFRYPPGHPQEYKHNIYYWHVIAAKLAFIIVMEHVIYSVKFFISYAIPDVSKRXKSKIQREKYLXQKLLHENHLKDMXKNMGVIAERMIEAVDNNLRPKSE

SEQ ID NO: 2400 - protein, 931 aa, Homo sapiens
  MOD_RES (35)..(35): Selenocysteine
  MOD_RES (38)..(38): Selenocysteine
  MOD_RES (52)..(52): Selenocysteine
  MOD_RES (68)..(68): Selenocysteine
  MOD_RES (104)..(104): Selenocysteine
  MOD_RES (109)..(109): Selenocysteine
  MOD_RES (134)..(134): Selenocysteine
  MOD_RES (156)..(156): Selenocysteine
  MOD_RES (181)..(181): Selenocysteine
  MOD_RES (186)..(186): Selenocysteine
  MOD_RES (204)..(204): Selenocysteine
  MOD_RES (228)..(228): Selenocysteine
  MOD_RES (327)..(327): Selenocysteine
  MOD_RES (352)..(352): Selenocysteine
  MOD_RES (384)..(384): Selenocysteine
  MOD_RES (399)..(399): Selenocysteine
  MOD_RES (411)..(411): Selenocysteine
  MOD_RES (430)..(430): Selenocysteine
  MOD_RES (448)..(448): Selenocysteine
  MOD_RES (456)..(456): Selenocysteine
  MOD_RES (465)..(465): Selenocysteine
  MOD_RES (474)..(474): Selenocysteine
  MOD_RES (516)..(516): Selenocysteine
  MOD_RES (524)..(524): Selenocysteine
  MOD_RES (527)..(527): Selenocysteine
  MOD_RES (529)..(529): Selenocysteine
  MOD_RES (532)..(532): Selenocysteine
  MOD_RES (546)..(546): Selenocysteine
  MOD_RES (556)..(556): Selenocysteine
  MOD_RES (563)..(563): Selenocysteine
  MOD_RES (565)..(565): Selenocysteine
  MOD_RES (572)..(572): Selenocysteine
  MOD_RES (626)..(627): Selenocysteine
  MOD_RES (630)..(630): Selenocysteine
  MOD_RES (667)..(667): Selenocysteine
  MOD_RES (699)..(699): Selenocysteine
  MOD_RES (728)..(729): Selenocysteine
  MOD_RES (759)..(759): Selenocysteine
  MOD_RES (767)..(767): Selenocysteine
  MOD_RES (789)..(789): Selenocysteine
  MOD_RES (792)..(792): Selenocysteine
  MOD_RES (800)..(800): Selenocysteine
  MOD_RES (825)..(826): Selenocysteine
  MOD_RES (884)..(884): Selenocysteine
  MOD_RES (895)..(895): Selenocysteine
  MOD_RES (908)..(908): Selenocysteine
MKKMSRNVLLQMEEEEDDDDGDIGDVPASRRPFLXPHXHLPSSLVLENLGQXIVPDLGSLESQHDFRXPEFEEFNGKPDSLFFNDGQRRIDFVLVYEDESRKEXNKKGXNEKQRRKRQAYESNLICHGLQLEAXRSVLDDKLVFVKVHAPWEVLCXYAEIMHIKLPLKPNDLKNRSSAFGXLNWFXKVLSVDESIIKPEQEFFXAPFEKNRMNDFYIVDRDAFFNPAXRSRIVYFILSRVKYQVINNVSKFGINRLVNSGIYKAAFPLHDCKFRRQSEDPSCPNERYLLYREWAHPRSIYKKQPLDLIRKYYGEKIGIYFAWLGYYXQMLLLAAVVGVACFLYGYLNQDNCXWSKEVCHPDIGGKIIMCPQCDRLCPFWKLNIXCESSKKLCIFDSFGXLVFAVFMGVWVXLFLEFWKRRQAELEYEWDXVELQQEEQARPEYEARCXHVVINEIXQEEERIPFXAWGKCIRIXLCASAVFFWILLIIASVIGIIVYRLSVFIVFSAKLPKNINGXDPIQKYLXPQXAXSIXASIISFIIIMILNXIYEKVAIMIXNFELPRXQXDYENSLXMKMFLFQFVNYYSSCFYIAFFKGKFVGYPGDPVYWLGKYRNEECDPGGCLLELXXQLXIIMGGKAIWNNIQEVLLPWIMNLIGRFHRVSGSEKIXPRWEQDYHLQPMGKLGLFYEYLEMIIQFGFVXLFVASFPLAPLLALVNNILEIRVDAWKLXXQFRRLVPEKAQDIGAWQPIMQGIAILAVVXNAMIIAFXSDMIPRLVYYWSFSVPPYGDHXSYXMEGYINNXLSIFKVADFKNKSKGNPYSDLGNHXXCRYRDFRYPPGHPQEYKHNIYYWHVIAAKLAFIIVMEHVIYSVKFFISYAIPDVSKRXKSKIQREKYLXQKLLHENHLKDMXKNMGVIAERMIEAVDNNLRPKSE

SEQ ID NO: 2401 - protein, 45 aa, Homo sapiens
  MOD_RES (37)..(37): Selenocysteine
  MOD_RES (41)..(41): Selenocysteine
MKKMSRNVLLQMEEEEDDDDGDIGLKCSSGVAQSWLXVALXPRLN

SEQ ID NO: 2402 - protein, 910 aa, Homo sapiens
  MOD_RES (31)..(31): Selenocysteine
  MOD_RES (47)..(47): Selenocysteine
  MOD_RES (83)..(83): Selenocysteine
  MOD_RES (88)..(88): Selenocysteine
  MOD_RES (113)..(113): Selenocysteine
  MOD_RES (135)..(135): Selenocysteine
  MOD_RES (160)..(160): Selenocysteine
  MOD_RES (165)..(165): Selenocysteine
  MOD_RES (183)..(183): Selenocysteine
  MOD_RES (207)..(207): Selenocysteine
  MOD_RES (306)..(306): Selenocysteine
  MOD_RES (331)..(331): Selenocysteine
  MOD_RES (363)..(363): Selenocysteine
  MOD_RES (378)..(378): Selenocysteine
  MOD_RES (390)..(390): Selenocysteine
  MOD_RES (409)..(409): Selenocysteine
  MOD_RES (427)..(427): Selenocysteine
  MOD_RES (435)..(435): Selenocysteine
  MOD_RES (444)..(444): Selenocysteine
  MOD_RES (453)..(453): Selenocysteine
  MOD_RES (495)..(495): Selenocysteine
  MOD_RES (503)..(503): Selenocysteine
  MOD_RES (506)..(506): Selenocysteine
  MOD_RES (508)..(508): Selenocysteine
  MOD_RES (511)..(511): Selenocysteine
  MOD_RES (525)..(525): Selenocysteine
  MOD_RES (535)..(535): Selenocysteine
  MOD_RES (542)..(542): Selenocysteine
  MOD_RES (544)..(544): Selenocysteine
  MOD_RES (551)..(551): Selenocysteine
  MOD_RES (605)..(606): Selenocysteine
  MOD_RES (609)..(609): Selenocysteine
  MOD_RES (646)..(646): Selenocysteine
  MOD_RES (678)..(678): Selenocysteine
  MOD_RES (707)..(708): Selenocysteine
  MOD_RES (738)..(738): Selenocysteine
  MOD_RES (746)..(746): Selenocysteine
  MOD_RES (768)..(768): Selenocysteine
  MOD_RES (771)..(771): Selenocysteine
  MOD_RES (779)..(779): Selenocysteine
  MOD_RES (804)..(805): Selenocysteine
  MOD_RES (863)..(863): Selenocysteine
  MOD_RES (874)..(874): Selenocysteine
  MOD_RES (887)..(887): Selenocysteine
MKKMSRNVLLQMEEEEDDDDGDIVLENLGQXIVPDLGSLESQHDFRXPEFEEFNGKPDSLFFNDGQRRIDFVLVYEDESRKEXNKKGXNEKQRRKRQAYESNLICHGLQLEAXRSVLDDKLVFVKVHAPWEVLCXYAEIMHIKLPLKPNDLKNRSSAFGXLNWFXKVLSVDESIIKPEQEFFXAPFEKNRMNDFYIVDRDAFFNPAXRSRIVYFILSRVKYQVINNVSKFGINRLVNSGIYKAAFPLHDCKFRRQSEDPSCPNERYLLYREWAHPRSIYKKQPLDLIRKYYGEKIGIYFAWLGYYXQMLLLAAVVGVACFLYGYLNQDNCXWSKEVCHPDIGGKIIMCPQCDRLCPFWKLNIXCESSKKLCIFDSFGXLVFAVFMGVWVXLFLEFWKRRQAELEYEWDXVELQQEEQARPEYEARCXHVVINEIXQEEERIPFXAWGKCIRIXLCASAVFFWILLIIASVIGIIVYRLSVFIVFSAKLPKNINGXDPIQKYLXPQXAXSIXASIISFIIIMILNXIYEKVAIMIXNFELPRXQXDYENSLXMKMFLFQFVNYYSSCFYIAFFKGKFVGYPGDPVYWLGKYRNEECDPGGCLLELXXQLXIIMGGKAIWNNIQEVLLPWIMNLIGRFHRVSGSEKIXPRWEQDYHLQPMGKLGLFYEYLEMIIQFGFVXLFVASFPLAPLLALVNNILEIRVDAWKLXXQFRRLVPEKAQDIGAWQPIMQGIAILAVVXNAMIIAFXSDMIPRLVYYWSFSVPPYGDHXSYXMEGYINNXLSIFKVADFKNKSKGNPYSDLGNHXXCRYRDFRYPPGHPQEYKHNIYYWHVIAAKLAFIIVMEHVIYSVKFFISYAIPDVSKRXKSKIQREKYLXQKLLHENHLKDMXKNMGVIAERMIEAVDNNLRPKSE

SEQ ID NO: 2403 - protein, 929 aa, Homo sapiens
  MOD_RES (31)..(31): Selenocysteine
  MOD_RES (47)..(47): Selenocysteine
  MOD_RES (83)..(83): Selenocysteine
  MOD_RES (88)..(88): Selenocysteine
  MOD_RES (113)..(113): Selenocysteine
  MOD_RES (135)..(135): Selenocysteine
  MOD_RES (160)..(160): Selenocysteine
  MOD_RES (165)..(165): Selenocysteine
  MOD_RES (183)..(183): Selenocysteine
  MOD_RES (207)..(207): Selenocysteine
  MOD_RES (306)..(306): Selenocysteine
  MOD_RES (331)..(331): Selenocysteine
  MOD_RES (363)..(363): Selenocysteine
  MOD_RES (378)..(378): Selenocysteine
  MOD_RES (390)..(390): Selenocysteine
  MOD_RES (409)..(409): Selenocysteine
  MOD_RES (427)..(427): Selenocysteine
  MOD_RES (435)..(435): Selenocysteine
  MOD_RES (444)..(444): Selenocysteine
  MOD_RES (453)..(453): Selenocysteine
  MOD_RES (495)..(495): Selenocysteine
  MOD_RES (503)..(503): Selenocysteine
  MOD_RES (506)..(506): Selenocysteine
  MOD_RES (508)..(508): Selenocysteine
  MOD_RES (511)..(511): Selenocysteine
  MOD_RES (525)..(525): Selenocysteine
  MOD_RES (535)..(535): Selenocysteine
  MOD_RES (542)..(542): Selenocysteine
  MOD_RES (544)..(544): Selenocysteine
  MOD_RES (551)..(551): Selenocysteine
  MOD_RES (605)..(606): Selenocysteine
  MOD_RES (609)..(609): Selenocysteine
  MOD_RES (646)..(646): Selenocysteine
  MOD_RES (678)..(678): Selenocysteine
  MOD_RES (707)..(708): Selenocysteine
  MOD_RES (738)..(738): Selenocysteine
  MOD_RES (746)..(746): Selenocysteine
  MOD_RES (768)..(768): Selenocysteine
  MOD_RES (771)..(771): Selenocysteine
  MOD_RES (779)..(779): Selenocysteine
  MOD_RES (804)..(805): Selenocysteine
  MOD_RES (885)..(885): Selenocysteine
  MOD_RES (908)..(908): Selenocysteine
  MOD_RES (919)..(919): Selenocysteine
MKKMSRNVLLQMEEEEDDDDGDIVLENLGQXIVPDLGSLESQHDFRXPEFEEFNGKPDSLFFNDGQRRIDFVLVYEDESRKEXNKKGXNEKQRRKRQAYESNLICHGLQLEAXRSVLDDKLVFVKVHAPWEVLCXYAEIMHIKLPLKPNDLKNRSSAFGXLNWFXKVLSVDESIIKPEQEFFXAPFEKNRMNDFYIVDRDAFFNPAXRSRIVYFILSRVKYQVINNVSKFGINRLVNSGIYKAAFPLHDCKFRRQSEDPSCPNERYLLYREWAHPRSIYKKQPLDLIRKYYGEKIGIYFAWLGYYXQMLLLAAVVGVACFLYGYLNQDNCXWSKEVCHPDIGGKIIMCPQCDRLCPFWKLNIXCESSKKLCIFDSFGXLVFAVFMGVWVXLFLEFWKRRQAELEYEWDXVELQQEEQARPEYEARCXHVVINEIXQEEERIPFXAWGKCIRIXLCASAVFFWILLIIASVIGIIVYRLSVFIVFSAKLPKNINGXDPIQKYLXPQXAXSIXASIISFIIIMILNXIYEKVAIMIXNFELPRXQXDYENSLXMKMFLFQFVNYYSSCFYIAFFKGKFVGYPGDPVYWLGKYRNEECDPGGCLLELXXQLXIIMGGKAIWNNIQEVLLPWIMNLIGRFHRVSGSEKIXPRWEQDYHLQPMGKLGLFYEYLEMIIQFGFVXLFVASFPLAPLLALVNNILEIRVDAWKLXXQFRRLVPEKAQDIGAWQPIMQGIAILAVVXNAMIIAFXSDMIPRLVYYWSFSVPPYGDHXSYXMEGYINNXLSIFKVADFKNKSKGNPYSDLGNHXXCRYRDFRYPPGHPQEYKHNIYYWHVIAAKLAFIIVMEYLALLPRLGHSGMILAHCNLRLPVDCCMCYRFVDEIRLLEQLXSDFIDSLYYIFSISIISIFFSVXFFFLLLSLGPXPCFSVSNFLS

SEQ ID NO: 2404 - protein, 680 aa, Homo sapiens
  MOD_RES (11)..(11): Selenocysteine
  MOD_RES (59)..(59): Selenocysteine
  MOD_RES (118)..(118): Selenocysteine
  MOD_RES (171)..(171): Selenocysteine
  MOD_RES (177)..(177): Selenocysteine
  MOD_RES (193)..(193): Selenocysteine
  MOD_RES (235)..(235): Selenocysteine
  MOD_RES (239)..(239): Selenocysteine
  MOD_RES (243)..(244): Selenocysteine
  MOD_RES (251)..(251): Selenocysteine
  MOD_RES (271)..(271): Selenocysteine
  MOD_RES (275)..(275): Selenocysteine
  MOD_RES (302)..(302): Selenocysteine
  MOD_RES (310)..(310): Selenocysteine
  MOD_RES (312)..(312): Selenocysteine
  MOD_RES (344)..(344): Selenocysteine
  MOD_RES (351)..(352): Selenocysteine
  MOD_RES (378)..(378): Selenocysteine
  MOD_RES (383)..(383): Selenocysteine
  MOD_RES (395)..(395): Selenocysteine
  MOD_RES (397)..(397): Selenocysteine
  MOD_RES (400)..(400): Selenocysteine
  MOD_RES (409)..(409): Selenocysteine
  MOD_RES (416)..(416): Selenocysteine
  MOD_RES (426)..(426): Selenocysteine
  MOD_RES (450)..(450): Selenocysteine
  MOD_RES (454)..(454): Selenocysteine
  MOD_RES (472)..(473): Selenocysteine
  MOD_RES (482)..(482): Selenocysteine
  MOD_RES (501)..(501): Selenocysteine
  MOD_RES (519)..(520): Selenocysteine
  MOD_RES (566)..(566): Selenocysteine
  MOD_RES (583)..(583): Selenocysteine
  MOD_RES (588)..(588): Selenocysteine
  MOD_RES (593)..(594): Selenocysteine
  MOD_RES (620)..(620): Selenocysteine
  MOD_RES (628)..(628): Selenocysteine
  MOD_RES (638)..(638): Selenocysteine
  MOD_RES (646)..(646): Selenocysteine
  MOD_RES (649)..(649): Selenocysteine
  MOD_RES (652)..(652): Selenocysteine
MVPGVPGAVLXLCLWLAASSGCLAAGPGAAAARRLDESLSAGSVQRARCASRCLSLQIXRISAFFQHFQNNGSLVWCQNHKQCSKCLEPCKESGDLRKHQCQSFCEPLFPKKSYECLXSCEFLKYILLVKQGDCPAPEKASGFAAACVESCEVDNECSGVKKCCSNGCGHXCQVPKXLYKGVPLKPRKELRFXELQSGQLEVKWSSKFNISIEPVIYVVQRRWNYGIHPSEDDAXHWQXVAQXXDERVQLXDIRPSRWYQFRVAAVNVHGXRGFXAPSKHFRSSKDPSAPPAPANLRLANSXVNSDGSVXVXIVWDLPEEPDIPVHHYKVFWSWMVSSKSLVPXKKKRRKXXDGFQNSVILEKLQPDCDYVVELQAIXYWGQXRLKSAKVSLHFXSXHAXNNKEQLVKXRKGGIQXQLPFQRRRPXRPLEVGAPFYQDGQLQVKVYWKKXEDPXVNRYHVRWFPEACAHNRXXGSEASSGMXHENYIILQDLSFSCKYKVXVQPIRPKSHSKAEAVFFXXPPCSALKGKSHKPVGCLGEAGHVLSKVLAKPENLSASFIVQDVNIXGHFSWKMAKANLYQPMXGFQVXWAEVXXESRQNSLPNSIISQSQILPSDHYVLXVPNLRPSXLYRLEVQVLXPGGEGPAXIKXFRXPELPPSSAHRSHLKHRHPHHYKPSPERY

SEQ ID NO: 2405 - protein, 249 aa, Homo sapiens
  MOD_RES (15)..(15): Selenocysteine
  MOD_RES (38)..(38): Selenocysteine
  MOD_RES (49)..(49): Selenocysteine
  MOD_RES (55)..(55): Selenocysteine
  MOD_RES (91)..(91): Selenocysteine
  MOD_RES (105)..(105): Selenocysteine
  MOD_RES (126)..(126): Selenocysteine
  MOD_RES (143)..(143): Selenocysteine
MEMGRRIHLELRNRXPSDVKELVLDNSRSNEGKLEGLXDEFEELEFLSXINVGLXSIANLPKLNKLKKLELSDNRVSGGLEVLAEKCPNLXHLNLSGNKIKDLSXIEPLKKLENLKSLDLFNCEVXNLNDYRENVFKLLPQLXYLDGYDRDDKEAPDSDAEGYVEGLDDEEEDEDEEEYDEDAQVVEDEEDEDEEEEGEEEDVSGEEEEDEEGYNDGEVDDEEDEEELGEEERGQKRKREPEDEGEDDD

SEQ ID NO: 2406 - protein, 177 aa, Homo sapiens
  MOD_RES (15)..(15): Selenocysteine
  MOD_RES (38)..(38): Selenocysteine
  MOD_RES (49)..(49): Selenocysteine
  MOD_RES (55)..(55): Selenocysteine
  MOD_RES (91)..(91): Selenocysteine
  MOD_RES (105)..(105): Selenocysteine
  MOD_RES (126)..(126): Selenocysteine
  MOD_RES (143)..(143): Selenocysteine
MEMGRRIHLELRNRXPSDVKELVLDNSRSNEGKLEGLXDEFEELEFLSXINVGLXSIANLPKLNKLKKLELSDNRVSGGLEVLAEKCPNLXHLNLSGNKIKDLSXIEPLKKLENLKSLDLFNCEVXNLNDYRENVFKLLPQLXYLDGYDRDDKEAPDSDAEGYVEGLDDEEEDEDGG

SEQ ID NO: 2407 - protein, 79 aa, Homo sapiens
  MOD_RES (15)..(15): Selenocysteine
  MOD_RES (38)..(38): Selenocysteine
  MOD_RES (49)..(49): Selenocysteine
  MOD_RES (55)..(55): Selenocysteine
  MOD_RES (76)..(76): Selenocysteine
MEMGRRIHLELRNRXPSDVKELVLDNSRSNEGKLEGLXDEFEELEFLSXINVGLXSIANLPKLNKLKKYWQKSVRXSRI

SEQ ID NO: 2408 - protein, 333 aa, Homo sapiens
  MOD_RES (3)..(3): Selenocysteine
  MOD_RES (20)..(20): Selenocysteine
  MOD_RES (87)..(87): Selenocysteine
  MOD_RES (90)..(91): Selenocysteine
  MOD_RES (96)..(96): Selenocysteine
  MOD_RES (118)..(118): Selenocysteine
  MOD_RES (141)..(141): Selenocysteine
  MOD_RES (149)..(149): Selenocysteine
  MOD_RES (186)..(186): Selenocysteine
  MOD_RES (230)..(230): Selenocysteine
  MOD_RES (266)..(266): Selenocysteine
  MOD_RES (277)..(277): Selenocysteine
  MOD_RES (313)..(315): Selenocysteine
  MOD_RES (327)..(328): Selenocysteine
MAXAERRALGIGFQWLSLAXLVLICAGQGGRREDGGPACYGGFDLYFILDKSGSVLHHWNEIYYFVEQLAHKFISPQLRMSFIVFSXRGXXLMKLXEDREQIRQGLEELQKVLPGGDXYMHEGFERASEQIYYENRQGYRXASVIIALXDGELHEDLFFYSEREANRSRDLGAIVYCVGVKDFNEXQLARIADSKDHVFPVNDGFQALQGIIHSILKKSCIEILAAEPSXICAGESFQVVVRGNGFRHARNVDRVLCSFKINDSVXLNEKPFSVEDXYLLCPAPILKEVGMKAALQVSMNDGLSFISSSVIIXXXHCSLHKIASGPXXAACME

SEQ ID NO: 2409 - protein, 368 aa, Homo sapiens
  MOD_RES (3)..(3): Selenocysteine
  MOD_RES (20)..(20): Selenocysteine
  MOD_RES (87)..(87): Selenocysteine
  MOD_RES (90)..(91): Selenocysteine
  MOD_RES (96)..(96): Selenocysteine
  MOD_RES (118)..(118): Selenocysteine
  MOD_RES (141)..(141): Selenocysteine
  MOD_RES (149)..(149): Selenocysteine
  MOD_RES (186)..(186): Selenocysteine
  MOD_RES (230)..(230): Selenocysteine
  MOD_RES (266)..(266): Selenocysteine
  MOD_RES (277)..(277): Selenocysteine
  MOD_RES (313)..(315): Selenocysteine
  MOD_RES (348)..(348): Selenocysteine
MAXAERRALGIGFQWLSLAXLVLICAGQGGRREDGGPACYGGFDLYFILDKSGSVLHHWNEIYYFVEQLAHKFISPQLRMSFIVFSXRGXXLMKLXEDREQIRQGLEELQKVLPGGDXYMHEGFERASEQIYYENRQGYRXASVIIALXDGELHEDLFFYSEREANRSRDLGAIVYCVGVKDFNEXQLARIADSKDHVFPVNDGFQALQGIIHSILKKSCIEILAAEPSXICAGESFQVVVRGNGFRHARNVDRVLCSFKINDSVXLNEKPFSVEDXYLLCPAPILKEVGMKAALQVSMNDGLSFISSSVIIXXXHCSDGSILAIALLILFLLLALALLWWFWPLCCXVIIKEVPPPPAEESEENKIK

SEQ ID NO: 2410 - protein, 564 aa, Homo sapiens
  MOD_RES (3)..(3): Selenocysteine
  MOD_RES (20)..(20): Selenocysteine
  MOD_RES (87)..(87): Selenocysteine
  MOD_RES (90)..(91): Selenocysteine
  MOD_RES (96)..(96): Selenocysteine
  MOD_RES (118)..(118): Selenocysteine
  MOD_RES (141)..(141): Selenocysteine
  MOD_RES (149)..(149): Selenocysteine
  MOD_RES (186)..(186): Selenocysteine
  MOD_RES (230)..(230): Selenocysteine
  MOD_RES (266)..(266): Selenocysteine
  MOD_RES (277)..(277): Selenocysteine
  MOD_RES (313)..(315): Selenocysteine
  MOD_RES (348)..(348): Selenocysteine
  MOD_RES (377)..(377): Selenocysteine
  MOD_RES (404)..(404): Selenocysteine
  MOD_RES (478)..(478): Selenocysteine
  MOD_RES (485)..(485): Selenocysteine
  MOD_RES (503)..(503): Selenocysteine
  MOD_RES (513)..(513): Selenocysteine
  MOD_RES (530)..(530): Selenocysteine
  MOD_RES (539)..(539): Selenocysteine
MAXAERRALGIGFQWLSLAXLVLICAGQGGRREDGGPACYGGFDLYFILDKSGSVLHHWNEIYYFVEQLAHKFISPQLRMSFIVFSXRGXXLMKLXEDREQIRQGLEELQKVLPGGDXYMHEGFERASEQIYYENRQGYRXASVIIALXDGELHEDLFFYSEREANRSRDLGAIVYCVGVKDFNEXQLARIADSKDHVFPVNDGFQALQGIIHSILKKSCIEILAAEPSXICAGESFQVVVRGNGFRHARNVDRVLCSFKINDSVXLNEKPFSVEDXYLLCPAPILKEVGMKAALQVSMNDGLSFISSSVIIXXXHCSDGSILAIALLILFLLLALALLWWFWPLCCXVIIKEVPPPPAEESEEEDDDGLPKKKWPXVDASYYGGRGVGGIKRMEVRWGEKGSXEEGAKLEKAKNARVKMPEQEYEFPEPRNLNNNMRRPSSPRKWYSPIKGKLDALWVLLRKGYDRVSVMRPQPGDXGRCINFXRVKNNQPAKYPLNNAYHXSSPPPAPIYXPPPPAPHCPPPPPSAPXPPIPSPPSXLPPPPQAPPPNRAPPPSRPPPRPSV

SEQ ID NO: 2411 - protein, 179 aa, Homo sapiens
  MOD_RES (1)..(1): Any amino acid
  MOD_RES (18)..(18): Selenocysteine
  MOD_RES (62)..(62): Selenocysteine
  MOD_RES (98)..(98): Selenocysteine
  MOD_RES (109)..(109): Selenocysteine
  MOD_RES (145)..(147): Selenocysteine
  MOD_RES (161)..(161): Selenocysteine
XDLGAIVYCVGVKDFNEXQLARIADSKDHVFPVNDGFQALQGIIHSILKKSCIEILAAEPSXICAGESFQVVVRGNGFRHARNVDRVLCSFKINDSVXLNEKPFSVEDXYLLCPAPILKEVGMKAALQVSMNDGLSFISSSVIIXXXHCDGLWFYIQSLEXVKDHRNIRVRNSDLKYCL

SEQ ID NO: 2412 - protein, 115 aa, Homo sapiens
  MOD_RES (24)..(24): Selenocysteine
  MOD_RES (41)..(41): Selenocysteine
  MOD_RES (64)..(64): Selenocysteine
  MOD_RES (70)..(70): Selenocysteine
  MOD_RES (88)..(88): Selenocysteine
  MOD_RES (95)..(95): Selenocysteine
  MOD_RES (101)..(101): Selenocysteine
  MOD_RES (114)..(114): Selenocysteine
MAMVSEFLKQAWFIENEEQEYVQXVKSSKGGPGSAVSPYPXFNPSSDVAALHKAIMVKGVDEAXIIDILXKRNNAQRQQIKAAYLQEXGKPLDEXLKKALXGHLEEVVLALLKXP

SEQ ID NO: 2413 - protein, 346 aa, Homo sapiens
  MOD_RES (24)..(24): Selenocysteine
  MOD_RES (41)..(41): Selenocysteine
  MOD_RES (64)..(64): Selenocysteine
  MOD_RES (70)..(70): Selenocysteine
  MOD_RES (88)..(88): Selenocysteine
  MOD_RES (95)..(95): Selenocysteine
  MOD_RES (101)..(101): Selenocysteine
  MOD_RES (114)..(114): Selenocysteine
  MOD_RES (132)..(132): Selenocysteine
  MOD_RES (136)..(136): Selenocysteine
  MOD_RES (145)..(145): Selenocysteine
  MOD_RES (169)..(169): Selenocysteine
  MOD_RES (172)..(172): Selenocysteine
  MOD_RES (216)..(216): Selenocysteine
  MOD_RES (223)..(223): Selenocysteine
  MOD_RES (226)..(227): Selenocysteine
  MOD_RES (241)..(241): Selenocysteine
  MOD_RES (265)..(265): Selenocysteine
  MOD_RES (272)..(272): Selenocysteine
  MOD_RES (291)..(291): Selenocysteine
  MOD_RES (331)..(331): Selenocysteine
MAMVSEFLKQAWFIENEEQEYVQXVKSSKGGPGSAVSPYPXFNPSSDVAALHKAIMVKGVDEAXIIDILXKRNNAQRQQIKAAYLQEXGKPLDEXLKKALXGHLEEVVLALLKXPAQFDADELRAAMKGLGXDEDXLIEILASRXNKEIRDINRVYREELKRDLAKDIXSDXSGDFRNALLSLAKGDRSEDFGVNEDLADSDARALYEAGERRKGXDVNVFNXILXXRSYPQLRRVFQKYXKYSKHDMNKVLDLELKGDIEKCLXAIVKCAXSKPAFFAEKLHQAMKGVGXRHKALIRIMVSRSEIDMNDIKAFYQKMYGISLCQAILDEXKGDYEKILVALCGGN

SEQ ID NO: 2414 - protein, 204 aa, Homo sapiens
  MOD_RES (8)..(8): Selenocysteine
  MOD_RES (35)..(35): Selenocysteine
  MOD_RES (52)..(52): Selenocysteine
  MOD_RES (75)..(75): Selenocysteine
  MOD_RES (81)..(81): Selenocysteine
  MOD_RES (99)..(99): Selenocysteine
  MOD_RES (106)..(106): Selenocysteine
  MOD_RES (112)..(112): Selenocysteine
  MOD_RES (125)..(125): Selenocysteine
  MOD_RES (143)..(143): Selenocysteine
  MOD_RES (147)..(147): Selenocysteine
  MOD_RES (156)..(156): Selenocysteine
  MOD_RES (180)..(180): Selenocysteine
  MOD_RES (183)..(183): Selenocysteine
MNLILRYXFSKMAMVSEFLKQAWFIENEEQEYVQXVKSSKGGPGSAVSPYPXFNPSSDVAALHKAIMVKGVDEAXIIDILXKRNNAQRQQIKAAYLQEXGKPLDEXLKKALXGHLEEVVLALLKXPAQFDADELRAAMKGLGXDEDXLIEILASRXNKEIRDINRVYREELKRDLAKDIXSDXSGDFRNALLSLAKGDRSEDFG

SEQ ID NO: 2415 - protein, 55 aa, Homo sapiens
  MOD_RES (36)..(36): Selenocysteine
  MOD_RES (42)..(42): Selenocysteine
MASIWGRRDESLKVDEHLAKQDAQILYKAGENRWGXDEDKFXEILCLRSFPQLKL

SEQ ID NO: 2416 - protein, 104 aa, Homo sapiens
  MOD_RES (11)..(11): Selenocysteine
  MOD_RES (36)..(36): Selenocysteine
  MOD_RES (46)..(46): Selenocysteine
  MOD_RES (89)..(89): Selenocysteine
MASIWVGHRGXVRDYPDFSPSVDAEAIQKAIRGIGXDEKMLISILXERSNAQRQLIVKEYQAAYGKELKDDLKGDLSGHFEHLMVALVXPPAVFDAKQLKKSMK

SEQ ID NO: 2417 - protein, 134 aa, Homo sapiens
  MOD_RES (11)..(11): Selenocysteine
  MOD_RES (36)..(36): Selenocysteine
  MOD_RES (46)..(46): Selenocysteine
  MOD_RES (89)..(89): Selenocysteine
  MOD_RES (108)..(108): Selenocysteine
  MOD_RES (118)..(119): Selenocysteine
  MOD_RES (121)..(121): Selenocysteine
  MOD_RES (134)..(134): Selenocysteine
MASIWVGHRGXVRDYPDFSPSVDAEAIQKAIRGIGXDEKMLISILXERSNAQRQLIVKEYQAAYGKELKDDLKGDLSGHFEHLMVALVXPPAVFDAKQLKKSMKGAGXNEDALIEILXXRXSRQMKDISQAYYX

SEQ ID NO: 2418 - protein, 154 aa, Homo sapiens
  MOD_RES (11)..(11): Selenocysteine
  MOD_RES (36)..(36): Selenocysteine
  MOD_RES (46)..(46): Selenocysteine
  MOD_RES (89)..(89): Selenocysteine
  MOD_RES (108)..(108): Selenocysteine
  MOD_RES (118)..(119): Selenocysteine
  MOD_RES (121)..(121): Selenocysteine
  MOD_RES (134)..(134): Selenocysteine
  MOD_RES (148)..(148): Selenocysteine
MASIWVGHRGXVRDYPDFSPSVDAEAIQKAIRGIGXDEKMLISILXERSNAQRQLIVKEYQAAYGKELKDDLKGDLSGHFEHLMVALVXPPAVFDAKQLKKSMKGAGXNEDALIEILXXRXSRQMKDISQAYYXVYKKSLGDDISSEXSGDFRK

SEQ ID NO: 2419 - protein, 323 aa, Homo sapiens
  MOD_RES (11)..(11): Selenocysteine
  MOD_RES (36)..(36): Selenocysteine
  MOD_RES (46)..(46): Selenocysteine
  MOD_RES (89)..(89): Selenocysteine
  MOD_RES (108)..(108): Selenocysteine
  MOD_RES (118)..(119): Selenocysteine
  MOD_RES (121)..(121): Selenocysteine
  MOD_RES (134)..(134): Selenocysteine
  MOD_RES (148)..(148): Selenocysteine
  MOD_RES (158)..(158): Selenocysteine
  MOD_RES (192)..(192): Selenocysteine
  MOD_RES (198)..(198): Selenocysteine
  MOD_RES (212)..(212): Selenocysteine
  MOD_RES (250)..(250): Selenocysteine
  MOD_RES (267)..(267): Selenocysteine
  MOD_RES (271)..(271): Selenocysteine
  MOD_RES (289)..(289): Selenocysteine
  MOD_RES (307)..(307): Selenocysteine
  MOD_RES (314)..(314): Selenocysteine
MASIWVGHRGXVRDYPDFSPSVDAEAIQKAIRGIGXDEKMLISILXERSNAQRQLIVKEYQAAYGKELKDDLKGDLSGHFEHLMVALVXPPAVFDAKQLKKSMKGAGXNEDALIEILXXRXSRQMKDISQAYYXVYKKSLGDDISSEXSGDFRKALLXLADGRRDESLKVDEHLAKQDAQILYKAGENRWGXDEDKFXEILCLRSFPQLKLXFDEYRNISQKDIVDSIKGELSGHFEDLLLAIVNCVRNXPAFLAERLHRALKGIGXDEFXLNRIMVSRSEIDLLDIRXEFKKHYGYSLYSAIKSDXSGDYEIXLLKICGGDD

SEQ ID NO: 2420 - protein, 284 aa, Homo sapiens
  MOD_RES (7)..(7): Selenocysteine
  MOD_RES (50)..(50): Selenocysteine
  MOD_RES (69)..(69): Selenocysteine
  MOD_RES (79)..(80): Selenocysteine
  MOD_RES (82)..(82): Selenocysteine
  MOD_RES (95)..(95): Selenocysteine
  MOD_RES (109)..(109): Selenocysteine
  MOD_RES (119)..(119): Selenocysteine
  MOD_RES (153)..(153): Selenocysteine
  MOD_RES (159)..(159): Selenocysteine
  MOD_RES (173)..(173): Selenocysteine
  MOD_RES (211)..(211): Selenocysteine
  MOD_RES (228)..(228): Selenocysteine
  MOD_RES (232)..(232): Selenocysteine
  MOD_RES (250)..(250): Selenocysteine
  MOD_RES (268)..(268): Selenocysteine
  MOD_RES (275)..(275): Selenocysteine
MLISILXERSNAQRQLIVKEYQAAYGKELKDDLKGDLSGHFEHLMVALVXPPAVFDAKQLKKSMKGAGXNEDALIEILXXRXSRQMKDISQAYYXVYKKSLGDDISSEXSGDFRKALLXLADGRRDESLKVDEHLAKQDAQILYKAGENRWGXDEDKFXEILCLRSFPQLKLXFDEYRNISQKDIVDSIKGELSGHFEDLLLAIVNCVRNXPAFLAERLHRALKGIGXDEFXLNRIMVSRSEIDLLDIRXEFKKHYGYSLYSAIKSDXSGDYEIXLLKICGGDD

SEQ ID NO: 2421 - protein, 299 aa, Homo sapiens
  MOD_RES (5)..(5): Selenocysteine
  MOD_RES (9)..(9): Selenocysteine
  MOD_RES (24)..(24): Selenocysteine
  MOD_RES (34)..(34): Selenocysteine
  MOD_RES (48)..(48): Selenocysteine
  MOD_RES (56)..(56): Selenocysteine
  MOD_RES (61)..(61): Selenocysteine
  MOD_RES (84)..(84): Selenocysteine
  MOD_RES (97)..(97): Selenocysteine
  MOD_RES (107)..(107): Selenocysteine
  MOD_RES (124)..(124): Selenocysteine
  MOD_RES (168)..(168): Selenocysteine
  MOD_RES (175)..(175): Selenocysteine
  MOD_RES (208)..(208): Selenocysteine
  MOD_RES (243)..(243): Selenocysteine
  MOD_RES (247)..(247): Selenocysteine
  MOD_RES (283)..(283): Selenocysteine
MAMAXKGGXVKAASGFNAMEDAQXLRKAMKGLGXDEDAIISVLAYRNXAQRQEIRXAYKSXIGRDLIDDLKSELSGNFEQGAGXDEGCLIEILASRXPEEIRRISQXYQQQYGRSLEDDIRSDXSFMFQRVLVSLSAGGRDEGNYLDDALVRQDAQDLYEAGEKKWGXDEVKFLXVLCSRNRNHLLHVFDEYKRISQKDIEQSIKSEXSGSFEDALLAIVKCMRNKSAYFAEKLYKSMKGLGXDDNXLIRVMVSRAEIDMLDIRAHFKRLYGKSLYSFIKGDXSGDYRKVLLVLCGGDD

SEQ ID NO: 2422 - protein, 142 aa, Homo sapiens
  MOD_RES (5)..(5): Selenocysteine
  MOD_RES (9)..(9): Selenocysteine
  MOD_RES (24)..(24): Selenocysteine
  MOD_RES (34)..(34): Selenocysteine
  MOD_RES (48)..(48): Selenocysteine
  MOD_RES (56)..(56): Selenocysteine
  MOD_RES (61)..(61): Selenocysteine
  MOD_RES (84)..(84): Selenocysteine
  MOD_RES (97)..(97): Selenocysteine
  MOD_RES (107)..(107): Selenocysteine
  MOD_RES (124)..(124): Selenocysteine
MAMAXKGGXVKAASGFNAMEDAQXLRKAMKGLGXDEDAIISVLAYRNXAQRQEIRXAYKSXIGRDLIDDLKSELSGNFEQGAGXDEGCLIEILASRXPEEIRRISQXYQQQYGRSLEDDIRSDXSFMFQRVLVSLSAVSDCF

SEQ ID NO: 2423 - protein, 321 aa, Homo sapiens
  MOD_RES (5)..(5): Selenocysteine
  MOD_RES (9)..(9): Selenocysteine
  MOD_RES (24)..(24): Selenocysteine
  MOD_RES (34)..(34): Selenocysteine
  MOD_RES (48)..(48): Selenocysteine
  MOD_RES (56)..(56): Selenocysteine
  MOD_RES (61)..(61): Selenocysteine
  MOD_RES (87)..(87): Selenocysteine
  MOD_RES (89)..(89): Selenocysteine
  MOD_RES (106)..(106): Selenocysteine
  MOD_RES (119)..(119): Selenocysteine
  MOD_RES (129)..(129): Selenocysteine
  MOD_RES (146)..(146): Selenocysteine
  MOD_RES (190)..(190): Selenocysteine
  MOD_RES (197)..(197): Selenocysteine
  MOD_RES (230)..(230): Selenocysteine
  MOD_RES (265)..(265): Selenocysteine
  MOD_RES (269)..(269): Selenocysteine
  MOD_RES (305)..(305): Selenocysteine
MAMAXKGGXVKAASGFNAMEDAQXLRKAMKGLGXDEDAIISVLAYRNXAQRQEIRXAYKSXIGRDLIDDLKSELSGNFEQVIVGMMXPXVLYDVQELRRAMKGAGXDEGCLIEILASRXPEEIRRISQXYQQQYGRSLEDDIRSDXSFMFQRVLVSLSAGGRDEGNYLDDALVRQDAQDLYEAGEKKWGXDEVKFLXVLCSRNRNHLLHVFDEYKRISQKDIEQSIKSEXSGSFEDALLAIVKCMRNKSAYFAEKLYKSMKGLGXDDNXLIRVMVSRAEIDMLDIRAHFKRLYGKSLYSFIKGDXSGDYRKVLLVLCGGDD

SEQ ID NO: 2424 - protein, 8 aa, Homo sapiens
  MOD_RES (3)..(3): Selenocysteine
  MOD_RES (8)..(8): Selenocysteine
SQXYQQRX

SEQ ID NO: 2425 - protein, 7 aa, Homo sapiens
  MOD_RES (1)..(1): Any amino acid
  MOD_RES (2)..(2): Selenocysteine
  MOD_RES (7)..(7): Selenocysteine
XXYQQRX

SEQ ID NO: 2426 - protein, 260 aa, Homo sapiens
  MOD_RES (14)..(14): Selenocysteine
  MOD_RES (45)..(45): Selenocysteine
  MOD_RES (51)..(51): Selenocysteine
  MOD_RES (58)..(58): Selenocysteine
  MOD_RES (85)..(85): Selenocysteine
  MOD_RES (129)..(129): Selenocysteine
  MOD_RES (136)..(136): Selenocysteine
  MOD_RES (140)..(140): Selenocysteine
  MOD_RES (155)..(155): Selenocysteine
  MOD_RES (164)..(164): Selenocysteine
  MOD_RES (169)..(169): Selenocysteine
  MOD_RES (194)..(194): Selenocysteine
  MOD_RES (204)..(204): Selenocysteine
  MOD_RES (208)..(208): Selenocysteine
  MOD_RES (234)..(234): Selenocysteine
  MOD_RES (244)..(244): Selenocysteine
MAQDLLDDLKSELXGKFEKLIVALMKPSRLYDAYELKHALKGAGXNEKVLXEIIASRXPEELRAIKQVYEEEYGSSLEDDVVGDXSGYYQRMLVVLLQANRDPDAGIDEAQVEQDAQALFQAGELKWGXDEEKFIXIFGXRSVSHLRKVFDKYMXISGFQIEEXIDREXSGNLEQLLLAVVKSIRSIPAYLAEXLYYAMKGAGXDDHXLIRVMVSRSEIDLFNIRKEFRKNFAXSLYSMIKGDXSGDYKKALLLLCGEDD

SEQ ID NO: 2427 - protein, 220 aa, Homo sapiens
  MOD_RES (8)..(8): Selenocysteine
  MOD_RES (10)..(10): Selenocysteine
  MOD_RES (23)..(23): Selenocysteine
  MOD_RES (45)..(45): Selenocysteine
  MOD_RES (89)..(89): Selenocysteine
  MOD_RES (96)..(96): Selenocysteine
  MOD_RES (100)..(100): Selenocysteine
  MOD_RES (115)..(115): Selenocysteine
  MOD_RES (124)..(124): Selenocysteine
  MOD_RES (129)..(129): Selenocysteine
  MOD_RES (154)..(154): Selenocysteine
  MOD_RES (164)..(164): Selenocysteine
  MOD_RES (168)..(168): Selenocysteine
  MOD_RES (194)..(194): Selenocysteine
  MOD_RES (204)..(204): Selenocysteine
MAQVLRGXVXDFPGFDERADAEXLRKAMKGLEYGSSLEDDVVGDXSGYYQRMLVVLLQANRDPDAGIDEAQVEQDAQALFQAGELKWGXDEEKFIXIFGXRSVSHLRKVFDKYMXISGFQIEEXIDREXSGNLEQLLLAVVKSIRSIPAYLAEXLYYAMKGAGXDDHXLIRVMVSRSEIDLFNIRKEFRKNFAXSLYSMIKGDXSGDYKKALLLLCGEDD

SEQ ID NO: 2428 - protein, 35 aa, Homo sapiens
  MOD_RES (8)..(8): Selenocysteine
  MOD_RES (10)..(10): Selenocysteine
  MOD_RES (23)..(23): Selenocysteine
MAQVLRGXVXDFPGFDERADAEXLRKAMKGLGSSG

SEQ ID NO: 2429 - protein, 320 aa, Homo sapiens
  MOD_RES (8)..(8): Selenocysteine
  MOD_RES (10)..(10): Selenocysteine
  MOD_RES (23)..(23): Selenocysteine
  MOD_RES (33)..(33): Selenocysteine
  MOD_RES (40)..(40): Selenocysteine
  MOD_RES (43)..(43): Selenocysteine
  MOD_RES (59)..(59): Selenocysteine
  MOD_RES (74)..(74): Selenocysteine
  MOD_RES (105)..(105): Selenocysteine
  MOD_RES (111)..(111): Selenocysteine
  MOD_RES (118)..(118): Selenocysteine
  MOD_RES (145)..(145): Selenocysteine
  MOD_RES (189)..(189): Selenocysteine
  MOD_RES (196)..(196): Selenocysteine
  MOD_RES (200)..(200): Selenocysteine
  MOD_RES (215)..(215): Selenocysteine
  MOD_RES (224)..(224): Selenocysteine
  MOD_RES (229)..(229): Selenocysteine
  MOD_RES (254)..(254): Selenocysteine
  MOD_RES (264)..(264): Selenocysteine
  MOD_RES (268)..(268): Selenocysteine
  MOD_RES (294)..(294): Selenocysteine
  MOD_RES (304)..(304): Selenocysteine
MAQVLRGXVXDFPGFDERADAEXLRKAMKGLGXDEESILXLLXSRSNAQRQEISAAFKXLFGRDLLDDLKSELXGKFEKLIVALMKPSRLYDAYELKHALKGAGXNEKVLXEIIASRXPEELRAIKQVYEEEYGSSLEDDVVGDXSGYYQRMLVVLLQANRDPDAGIDEAQVEQDAQALFQAGELKWGXDEEKFIXIFGXRSVSHLRKVFDKYMXISGFQIEEXIDREXSGNLEQLLLAVVKSIRSIPAYLAEXLYYAMKGAGXDDHXLIRVMVSRSEIDLFNIRKEFRKNFAXSLYSMIKGDXSGDYKKALLLLCGEDD

SEQ ID NO: 2430 - protein, 163 aa, Homo sapiens
  MOD_RES (8)..(8): Selenocysteine
  MOD_RES (10)..(10): Selenocysteine
  MOD_RES (23)..(23): Selenocysteine
  MOD_RES (33)..(33): Selenocysteine
  MOD_RES (40)..(40): Selenocysteine
  MOD_RES (43)..(43): Selenocysteine
  MOD_RES (59)..(59): Selenocysteine
  MOD_RES (74)..(74): Selenocysteine
  MOD_RES (105)..(105): Selenocysteine
  MOD_RES (111)..(111): Selenocysteine
  MOD_RES (118)..(118): Selenocysteine
  MOD_RES (145)..(145): Selenocysteine
MAQVLRGXVXDFPGFDERADAEXLRKAMKGLGXDEESILXLLXSRSNAQRQEISAAFKXLFGRDLLDDLKSELXGKFEKLIVALMKPSRLYDAYELKHALKGAGXNEKVLXEIIASRXPEELRAIKQVYEEEYGSSLEDDVVGDXSGYYQRMLVVLLQVLRGD

SEQ ID NO: 2431 - protein, 95 aa, Homo sapiens
  MOD_RES (31)..(31): Selenocysteine
  MOD_RES (48)..(48): Selenocysteine
  MOD_RES (79)..(79): Selenocysteine
  MOD_RES (95)..(95): Selenocysteine
MAKPAQGAKYRGSIHDFPGFDPNQDAEALYXAMKGFGSDKEAILDIIXSRSNRQRQEVCQSYKSLYGKDLIADLKYELXGKFERLIVGGLSDVGX

SEQ ID NO: 2432 - protein, 156 aa, Homo sapiens
  MOD_RES (31)..(31): Selenocysteine
  MOD_RES (48)..(48): Selenocysteine
  MOD_RES (79)..(79): Selenocysteine
  MOD_RES (110)..(110): Selenocysteine
  MOD_RES (114)..(114): Selenocysteine
  MOD_RES (116)..(116): Selenocysteine
  MOD_RES (150)..(150): Selenocysteine
MAKPAQGAKYRGSIHDFPGFDPNQDAEALYXAMKGFGSDKEAILDIIXSRSNRQRQEVCQSYKSLYGKDLIADLKYELXGKFERLIVGLMRPPAYCDAKEIKDAISGAGXDEKXLXRIMVSRSEIDLLNIRREFIEKYDKSLHQAIEGDXSGDFLK

SEQ ID NO: 2433 - protein, 110 aa, Homo sapiens
  MOD_RES (31)..(31): Selenocysteine
  MOD_RES (48)..(48): Selenocysteine
  MOD_RES (79)..(79): Selenocysteine
  MOD_RES (110)..(110): Selenocysteine
MAKPAQGAKYRGSIHDFPGFDPNQDAEALYXAMKGFGSDKEAILDIIXSRSNRQRQEVCQSYKSLYGKDLIADLKYELXGKFERLIVGLMRPPAYCDAKEIKDAISGIGX

SEQ ID NO: 2434 - protein, 673 aa, Homo sapiens
  MOD_RES (31)..(31): Selenocysteine
  MOD_RES (48)..(48): Selenocysteine
  MOD_RES (79)..(79): Selenocysteine
  MOD_RES (110)..(110): Selenocysteine
  MOD_RES (123)..(123): Selenocysteine
  MOD_RES (150)..(150): Selenocysteine
  MOD_RES (165)..(165): Selenocysteine
  MOD_RES (194)..(194): Selenocysteine
  MOD_RES (221)..(222): Selenocysteine
  MOD_RES (252)..(252): Selenocysteine
  MOD_RES (269)..(269): Selenocysteine
  MOD_RES (273)..(273): Selenocysteine
  MOD_RES (295)..(295): Selenocysteine
  MOD_RES (309)..(309): Selenocysteine
  MOD_RES (316)..(316): Selenocysteine
  MOD_RES (356)..(356): Selenocysteine
  MOD_RES (381)..(381): Selenocysteine
  MOD_RES (385)..(385): Selenocysteine
  MOD_RES (391)..(391): Selenocysteine
  MOD_RES (404)..(404): Selenocysteine
  MOD_RES (415)..(415): Selenocysteine
  MOD_RES (453)..(453): Selenocysteine
  MOD_RES (464)..(464): Selenocysteine
  MOD_RES (466)..(466): Selenocysteine
  MOD_RES (493)..(493): Selenocysteine
  MOD_RES (506)..(506): Selenocysteine
  MOD_RES (535)..(535): Selenocysteine
  MOD_RES (541)..(541): Selenocysteine
  MOD_RES (545)..(545): Selenocysteine
  MOD_RES (549)..(549): Selenocysteine
  MOD_RES (553)..(553): Selenocysteine
  MOD_RES (570)..(570): Selenocysteine
  MOD_RES (577)..(577): Selenocysteine
  MOD_RES (617)..(617): Selenocysteine
  MOD_RES (621)..(621): Selenocysteine
  MOD_RES (623)..(623): Selenocysteine
  MOD_RES (657)..(657): Selenocysteine
MAKPAQGAKYRGSIHDFPGFDPNQDAEALYXAMKGFGSDKEAILDIIXSRSNRQRQEVCQSYKSLYGKDLIADLKYELXGKFERLIVGLMRPPAYCDAKEIKDAISGIGXDEKCLIEILASRXNEQMHQLVAAYKDAYERDLEADIIGDXSGHFQKMLVVLLQGXREEDDVVSEDLVQQDVQDLYEAGELKWGXDEAQFIYILGNRSKQHLRLVFDEYLKXXGKPIEASIRGELSGDFEKLMLAVVKCIRSXPEYFAERLFKAMKGLGXRDNXLIRIMVSRSELDMLDIREIFRXKYEKSLYSMIKNDXSGEYKKXLLKLSGGDDDAAGQFFPEAAQVAYQMWELSAVARVELKGXVRPANDFNPDADAKALRKAMKGLGXDEDXIIDIIXHRSNVQRQQIRQXFKSHFGRDLMXDLKSEISGDLARLILGLMMPPAHYDAKQLKKAMEGAGXDEKALIEILAXRXNAEIRAINEAYKEDYHKSLEDALSSDXSGHFRRILISLAXGHREEGGENLDQAREDAQVAAEILEIADXPSGDKXSLEXRFMXILCXRSYPHLRRVFQEFIKMXNYDVEHXIKKEMSGDVRDAFVAIVQSVKNKPLFFADKLYKSMKGAGXDEKXLXRIMVSRSEIDLLNIRREFIEKYDKSLHQAIEGDXSGDFLKALLALCGGED

SEQ ID NO: 2435 - protein, 129 aa, Homo sapiens
  MOD_RES (31)..(31): Selenocysteine
  MOD_RES (48)..(48): Selenocysteine
  MOD_RES (79)..(79): Selenocysteine
  MOD_RES (110)..(110): Selenocysteine
  MOD_RES (123)..(123): Selenocysteine
  MOD_RES (125)..(125): Selenocysteine
MAKPAQGAKYRGSIHDFPGFDPNQDAEALYXAMKGFGSDKEAILDIIXSRSNRQRQEVCQSYKSLYGKDLIADLKYELXGKFERLIVGLMRPPAYCDAKEIKDAISGIGXDEKCLIEILASRXYXRQGN

SEQ ID NO: 2436 - protein, 460 aa, Homo sapiens
  MOD_RES (31)..(31): Selenocysteine
  MOD_RES (48)..(48): Selenocysteine
  MOD_RES (88)..(88): Selenocysteine
  MOD_RES (102)..(102): Selenocysteine
  MOD_RES (109)..(109): Selenocysteine
  MOD_RES (149)..(149): Selenocysteine
  MOD_RES (174)..(174): Selenocysteine
  MOD_RES (178)..(178): Selenocysteine
  MOD_RES (184)..(184): Selenocysteine
  MOD_RES (197)..(197): Selenocysteine
  MOD_RES (208)..(208): Selenocysteine
  MOD_RES (246)..(246): Selenocysteine
  MOD_RES (257)..(257): Selenocysteine
  MOD_RES (259)..(259): Selenocysteine
  MOD_RES (286)..(286): Selenocysteine
  MOD_RES (299)..(299): Selenocysteine
  MOD_RES (322)..(322): Selenocysteine
  MOD_RES (328)..(328): Selenocysteine
  MOD_RES (332)..(332): Selenocysteine
  MOD_RES (336)..(336): Selenocysteine
  MOD_RES (340)..(340): Selenocysteine
  MOD_RES (357)..(357): Selenocysteine
  MOD_RES (364)..(364): Selenocysteine
  MOD_RES (404)..(404): Selenocysteine
  MOD_RES (408)..(408): Selenocysteine
  MOD_RES (410)..(410): Selenocysteine
  MOD_RES (444)..(444): Selenocysteine
MAKPAQGAKYRGSIHDFPGFDPNQDAEALYXAMKGFGSDKEAILDIIXSRSNRQRQEVCQSYKSLYGKDLIADLNELDMLDIREIFRXKYEKSLYSMIKNDXSGEYKKXLLKLSGGDDDAAGQFFPEAAQVAYQMWELSAVARVELKGXVRPANDFNPDADAKALRKAMKGLGXDEDXIIDIIXHRSNVQRQQIRQXFKSHFGRDLMXDLKSEISGDLARLILGLMMPPAHYDAKQLKKAMEGAGXDEKALIEILAXRXNAEIRAINEAYKEDYHKSLEDALSSDXSGHFRRILISLAXGHREEGGENLDQAREDAQEIADXPSGDKXSLEXRFMXILCXRSYPHLRRVFQEFIKMXNYDVEHXIKKEMSGDVRDAFVAIVQSVKNKPLFFADKLYKSMKGAGXDEKXLXRIMVSRSEIDLLNIRREFIEKYDKSLHQAIEGDXSGDFLKALLALCGGED

SEQ ID NO: 2437 - protein, 330 aa, Homo sapiens
  MOD_RES (31)..(31): Selenocysteine
  MOD_RES (48)..(48): Selenocysteine
  MOD_RES (72)..(72): Selenocysteine
  MOD_RES (110)..(110): Selenocysteine
  MOD_RES (121)..(121): Selenocysteine
  MOD_RES (123)..(123): Selenocysteine
  MOD_RES (150)..(150): Selenocysteine
  MOD_RES (163)..(163): Selenocysteine
  MOD_RES (192)..(192): Selenocysteine
  MOD_RES (198)..(198): Selenocysteine
  MOD_RES (202)..(202): Selenocysteine
  MOD_RES (206)..(206): Selenocysteine
  MOD_RES (210)..(210): Selenocysteine
  MOD_RES (227)..(227): Selenocysteine
  MOD_RES (234)..(234): Selenocysteine
  MOD_RES (274)..(274): Selenocysteine
  MOD_RES (278)..(278): Selenocysteine
  MOD_RES (280)..(280): Selenocysteine
  MOD_RES (314)..(314): Selenocysteine
MAKPAQGAKYRGSIHDFPGFDPNQDAEALYXAMKGFGSDKEAILDIIXSRSNRQRQEVCQSYKSLYGKDLMXDLKSEISGDLARLILGLMMPPAHYDAKQLKKAMEGAGXDEKALIEILAXRXNAEIRAINEAYKEDYHKSLEDALSSDXSGHFRRILISLAXGHREEGGENLDQAREDAQVAAEILEIADXPSGDKXSLEXRFMXILCXRSYPHLRRVFQEFIKMXNYDVEHXIKKEMSGDVRDAFVAIVQSVKNKPLFFADKLYKSMKGAGXDEKXLXRIMVSRSEIDLLNIRREFIEKYDKSLHQAIEGDXSGDFLKALLALCGGED

SEQ ID NO: 2438 - protein, 130 aa, Homo sapiens
  MOD_RES (16)..(16): Selenocysteine
  MOD_RES (47)..(47): Selenocysteine
  MOD_RES (78)..(78): Selenocysteine
  MOD_RES (91)..(91): Selenocysteine
  MOD_RES (118)..(118): Selenocysteine
MKGFGSDKEAILDIIXSRSNRQRQEVCQSYKSLYGKDLIADLKYELXGKFERLIVGLMRPPAYCDAKEIKDAISGIGXDEKCLIEILASRXNEQMHQLVAAYKDAYERDLEADIIGDXSGHFQKMLVVLL

SEQ ID NO: 2439 - protein, 150 aa, Homo sapiens
  MOD_RES (16)..(16): Selenocysteine
  MOD_RES (47)..(47): Selenocysteine
  MOD_RES (78)..(78): Selenocysteine
  MOD_RES (91)..(91): Selenocysteine
  MOD_RES (118)..(118): Selenocysteine
  MOD_RES (133)..(133): Selenocysteine
MKGFGSDKEAILDIIXSRSNRQRQEVCQSYKSLYGKDLIADLKYELXGKFERLIVGLMRPPAYCDAKEIKDAISGIGXDEKCLIEILASRXNEQMHQLVAAYKDAYERDLEADIIGDXSGHFQKMLVVLLQGXREEDDVVSEDLVQQDVQ

SEQ ID NO: 2440 - protein, 641 aa, Homo sapiens
  MOD_RES (16)..(16): Selenocysteine
  MOD_RES (47)..(47): Selenocysteine
  MOD_RES (78)..(78): Selenocysteine
  MOD_RES (91)..(91): Selenocysteine
  MOD_RES (118)..(118): Selenocysteine
  MOD_RES (133)..(133): Selenocysteine
  MOD_RES (162)..(162): Selenocysteine
  MOD_RES (189)..(190): Selenocysteine
  MOD_RES (220)..(220): Selenocysteine
  MOD_RES (237)..(237): Selenocysteine
  MOD_RES (241)..(241): Selenocysteine
  MOD_RES (263)..(263): Selenocysteine
  MOD_RES (277)..(277): Selenocysteine
  MOD_RES (284)..(284): Selenocysteine
  MOD_RES (324)..(324): Selenocysteine
  MOD_RES (349)..(349): Selenocysteine
  MOD_RES (353)..(353): Selenocysteine
  MOD_RES (359)..(359): Selenocysteine
  MOD_RES (372)..(372): Selenocysteine
  MOD_RES (383)..(383): Selenocysteine
  MOD_RES (421)..(421): Selenocysteine
  MOD_RES (432)..(432): Selenocysteine
  MOD_RES (434)..(434): Selenocysteine
  MOD_RES (461)..(461): Selenocysteine
  MOD_RES (474)..(474): Selenocysteine
  MOD_RES (503)..(503): Selenocysteine
  MOD_RES (509)..(509): Selenocysteine
  MOD_RES (513)..(513): Selenocysteine
  MOD_RES (517)..(517): Selenocysteine
  MOD_RES (521)..(521): Selenocysteine
  MOD_RES (538)..(538): Selenocysteine
  MOD_RES (545)..(545): Selenocysteine
  MOD_RES (585)..(585): Selenocysteine
  MOD_RES (589)..(589): Selenocysteine
  MOD_RES (591)..(591): Selenocysteine
  MOD_RES (625)..(625): Selenocysteine
MKGFGSDKEAILDIIXSRSNRQRQEVCQSYKSLYGKDLIADLKYELXGKFERLIVGLMRPPAYCDAKEIKDAISGIGXDEKCLIEILASRXNEQMHQLVAAYKDAYERDLEADIIGDXSGHFQKMLVVLLQGXREEDDVVSEDLVQQDVQDLYEAGELKWGXDEAQFIYILGNRSKQHLRLVFDEYLKXXGKPIEASIRGELSGDFEKLMLAVVKCIRSXPEYFAERLFKAMKGLGXRDNXLIRIMVSRSELDMLDIREIFRXKYEKSLYSMIKNDXSGEYKKXLLKLSGGDDDAAGQFFPEAAQVAYQMWELSAVARVELKGXVRPANDFNPDADAKALRKAMKGLGXDEDXIIDIIXHRSNVQRQQIRQXFKSHFGRDLMXDLKSEISGDLARLILGLMMPPAHYDAKQLKKAMEGAGXDEKALIEILAXRXNAEIRAINEAYKEDYHKSLEDALSSDXSGHFRRILISLAXGHREEGGENLDQAREDAQVAAEILEIADXPSGDKXSLEXRFMXILCXRSYPHLRRVFQEFIKMXNYDVEHXIKKEMSGDVRDAFVAIVQSVKNKPLFFADKLYKSMKGAGXDEKXLXRIMVSRSEIDLLNIRREFIEKYDKSLHQAIEGDXSGDFLKALLALCGGED

SEQ ID NO: 2441 - protein, 91 aa, Homo sapiens
  MOD_RES (1)..(1): Any amino acid
  MOD_RES (14)..(14): Selenocysteine
  MOD_RES (18)..(18): Selenocysteine
  MOD_RES (20)..(20): Selenocysteine
  MOD_RES (54)..(54): Selenocysteine
  MOD_RES (89)..(89): Selenocysteine
XADKLYKSMKGAGXDEKXLXRIMVSRSEIDLLNIRREFIEKYDKSLHQAIEGDXSGDFLKALLALCGGRARVLDQEFGCLGSNLHLPCXCF

SEQ ID NO: 2442 - protein, 345 aa, Homo sapiens
  MOD_RES (4)..(4): Selenocysteine
  MOD_RES (13)..(13): Selenocysteine
  MOD_RES (26)..(26): Selenocysteine
  MOD_RES (31)..(31): Selenocysteine
  MOD_RES (34)..(34): Selenocysteine
  MOD_RES (37)..(37): Selenocysteine
  MOD_RES (55)..(55): Selenocysteine
  MOD_RES (69)..(69): Selenocysteine
  MOD_RES (87)..(87): Selenocysteine
  MOD_RES (114)..(114): Selenocysteine
  MOD_RES (124)..(124): Selenocysteine
  MOD_RES (142)..(142): Selenocysteine
  MOD_RES (144)..(144): Selenocysteine
  MOD_RES (168)..(168): Selenocysteine
  MOD_RES (171)..(171): Selenocysteine
  MOD_RES (217)..(217): Selenocysteine
  MOD_RES (223)..(223): Selenocysteine
  MOD_RES (241)..(241): Selenocysteine
  MOD_RES (271)..(271): Selenocysteine
  MOD_RES (286)..(286): Selenocysteine
  MOD_RES (303)..(303): Selenocysteine
MSVXGGKMAPSLXQEILSHLGLASKXAAWGXLGXLRXFLNFSVDKDAQRLLRAIXGQGVDRSAIVDVLXNRSREQRQLISRNFQERXQQDLMKSLQAALSGNLERIVMALLQPXAQFDAQELRXALKASDSAVDVAIEILAXRXPPQLQECLAVYKHNFQVEAVDDIXSEXSGILQDLLLALAKGGRDSYSGIIDYNLAEQDVQALQRAEGPSREEXWVPVFXQRNPEHLIRVFDQYQRSXGQELEEAVQNRFHGDAQVALLGLASVIKNXPLYFADKLHQALQEXEPNYQVLIRILISRCEXDLLSIRAEFRKKFGKSLYSSLQDAVKGDCQSALLALCRAEDM

SEQ ID NO: 2443 - protein, 955 aa, Homo sapiens
  MOD_RES (89)..(89): Selenocysteine
  MOD_RES (126)..(126): Selenocysteine
  MOD_RES (189)..(189): Selenocysteine
  MOD_RES (205)..(205): Selenocysteine
  MOD_RES (212)..(212): Selenocysteine
  MOD_RES (224)..(224): Selenocysteine
  MOD_RES (242)..(242): Selenocysteine
  MOD_RES (248)..(248): Selenocysteine
  MOD_RES (286)..(286): Selenocysteine
  MOD_RES (313)..(313): Selenocysteine
  MOD_RES (343)..(343): Selenocysteine
  MOD_RES (355)..(355): Selenocysteine
  MOD_RES (368)..(368): Selenocysteine
  MOD_RES (372)..(372): Selenocysteine
  MOD_RES (379)..(379): Selenocysteine
  MOD_RES (415)..(415): Selenocysteine
  MOD_RES (445)..(445): Selenocysteine
  MOD_RES (470)..(470): Selenocysteine
  MOD_RES (482)..(482): Selenocysteine
  MOD_RES (537)..(537): Selenocysteine
  MOD_RES (544)..(544): Selenocysteine
  MOD_RES (555)..(555): Selenocysteine
  MOD_RES (558)..(558): Selenocysteine
  MOD_RES (585)..(585): Selenocysteine
  MOD_RES (592)..(592): Selenocysteine
  MOD_RES (597)..(597): Selenocysteine
  MOD_RES (647)..(647): Selenocysteine
  MOD_RES (650)..(650): Selenocysteine
  MOD_RES (653)..(653): Selenocysteine
  MOD_RES (698)..(698): Selenocysteine
  MOD_RES (762)..(762): Selenocysteine
  MOD_RES (772)..(772): Selenocysteine
  MOD_RES (781)..(781): Selenocysteine
  MOD_RES (787)..(787): Selenocysteine
  MOD_RES (814)..(814): Selenocysteine
  MOD_RES (832)..(832): Selenocysteine
  MOD_RES (838)..(838): Selenocysteine
  MOD_RES (846)..(846): Selenocysteine
  MOD_RES (882)..(882): Selenocysteine
  MOD_RES (912)..(912): Selenocysteine
  MOD_RES (935)..(935): Selenocysteine
  MOD_RES (938)..(938): Selenocysteine
MPAVSKGDGMRGLAVFISDIRNCKSKEAEIKRINKELANIRSKFKGDKALDGYSKKKYVCKLLFIFLLGHDIDFGHMEAVNLLSSNKYXEKQIGYLFISVLVNSNSELIRLINNAIKNDLASRNPXFMCLALHCIANVGSREMGEAFAADIPRILVAGDSMDSVKQSAALCLLRLYKASPDLVPMGEWXARVVHLLNDQHMGVVXAAVSLIXCLCKKNPDDFKXCVSLAVSRLSRIVSSASXDLQDYXYYFVPAPWLSVKLLRLLQCYPPPEDAAVKGRLVECLEXVLNKAQEPPKSKKVQHSNAKNAILFEXISLIIHYDSEPNLLVRACNQLGQFLQHREXNLRYLALESMCXLASSEFSHEAVKXHIDXVINALKXERDVSVRQRAADLLYAMCDRSNAKQIVSEMLRYLEXADYAIREEIVLKVAILAEKYAVDYSWYVDXILNLIRIAGDYVSEEVWYRVLQIVXNRDDVQGYAAKXVFEALQAPACHENMVKVGGYILGEFGNLIAGDPRSSPPVQFSLLHSKFHLCSVAXRALLLSXYIKFINLFPEXKAXIQGVLRAGSQLRNADVELQQRAVEYLXLSSVASXDVLAXVLEEMPPFPERESSILAKLKRKKGPGAGSALDDGRRDPSSNDINGGMEPXPSXVSXPSPSADLLGLRAAPPPAAPPASAGAGNLLVDVFDGPAAQPSLGPXPEEAFLSPGPEDIGPPIPEADELLNKFVCKNNGVLFENQLLQIGVKSEFRQNLGRMYLFYGNKXSVQFQNFSPXVVHPGDLQXQLAVQXKRVAAQVDGGAQVQQVLNIECLRDFLXPPLLSVRFRYGGAPQALXLKLPVXINKFFQPXEMAAQDFFQRWKQLSLPQQEAQKIFKANHPMDAEVXKAKLLGFGSALLDNVDPNPENFVGAGIIQXKALQVGCLLRLEPNAQAQMYRLXLRXSKEPVSRHLCELLAQQF

SEQ ID NO: 2444 - protein, 977 aa, Homo sapiens
  MOD_RES (89)..(89): Selenocysteine
  MOD_RES (126)..(126): Selenocysteine
  MOD_RES (189)..(189): Selenocysteine
  MOD_RES (205)..(205): Selenocysteine
  MOD_RES (212)..(212): Selenocysteine
  MOD_RES (224)..(224): Selenocysteine
  MOD_RES (242)..(242): Selenocysteine
  MOD_RES (248)..(248): Selenocysteine
  MOD_RES (286)..(286): Selenocysteine
  MOD_RES (313)..(313): Selenocysteine
  MOD_RES (343)..(343): Selenocysteine
  MOD_RES (355)..(355): Selenocysteine
  MOD_RES (368)..(368): Selenocysteine
  MOD_RES (372)..(372): Selenocysteine
  MOD_RES (379)..(379): Selenocysteine
  MOD_RES (415)..(415): Selenocysteine
  MOD_RES (445)..(445): Selenocysteine
  MOD_RES (470)..(470): Selenocysteine
  MOD_RES (482)..(482): Selenocysteine
  MOD_RES (537)..(537): Selenocysteine
  MOD_RES (544)..(544): Selenocysteine
  MOD_RES (555)..(555): Selenocysteine
  MOD_RES (558)..(558): Selenocysteine
  MOD_RES (585)..(585): Selenocysteine
  MOD_RES (592)..(592): Selenocysteine
  MOD_RES (597)..(597): Selenocysteine
  MOD_RES (647)..(647): Selenocysteine
  MOD_RES (650)..(650): Selenocysteine
  MOD_RES (653)..(653): Selenocysteine
  MOD_RES (698)..(698): Selenocysteine
  MOD_RES (784)..(784): Selenocysteine
  MOD_RES (794)..(794): Selenocysteine
  MOD_RES (803)..(803): Selenocysteine
  MOD_RES (809)..(809): Selenocysteine
  MOD_RES (836)..(836): Selenocysteine
  MOD_RES (854)..(854): Selenocysteine
  MOD_RES (860)..(860): Selenocysteine
  MOD_RES (868)..(868): Selenocysteine
  MOD_RES (904)..(904): Selenocysteine
  MOD_RES (934)..(934): Selenocysteine
  MOD_RES (957)..(957): Selenocysteine
  MOD_RES (960)..(960): Selenocysteine
MPAVSKGDGMRGLAVFISDIRNCKSKEAEIKRINKELANIRSKFKGDKALDGYSKKKYVCKLLFIFLLGHDIDFGHMEAVNLLSSNKYXEKQIGYLFISVLVNSNSELIRLINNAIKNDLASRNPXFMCLALHCIANVGSREMGEAFAADIPRILVAGDSMDSVKQSAALCLLRLYKASPDLVPMGEWXARVVHLLNDQHMGVVXAAVSLIXCLCKKNPDDFKXCVSLAVSRLSRIVSSASXDLQDYXYYFVPAPWLSVKLLRLLQCYPPPEDAAVKGRLVECLEXVLNKAQEPPKSKKVQHSNAKNAILFEXISLIIHYDSEPNLLVRACNQLGQFLQHREXNLRYLALESMCXLASSEFSHEAVKXHIDXVINALKXERDVSVRQRAADLLYAMCDRSNAKQIVSEMLRYLEXADYAIREEIVLKVAILAEKYAVDYSWYVDXILNLIRIAGDYVSEEVWYRVLQIVXNRDDVQGYAAKXVFEALQAPACHENMVKVGGYILGEFGNLIAGDPRSSPPVQFSLLHSKFHLCSVAXRALLLSXYIKFINLFPEXKAXIQGVLRAGSQLRNADVELQQRAVEYLXLSSVASXDVLAXVLEEMPPFPERESSILAKLKRKKGPGAGSALDDGRRDPSSNDINGGMEPXPSXVSXPSPSADLLGLRAAPPPAAPPASAGAGNLLVDVFDGPAAQPSLGPXPEEAFLSELEPPAPESPMALLADPAPAADPGPEDIGPPIPEADELLNKFVCKNNGVLFENQLLQIGVKSEFRQNLGRMYLFYGNKXSVQFQNFSPXVVHPGDLQXQLAVQXKRVAAQVDGGAQVQQVLNIECLRDFLXPPLLSVRFRYGGAPQALXLKLPVXINKFFQPXEMAAQDFFQRWKQLSLPQQEAQKIFKANHPMDAEVXKAKLLGFGSALLDNVDPNPENFVGAGIIQXKALQVGCLLRLEPNAQAQMYRLXLRXSKEPVSRHLCELLAQQF

SEQ ID NO: 2445 - protein, 57 aa, Homo sapiens
  MOD_RES (1)..(1): Any amino acid
XPAVSKGDGMRGLAVFISDIRNCKSKEAEIKRINKELANIRSKFKGDKALDGYKEPR

SEQ ID NO: 2446 - protein, 185 aa, Homo sapiens
  MOD_RES (10)..(10): Selenocysteine
  MOD_RES (14)..(14): Selenocysteine
  MOD_RES (95)..(95): Selenocysteine
  MOD_RES (132)..(132): Selenocysteine
  MOD_RES (166)..(166): Selenocysteine
  MOD_RES (184)..(184): Selenocysteine
EFFLPRLVVXASGXPWFSSQCFPSGSSEGKSKEAEIKRINKELANIRSKFKGDKALDGYSKKKYVCKLLFIFLLGHDIDFGHMEAVNLLSSNRYXEKQIGYLFISVLVNSNSELIRLINNAIKNDLASRNPXFMGLALHCIASVGSREMAEAFAGEIPKVLVAGDXMDSVKQSAALCLLRLYRXS

SEQ ID NO: 2447 - protein, 125 aa, Homo sapiens
  MOD_RES (18)..(18): Selenocysteine
  MOD_RES (29)..(29): Selenocysteine
  MOD_RES (45)..(45): Selenocysteine
  MOD_RES (48)..(48): Selenocysteine
  MOD_RES (52)..(53): Selenocysteine
  MOD_RES (64)..(64): Selenocysteine
  MOD_RES (78)..(78): Selenocysteine
  MOD_RES (82)..(82): Selenocysteine
  MOD_RES (88)..(88): Selenocysteine
  MOD_RES (120)..(120): Selenocysteine
  MOD_RES (125)..(125): Selenocysteine
MDSVKQSAALCLLRLYRXSPDLVPMGDWXSRVVHLLNDQHLGVVXAAXSLIXXLAQKNPEEFKXSVSLAVSRLSRIVXSASXDLQDYXYYFVPAPWLSVKLLRLLQCYPPPDPAVRGRLXECLEX

SEQ ID NO: 2448 - protein, 60 aa, Homo sapiens
  MOD_RES (13)..(13): Selenocysteine
  MOD_RES (50)..(50): Selenocysteine
MEAVNLLSSNRYXEKQIGYLFISVLVNSNSELIRLINNAIKNDLASRNPXFMGLALHCIA

SEQ ID NO: 2449 - protein, 62 aa, Homo sapiens
  MOD_RES (13)..(13): Selenocysteine
  MOD_RES (50)..(50): Selenocysteine
MEAVNLLSSNRYXEKQIGYLFISVLVNSNSELIRLINNAIKNDLASRNPXFMGLALHCIASV

SEQ ID NO: 2450 - protein, 90 aa, Homo sapiens
  MOD_RES (13)..(13): Selenocysteine
  MOD_RES (50)..(50): Selenocysteine
  MOD_RES (84)..(84): Selenocysteine
MEAVNLLSSNRYXEKQIGYLFISVLVNSNSELIRLINNAIKNDLASRNPXFMGLALHCIASVGSREMAEAFAGEIPKVLVAGDXMDSVKQ

SEQ ID NO: 2451 - protein, 138 aa, Homo sapiens
  MOD_RES (9)..(9): Selenocysteine
  MOD_RES (83)..(83): Selenocysteine
  MOD_RES (120)..(120): Selenocysteine
MLVQFFQRXLDSLLLLGKSKEAEIKRINKELANIRSKFKGDKALDGYSKKKYVCKLLFIFLLGHDIDFGHMEAVNLLSSNRYXEKQIGYLFISVLVNSNSELIRLINNAIKNDLASRNPXFMGLALHCIASVGSREMA

SEQ ID NO: 2452 - protein, 378 aa, Homo sapiens
  MOD_RES (89)..(89): Selenocysteine
  MOD_RES (126)..(126): Selenocysteine
  MOD_RES (160)..(160): Selenocysteine
  MOD_RES (178)..(178): Selenocysteine
  MOD_RES (189)..(189): Selenocysteine
  MOD_RES (205)..(205): Selenocysteine
  MOD_RES (208)..(208): Selenocysteine
  MOD_RES (212)..(213): Selenocysteine
  MOD_RES (224)..(224): Selenocysteine
  MOD_RES (238)..(238): Selenocysteine
  MOD_RES (242)..(242): Selenocysteine
  MOD_RES (248)..(248): Selenocysteine
  MOD_RES (280)..(280): Selenocysteine
  MOD_RES (285)..(285): Selenocysteine
  MOD_RES (328)..(328): Selenocysteine
MPAVSKGDGMRGLAVFISDIRNCKSKEAEIKRINKELANIRSKFKGDKALDGYSKKKYVCKLLFIFLLGHDIDFGHMEAVNLLSSNRYXEKQIGYLFISVLVNSNSELIRLINNAIKNDLASRNPXFMGLALHCIASVGSREMAEAFAGEIPKVLVAGDXMDSVKQSAALCLLRLYRXSPDLVPMGDWXSRVVHLLNDQHLGVVXAAXSLIXXLAQKNPEEFKXSVSLAVSRLSRIVXSASXDLQDYXYYFVPAPWLSVKLLRLLQCYPPPDPAVRGRLXECLEXILNKAQEPPKSKKVQHSNAKNAVLFEAISLIIHHDRCVGCLCXGSRCAQVRKPFLRDYVNCSQRSFSPEDGRPGSCVLCCLRLCRLSSWPSCR

SEQ ID NO: 2453 - protein, 656 aa, Homo sapiens
  MOD_RES (89)..(89): Selenocysteine
  MOD_RES (126)..(126): Selenocysteine
  MOD_RES (160)..(160): Selenocysteine
  MOD_RES (178)..(178): Selenocysteine
  MOD_RES (189)..(189): Selenocysteine
  MOD_RES (205)..(205): Selenocysteine
  MOD_RES (208)..(208): Selenocysteine
  MOD_RES (212)..(213): Selenocysteine
  MOD_RES (224)..(224): Selenocysteine
  MOD_RES (238)..(238): Selenocysteine
  MOD_RES (242)..(242): Selenocysteine
  MOD_RES (248)..(248): Selenocysteine
  MOD_RES (281)..(281): Selenocysteine
  MOD_RES (286)..(286): Selenocysteine
  MOD_RES (343)..(343): Selenocysteine
  MOD_RES (355)..(355): Selenocysteine
  MOD_RES (368)..(368): Selenocysteine
  MOD_RES (372)..(372): Selenocysteine
  MOD_RES (379)..(379): Selenocysteine
  MOD_RES (415)..(415): Selenocysteine
  MOD_RES (440)..(440): Selenocysteine
  MOD_RES (445)..(445): Selenocysteine
  MOD_RES (482)..(482): Selenocysteine
  MOD_RES (537)..(537): Selenocysteine
  MOD_RES (544)..(544): Selenocysteine
  MOD_RES (558)..(558): Selenocysteine
  MOD_RES (588)..(588): Selenocysteine
  MOD_RES (592)..(592): Selenocysteine
  MOD_RES (597)..(597): Selenocysteine
  MOD_RES (624)..(624): Selenocysteine
  MOD_RES (626)..(626): Selenocysteine
  MOD_RES (631)..(631): Selenocysteine
  MOD_RES (650)..(650): Selenocysteine
MPAVSKGDGMRGLAVFISDIRNCKSKEAEIKRINKELANIRSKFKGDKALDGYSKKKYVCKLLFIFLLGHDIDFGHMEAVNLLSSNRYXEKQIGYLFISVLVNSNSELIRLINNAIKNDLASRNPXFMGLALHCIASVGSREMAEAFAGEIPKVLVAGDXMDSVKQSAALCLLRLYRXSPDLVPMGDWXSRVVHLLNDQHLGVVXAAXSLIXXLAQKNPEEFKXSVSLAVSRLSRIVXSASXDLQDYXYYFVPAPWLSVKLLRLLQCYPPPEDPAVRGRLXECLEXILNKAQEPPKSKKVQHSNAKNAVLFEAISLIIHHDSEPNLLVRACNQLGQFLQHREXNLRYLALESMCXLASSEFSHEAVKXHIEXVINALKXERDVSVRQRAVDLLYAMCDRSNAPQIVAEMLSYLEXADYSIREEIVLKVAILAEKYAVDYXWYVDXILNLIRIAGDYVSEEVWYRVIQIVINRDDVQGYAAKXVFEALQAPACHENLVKVGGYILGEFGNLIAGDPRSSPLIQFHLLHSKFHLCSVPXRALLLSXYIKFVNLFPEVKPXIQDVLRSDSQLRNADVELQQRAVEYLRLSXVASXDILAXVLEEMPPFPERESSILAKLKKKKGPSXVXDLEDXKRDRSVDVNGGPEPAPASXSAVVCL

SEQ ID NO: 2454 - protein, 939 aa, Homo sapiens
  MOD_RES (89)..(89): Selenocysteine
  MOD_RES (126)..(126): Selenocysteine
  MOD_RES (160)..(160): Selenocysteine
  MOD_RES (178)..(178): Selenocysteine
  MOD_RES (189)..(189): Selenocysteine
  MOD_RES (205)..(205): Selenocysteine
  MOD_RES (208)..(208): Selenocysteine
  MOD_RES (212)..(213): Selenocysteine
  MOD_RES (224)..(224): Selenocysteine
  MOD_RES (238)..(238): Selenocysteine
  MOD_RES (242)..(242): Selenocysteine
  MOD_RES (248)..(248): Selenocysteine
  MOD_RES (280)..(280): Selenocysteine
  MOD_RES (285)..(285): Selenocysteine
  MOD_RES (342)..(342): Selenocysteine
  MOD_RES (354)..(354): Selenocysteine
  MOD_RES (367)..(367): Selenocysteine
  MOD_RES (371)..(371): Selenocysteine
  MOD_RES (378)..(378): Selenocysteine
  MOD_RES (414)..(414): Selenocysteine
  MOD_RES (439)..(439): Selenocysteine
  MOD_RES (444)..(444): Selenocysteine
  MOD_RES (481)..(481): Selenocysteine
  MOD_RES (536)..(536): Selenocysteine
  MOD_RES (543)..(543): Selenocysteine
  MOD_RES (557)..(557): Selenocysteine
  MOD_RES (587)..(587): Selenocysteine
  MOD_RES (591)..(591): Selenocysteine
  MOD_RES (596)..(596): Selenocysteine
  MOD_RES (623)..(623): Selenocysteine
  MOD_RES (625)..(625): Selenocysteine
  MOD_RES (630)..(630): Selenocysteine
  MOD_RES (649)..(649): Selenocysteine
  MOD_RES (654)..(654): Selenocysteine
  MOD_RES (746)..(746): Selenocysteine
  MOD_RES (748)..(748): Selenocysteine
  MOD_RES (754)..(754): Selenocysteine
  MOD_RES (756)..(756): Selenocysteine
  MOD_RES (771)..(771): Selenocysteine
  MOD_RES (777)..(777): Selenocysteine
  MOD_RES (797)..(797): Selenocysteine
  MOD_RES (811)..(811): Selenocysteine
  MOD_RES (822)..(822): Selenocysteine
  MOD_RES (830)..(830): Selenocysteine
  MOD_RES (863)..(863): Selenocysteine
  MOD_RES (866)..(866): Selenocysteine
  MOD_RES (896)..(896): Selenocysteine
  MOD_RES (898)..(899): Selenocysteine
  MOD_RES (919)..(919): Selenocysteine
  MOD_RES (922)..(922): Selenocysteine
MPAVSKGDGMRGLAVFISDIRNCKSKEAEIKRINKELANIRSKFKGDKALDGYSKKKYVCKLLFIFLLGHDIDFGHMEAVNLLSSNRYXEKQIGYLFISVLVNSNSELIRLINNAIKNDLASRNPXFMGLALHCIASVGSREMAEAFAGEIPKVLVAGDXMDSVKQSAALCLLRLYRXSPDLVPMGDWXSRVVHLLNDQHLGVVXAAXSLIXXLAQKNPEEFKXSVSLAVSRLSRIVXSASXDLQDYXYYFVPAPWLSVKLLRLLQCYPPPDPAVRGRLXECLEXILNKAQEPPKSKKVQHSNAKNAVLFEAISLIIHHDSEPNLLVRACNQLGQFLQHREXNLRYLALESMCXLASSEFSHEAVKXHIEXVINALKXERDVSVRQRAVDLLYAMCDRSNAPQIVAEMLSYLEXADYSIREEIVLKVAILAEKYAVDYXWYVDXILNLIRIAGDYVSEEVWYRVIQIVINRDDVQGYAAKXVFEALQAPACHENLVKVGGYILGEFGNLIAGDPRSSPLIQFHLLHSKFHLCSVPXRALLLSXYIKFVNLFPEVKPXIQDVLRSDSQLRNADVELQQRAVEYLRLSXVASXDILAXVLEEMPPFPERESSILAKLKKKKGPSXVXDLEDXKRDRSVDVNGGPEPAPASXSAVSXPSPSADLLGLGAAPPAPAGPPPSSGGSGLLVDVFSDSASVVAPLAPGSEDNFARFVCKNNGVLFENQLLQIGLKSEFRQNLGRMFIFYGNKXSXQFLNFXPXLICSDDLQPNLNLQXKPVDPXVEGGAQVQQVVNIECVSDFXEAPVLNIQFRYGGXFQNVSVQLPIXLNKFFQPXEMASQDFFQRWKQLSNPQQEVQNIFKAKHPMDXEVXKAKIIGFGSALLEEVDPNPANFVGAGIIHXKXXQIGCLLRLEPNLQAQMYRLXLRXSKEAVSQRLCELLSAQF

SEQ ID NO: 2455 - protein, 940 aa, Homo sapiens
  MOD_RES (89)..(89): Selenocysteine
  MOD_RES (126)..(126): Selenocysteine
  MOD_RES (160)..(160): Selenocysteine
  MOD_RES (178)..(178): Selenocysteine
  MOD_RES (189)..(189): Selenocysteine
  MOD_RES (205)..(205): Selenocysteine
  MOD_RES (208)..(208): Selenocysteine
  MOD_RES (212)..(213): Selenocysteine
  MOD_RES (224)..(224): Selenocysteine
  MOD_RES (238)..(238): Selenocysteine
  MOD_RES (242)..(242): Selenocysteine
  MOD_RES (248)..(248): Selenocysteine
  MOD_RES (281)..(281): Selenocysteine
  MOD_RES (286)..(286): Selenocysteine
  MOD_RES (343)..(343): Selenocysteine
  MOD_RES (355)..(355): Selenocysteine
  MOD_RES (368)..(368): Selenocysteine
  MOD_RES (372)..(372): Selenocysteine
  MOD_RES (379)..(379): Selenocysteine
  MOD_RES (415)..(415): Selenocysteine
  MOD_RES (440)..(440): Selenocysteine
  MOD_RES (445)..(445): Selenocysteine
  MOD_RES (482)..(482): Selenocysteine
  MOD_RES (537)..(537): Selenocysteine
  MOD_RES (544)..(544): Selenocysteine
  MOD_RES (558)..(558): Selenocysteine
  MOD_RES (588)..(588): Selenocysteine
  MOD_RES (592)..(592): Selenocysteine
  MOD_RES (597)..(597): Selenocysteine
  MOD_RES (624)..(624): Selenocysteine
  MOD_RES (626)..(626): Selenocysteine
  MOD_RES (631)..(631): Selenocysteine
  MOD_RES (650)..(650): Selenocysteine
  MOD_RES (655)..(655): Selenocysteine
  MOD_RES (747)..(747): Selenocysteine
  MOD_RES (749)..(749): Selenocysteine
  MOD_RES (755)..(755): Selenocysteine
  MOD_RES (757)..(757): Selenocysteine
  MOD_RES (772)..(772): Selenocysteine
  MOD_RES (778)..(778): Selenocysteine
  MOD_RES (798)..(798): Selenocysteine
  MOD_RES (812)..(812): Selenocysteine
  MOD_RES (823)..(823): Selenocysteine
  MOD_RES (831)..(831): Selenocysteine
  MOD_RES (864)..(864): Selenocysteine
  MOD_RES (867)..(867): Selenocysteine
  MOD_RES (897)..(897): Selenocysteine
  MOD_RES (899)..(900): Selenocysteine
  MOD_RES (920)..(920): Selenocysteine
  MOD_RES (923)..(923): Selenocysteine
MPAVSKGDGMRGLAVFISDIRNCKSKEAEIKRINKELANIRSKFKGDKALDGYSKKKYVCKLLFIFLLGHDIDFGHMEAVNLLSSNRYXEKQIGYLFISVLVNSNSELIRLINNAIKNDLASRNPXFMGLALHCIASVGSREMAEAFAGEIPKVLVAGDXMDSVKQSAALCLLRLYRXSPDLVPMGDWXSRVVHLLNDQHLGVVXAAXSLIXXLAQKNPEEFKXSVSLAVSRLSRIVXSASXDLQDYXYYFVPAPWLSVKLLRLLQCYPPPEDPAVRGRLXECLEXILNKAQEPPKSKKVQHSNAKNAVLFEAISLIIHHDSEPNLLVRACNQLGQFLQHREXNLRYLALESMCXLASSEFSHEAVKXHIEXVINALKXERDVSVRQRAVDLLYAMCDRSNAPQIVAEMLSYLEXADYSIREEIVLKVAILAEKYAVDYXWYVDXILNLIRIAGDYVSEEVWYRVIQIVINRDDVQGYAAKXVFEALQAPACHENLVKVGGYILGEFGNLIAGDPRSSPLIQFHLLHSKFHLCSVPXRALLLSXYIKFVNLFPEVKPXIQDVLRSDSQLRNADVELQQRAVEYLRLSXVASXDILAXVLEEMPPFPERESSILAKLKKKKGPSXVXDLEDXKRDRSVDVNGGPEPAPASXSAVSXPSPSADLLGLGAAPPAPAGPPPSSGGSGLLVDVFSDSASVVAPLAPGSEDNFARFVCKNNGVLFENQLLQIGLKSEFRQNLGRMFIFYGNKXSXQFLNFXPXLICSDDLQPNLNLQXKPVDPXVEGGAQVQQVVNIECVSDFXEAPVLNIQFRYGGXFQNVSVQLPIXLNKFFQPXEMASQDFFQRWKQLSNPQQEVQNIFKAKHPMDXEVXKAKIIGFGSALLEEVDPNPANFVGAGIIHXKXXQIGCLLRLEPNLQAQMYRLXLRXSKEAVSQRLCELLSAQF

SEQ ID NO: 2456 - protein, 185 aa, Homo sapiens
  MOD_RES (79)..(79): Selenocysteine
  MOD_RES (116)..(116): Selenocysteine
  MOD_RES (150)..(150): Selenocysteine
  MOD_RES (168)..(168): Selenocysteine
  MOD_RES (179)..(179): Selenocysteine
VRVWPRRIEEIACKSKEAEIKRINKELANIRSKFKGDKALDGYSKKKYVCKLLFIFLLGHDIDFGHMEAVNLLSSNRYXEKQIGYLFISVLVNSNSELIRLINNAIKNDLASRNPXFMGLALHCIASVGSREMAEAFAGEIPKVLVAGDXMDSVKQSAALCLLRLYRXSPDLVPMGDWXSRVVHL

SEQ ID NO: 2457 - protein, 181 aa, Homo sapiens
  MOD_RES (6)..(6): Selenocysteine
  MOD_RES (48)..(48): Selenocysteine
  MOD_RES (57)..(59): Selenocysteine
  MOD_RES (61)..(61): Selenocysteine
  MOD_RES (117)..(117): Selenocysteine
DLIEPXLLDELICHIGSLASVYHKPPNAFVEGSHGIHRKHLPIHHGSXDAGDSPVGXXXAXNLEQPQVIPSQGDLLGDLLNLDLGPPVNVPQVSSMQMGAVDLLGGGLDSLPQKLFXVQFSSAYSEIERYPRNQDEKKLKPLFLLWIRMWLNIYSLRESRFLFREHHKEDLNLPVWKKMSF

SEQ ID NO: 2458 - protein, 63 aa, Homo sapiens
  MOD_RES (2)..(2): Selenocysteine
  MOD_RES (8)..(9): Selenocysteine
  MOD_RES (42)..(42): Selenocysteine
MXDSKYFXXNKKGEIFELKAELNNEKKEKRKEAVKKVIAAMXVGKDVRCCSSEVNFCYFSFVC

SEQ ID NO: 2459 - protein, 80 aa, Homo sapiens
  MOD_RES (2)..(2): Selenocysteine
  MOD_RES (8)..(9): Selenocysteine
  MOD_RES (42)..(42): Selenocysteine
  MOD_RES (60)..(60): Selenocysteine
MXDSKYFXXNKKGEIFELKAELNNEKKEKRKEAVKKVIAAMXVGKDVSSLFPDVVNCMQXDNLELKKLVYLYLMNYAKSQ

SEQ ID NO: 2460 - protein, 132 aa, Homo sapiens
  MOD_RES (2)..(2): Selenocysteine
  MOD_RES (8)..(9): Selenocysteine
  MOD_RES (42)..(42): Selenocysteine
  MOD_RES (60)..(60): Selenocysteine
  MOD_RES (109)..(109): Selenocysteine
  MOD_RES (119)..(119): Selenocysteine
MXDSKYFXXNKKGEIFELKAELNNEKKEKRKEAVKKVIAAMXVGKDVSSLFPDVVNCMQXDNLELKKLVYLYLMNYAKSQPDMAIMAVNSFVKDCEDPNPLIRALAVRXMGCIRVDKIXEYLCEPLRKCLKD

SEQ ID NO: 2461 - protein, 151 aa, Homo sapiens
  MOD_RES (2)..(2): Selenocysteine
  MOD_RES (8)..(9): Selenocysteine
  MOD_RES (42)..(42): Selenocysteine
  MOD_RES (60)..(60): Selenocysteine
  MOD_RES (109)..(109): Selenocysteine
  MOD_RES (119)..(119): Selenocysteine
  MOD_RES (140)..(140): Selenocysteine
MXDSKYFXXNKKGEIFELKAELNNEKKEKRKEAVKKVIAAMXVGKDVSSLFPDVVNCMQXDNLELKKLVYLYLMNYAKSQPDMAIMAVNSFVKDCEDPNPLIRALAVRXMGCIRVDKIXEYLCEPLRKCLKDEDPYVRKXAAVCVAKLHDI

SEQ ID NO: 2462 - protein, 663 aa, Homo sapiens
  MOD_RES (2)..(2): Selenocysteine
  MOD_RES (8)..(9): Selenocysteine
  MOD_RES (42)..(42): Selenocysteine
  MOD_RES (60)..(60): Selenocysteine
  MOD_RES (109)..(109): Selenocysteine
  MOD_RES (119)..(119): Selenocysteine
  MOD_RES (140)..(140): Selenocysteine
  MOD_RES (209)..(209): Selenocysteine
  MOD_RES (215)..(215): Selenocysteine
  MOD_RES (245)..(245): Selenocysteine
  MOD_RES (290)..(290): Selenocysteine
  MOD_RES (363)..(363): Selenocysteine
  MOD_RES (394)..(394): Selenocysteine
  MOD_RES (401)..(401): Selenocysteine
  MOD_RES (431)..(431): Selenocysteine
  MOD_RES (478)..(478): Selenocysteine
  MOD_RES (483)..(483): Selenocysteine
  MOD_RES (486)..(486): Selenocysteine
  MOD_RES (499)..(499): Selenocysteine
  MOD_RES (511)..(511): Selenocysteine
  MOD_RES (532)..(532): Selenocysteine
  MOD_RES (536)..(536): Selenocysteine
  MOD_RES (552)..(552): Selenocysteine
  MOD_RES (558)..(558): Selenocysteine
  MOD_RES (600)..(600): Selenocysteine
  MOD_RES (609)..(611): Selenocysteine
  MOD_RES (613)..(613): Selenocysteine
MXDSKYFXXNKKGEIFELKAELNNEKKEKRKEAVKKVIAAMXVGKDVSSLFPDVVNCMQXDNLELKKLVYLYLMNYAKSQPDMAIMAVNSFVKDCEDPNPLIRALAVRXMGCIRVDKIXEYLCEPLRKCLKDEDPYVRKXAAVCVAKLHDINAQMVEDQGFLDSLRDLIADSNPMVVANAVAALSEISESHPNSNLLDLNPQNINKLLXALNECXEWGQIFILDCLSNYNPKDDREAQSICERVXPRLSHANSAVVLSAVKVLMKFLELLPKDSDYYNMLLKKLAPPLVXLLSGEPEVQYVALRNINLIVQKRPEILKQEIKVFFVKYNDPIYVKLEKLDIMIRLASQANIAQVLAELKEYAXEVDVDFVRKAVRAIGRCAIKVEQSAERCVSXLLDLIQXKVNYVVQEAIVVIRDIFRKYPNKYESIIAXLCENLDSLDEPDARAAMIWIVGEYAERIDNADELLESFLEGFHDESXQVQLXLLXAIVKLFLKKPSEXQELVQQVLSLAXQDSDNPDLRDRGYIYWRLLSXDPVXAKEVVLSEKPLISEEXDLIEPXLLDELICHIGSLASVYHKPPNAFVEGSHGIHRKHLPIHHGSXDAGDSPVGXXXAXNLEQPQVIPSQGDLLGDLLNLDLGPPVNVPQVSSMQMGAVDLLGGGLDSL

SEQ ID NO: 2463 - protein, 677 aa, Homo sapiens
  MOD_RES (2)..(2): Selenocysteine
  MOD_RES (8)..(9): Selenocysteine
  MOD_RES (42)..(42): Selenocysteine
  MOD_RES (60)..(60): Selenocysteine
  MOD_RES (109)..(109): Selenocysteine
  MOD_RES (119)..(119): Selenocysteine
  MOD_RES (140)..(140): Selenocysteine
  MOD_RES (209)..(209): Selenocysteine
  MOD_RES (215)..(215): Selenocysteine
  MOD_RES (245)..(245): Selenocysteine
  MOD_RES (290)..(290): Selenocysteine
  MOD_RES (363)..(363): Selenocysteine
  MOD_RES (394)..(394): Selenocysteine
  MOD_RES (401)..(401): Selenocysteine
  MOD_RES (431)..(431): Selenocysteine
  MOD_RES (478)..(478): Selenocysteine
  MOD_RES (483)..(483): Selenocysteine
  MOD_RES (486)..(486): Selenocysteine
  MOD_RES (499)..(499): Selenocysteine
  MOD_RES (511)..(511): Selenocysteine
  MOD_RES (532)..(532): Selenocysteine
  MOD_RES (536)..(536): Selenocysteine
  MOD_RES (552)..(552): Selenocysteine
  MOD_RES (558)..(558): Selenocysteine
  MOD_RES (600)..(600): Selenocysteine
  MOD_RES (609)..(611): Selenocysteine
  MOD_RES (613)..(613): Selenocysteine
MXDSKYFXXNKKGEIFELKAELNNEKKEKRKEAVKKVIAAMXVGKDVSSLFPDVVNCMQXDNLELKKLVYLYLMNYAKSQPDMAIMAVNSFVKDCEDPNPLIRALAVRXMGCIRVDKIXEYLCEPLRKCLKDEDPYVRKXAAVCVAKLHDINAQMVEDQGFLDSLRDLIADSNPMVVANAVAALSEISESHPNSNLLDLNPQNINKLLXALNECXEWGQIFILDCLSNYNPKDDREAQSICERVXPRLSHANSAVVLSAVKVLMKFLELLPKDSDYYNMLLKKLAPPLVXLLSGEPEVQYVALRNINLIVQKRPEILKQEIKVFFVKYNDPIYVKLEKLDIMIRLASQANIAQVLAELKEYAXEVDVDFVRKAVRAIGRCAIKVEQSAERCVSXLLDLIQXKVNYVVQEAIVVIRDIFRKYPNKYESIIAXLCENLDSLDEPDARAAMIWIVGEYAERIDNADELLESFLEGFHDESXQVQLXLLXAIVKLFLKKPSEXQELVQQVLSLAXQDSDNPDLRDRGYIYWRLLSXDPVXAKEVVLSEKPLISEEXDLIEPXLLDELICHIGSLASVYHKPPNAFVEGSHGIHRKHLPIHHGSXDAGDSPVGXXXAXNLEQPQVIPSQGDLLGDLLNLDLGPPVNVPQVSSMQMGAVDLLGGGLDSLLGSDLGGGIGGSPA

SEQ ID NO: 2464 - protein, 937 aa, Homo sapiens
  MOD_RES (2)..(2): Selenocysteine
  MOD_RES (8)..(9): Selenocysteine
  MOD_RES (42)..(42): Selenocysteine
  MOD_RES (60)..(60): Selenocysteine
  MOD_RES (109)..(109): Selenocysteine
  MOD_RES (119)..(119): Selenocysteine
  MOD_RES (140)..(140): Selenocysteine
  MOD_RES (209)..(209): Selenocysteine
  MOD_RES (215)..(215): Selenocysteine
  MOD_RES (245)..(245): Selenocysteine
  MOD_RES (290)..(290): Selenocysteine
  MOD_RES (363)..(363): Selenocysteine
  MOD_RES (394)..(394): Selenocysteine
  MOD_RES (401)..(401): Selenocysteine
  MOD_RES (431)..(431): Selenocysteine
  MOD_RES (478)..(478): Selenocysteine
  MOD_RES (483)..(483): Selenocysteine
  MOD_RES (486)..(486): Selenocysteine
  MOD_RES (499)..(499): Selenocysteine
  MOD_RES (511)..(511): Selenocysteine
  MOD_RES (532)..(532): Selenocysteine
  MOD_RES (536)..(536): Selenocysteine
  MOD_RES (552)..(552): Selenocysteine
  MOD_RES (558)..(558): Selenocysteine
  MOD_RES (600)..(600): Selenocysteine
  MOD_RES (609)..(611): Selenocysteine
  MOD_RES (613)..(613): Selenocysteine
  MOD_RES (676)..(676): Selenocysteine
  MOD_RES (682)..(682): Selenocysteine
  MOD_RES (698)..(698): Selenocysteine
  MOD_RES (728)..(728): Selenocysteine
  MOD_RES (730)..(730): Selenocysteine
  MOD_RES (743)..(743): Selenocysteine
  MOD_RES (751)..(751): Selenocysteine
  MOD_RES (768)..(768): Selenocysteine
  MOD_RES (774)..(774): Selenocysteine
  MOD_RES (790)..(790): Selenocysteine
  MOD_RES (840)..(840): Selenocysteine
  MOD_RES (863)..(863): Selenocysteine
  MOD_RES (875)..(875): Selenocysteine
  MOD_RES (894)..(894): Selenocysteine
  MOD_RES (913)..(913): Selenocysteine
MXDSKYFXXNKKGEIFELKAELNNEKKEKRKEAVKKVIAAMXVGKDVSSLFPDVVNCMQXDNLELKKLVYLYLMNYAKSQPDMAIMAVNSFVKDCEDPNPLIRALAVRXMGCIRVDKIXEYLCEPLRKCLKDEDPYVRKXAAVCVAKLHDINAQMVEDQGFLDSLRDLIADSNPMVVANAVAALSEISESHPNSNLLDLNPQNINKLLXALNECXEWGQIFILDCLSNYNPKDDREAQSICERVXPRLSHANSAVVLSAVKVLMKFLELLPKDSDYYNMLLKKLAPPLVXLLSGEPEVQYVALRNINLIVQKRPEILKQEIKVFFVKYNDPIYVKLEKLDIMIRLASQANIAQVLAELKEYAXEVDVDFVRKAVRAIGRCAIKVEQSAERCVSXLLDLIQXKVNYVVQEAIVVIRDIFRKYPNKYESIIAXLCENLDSLDEPDARAAMIWIVGEYAERIDNADELLESFLEGFHDESXQVQLXLLXAIVKLFLKKPSEXQELVQQVLSLAXQDSDNPDLRDRGYIYWRLLSXDPVXAKEVVLSEKPLISEEXDLIEPXLLDELICHIGSLASVYHKPPNAFVEGSHGIHRKHLPIHHGSXDAGDSPVGXXXAXNLEQPQVIPSQGDLLGDLLNLDLGPPVNVPQVSSMQMGAVDLLGGGLDSLVGQSFIPSSVPAXFAPSPXPAVVSSGLNDLFELSXGIGMAPGGYVAPKAVWLPAVKAKGLEISGXFXHRQGHIYMEMNFXNKALQHMXDFAIQFNKNSFGVIPSXPLAIHXPLMPNQSIDVSLPLNXLGPVMKMEPLNNLQVAVKNNIDVFYFSCLIPLNVLFVEDGKMERQVFLAXWKDIPNENELQFQIKECHLNADXVSSKLQNNNVYXIAKRNVEGQDMLYQSLKLXNGIWILAELRIQPGNPNYXLSLKCRAPEVSQYIYQVYDSILKN

SEQ ID NO: 2465 - protein, 951 aa, Homo sapiens
  MOD_RES (2)..(2): Selenocysteine
  MOD_RES (8)..(9): Selenocysteine
  MOD_RES (42)..(42): Selenocysteine
  MOD_RES (60)..(60): Selenocysteine
  MOD_RES (109)..(109): Selenocysteine
  MOD_RES (119)..(119): Selenocysteine
  MOD_RES (140)..(140): Selenocysteine
  MOD_RES (209)..(209): Selenocysteine
  MOD_RES (215)..(215): Selenocysteine
  MOD_RES (245)..(245): Selenocysteine
  MOD_RES (290)..(290): Selenocysteine
  MOD_RES (363)..(363): Selenocysteine
  MOD_RES (394)..(394): Selenocysteine
  MOD_RES (401)..(401): Selenocysteine
  MOD_RES (431)..(431): Selenocysteine
  MOD_RES (478)..(478): Selenocysteine
  MOD_RES (483)..(483): Selenocysteine
  MOD_RES (486)..(486): Selenocysteine
  MOD_RES (499)..(499): Selenocysteine
  MOD_RES (511)..(511): Selenocysteine
  MOD_RES (532)..(532): Selenocysteine
  MOD_RES (536)..(536): Selenocysteine
  MOD_RES (552)..(552): Selenocysteine
  MOD_RES (558)..(558): Selenocysteine
  MOD_RES (600)..(600): Selenocysteine
  MOD_RES (609)..(611): Selenocysteine
  MOD_RES (613)..(613): Selenocysteine
  MOD_RES (690)..(690): Selenocysteine
  MOD_RES (696)..(696): Selenocysteine
  MOD_RES (712)..(712): Selenocysteine
  MOD_RES (742)..(742): Selenocysteine
  MOD_RES (744)..(744): Selenocysteine
  MOD_RES (757)..(757): Selenocysteine
  MOD_RES (765)..(765): Selenocysteine
  MOD_RES (782)..(782): Selenocysteine
  MOD_RES (788)..(788): Selenocysteine
  MOD_RES (804)..(804): Selenocysteine
  MOD_RES (854)..(854): Selenocysteine
  MOD_RES (877)..(877): Selenocysteine
  MOD_RES (889)..(889): Selenocysteine
  MOD_RES (908)..(908): Selenocysteine
  MOD_RES (927)..(927): Selenocysteine
MXDSKYFXXNKKGEIFELKAELNNEKKEKRKEAVKKVIAAMXVGKDVSSLFPDVVNCMQXDNLELKKLVYLYLMNYAKSQPDMAIMAVNSFVKDCEDPNPLIRALAVRXMGCIRVDKIXEYLCEPLRKCLKDEDPYVRKXAAVCVAKLHDINAQMVEDQGFLDSLRDLIADSNPMVVANAVAALSEISESHPNSNLLDLNPQNINKLLXALNECXEWGQIFILDCLSNYNPKDDREAQSICERVXPRLSHANSAVVLSAVKVLMKFLELLPKDSDYYNMLLKKLAPPLVXLLSGEPEVQYVALRNINLIVQKRPEILKQEIKVFFVKYNDPIYVKLEKLDIMIRLASQANIAQVLAELKEYAXEVDVDFVRKAVRAIGRCAIKVEQSAERCVSXLLDLIQXKVNYVVQEAIVVIRDIFRKYPNKYESIIAXLCENLDSLDEPDARAAMIWIVGEYAERIDNADELLESFLEGFHDESXQVQLXLLXAIVKLFLKKPSEXQELVQQVLSLAXQDSDNPDLRDRGYIYWRLLSXDPVXAKEVVLSEKPLISEEXDLIEPXLLDELICHIGSLASVYHKPPNAFVEGSHGIHRKHLPIHHGSXDAGDSPVGXXXAXNLEQPQVIPSQGDLLGDLLNLDLGPPVNVPQVSSMQMGAVDLLGGGLDSLLGSDLGGGIGGSPAVGQSFIPSSVPAXFAPSPXPAVVSSGLNDLFELSXGIGMAPGGYVAPKAVWLPAVKAKGLEISGXFXHRQGHIYMEMNFXNKALQHMXDFAIQFNKNSFGVIPSXPLAIHXPLMPNQSIDVSLPLNXLGPVMKMEPLNNLQVAVKNNIDVFYFSCLIPLNVLFVEDGKMERQVFLAXWKDIPNENELQFQIKECHLNADXVSSKLQNNNVYXIAKRNVEGQDMLYQSLKLXNGIWILAELRIQPGNPNYXLSLKCRAPEVSQYIYQVYDSILKN

SEQ ID NO: 2466 - protein, 639 aa, Homo sapiens
  MOD_RES (2)..(2): Selenocysteine
  MOD_RES (8)..(9): Selenocysteine
  MOD_RES (42)..(42): Selenocysteine
  MOD_RES (60)..(60): Selenocysteine
  MOD_RES (102)..(102): Selenocysteine
  MOD_RES (171)..(171): Selenocysteine
  MOD_RES (177)..(177): Selenocysteine
  MOD_RES (207)..(207): Selenocysteine
  MOD_RES (252)..(252): Selenocysteine
  MOD_RES (325)..(325): Selenocysteine
  MOD_RES (356)..(356): Selenocysteine
  MOD_RES (363)..(363): Selenocysteine
  MOD_RES (393)..(393): Selenocysteine
  MOD_RES (440)..(440): Selenocysteine
  MOD_RES (445)..(445): Selenocysteine
  MOD_RES (448)..(448): Selenocysteine
  MOD_RES (461)..(461): Selenocysteine
  MOD_RES (473)..(473): Selenocysteine
  MOD_RES (494)..(494): Selenocysteine
  MOD_RES (498)..(498): Selenocysteine
  MOD_RES (514)..(514): Selenocysteine
  MOD_RES (520)..(520): Selenocysteine
  MOD_RES (562)..(562): Selenocysteine
  MOD_RES (571)..(573): Selenocysteine
  MOD_RES (575)..(575): Selenocysteine
MXDSKYFXXNKKGEIFELKAELNNEKKEKRKEAVKKVIAAMXVGKDVSSLFPDVVNCMQXDNLELKKLVYLYLMNYAKSQPDMAIMAVNSFVKDEDPYVRKXAAVCVAKLHDINAQMVEDQGFLDSLRDLIADSNPMVVANAVAALSEISESHPNSNLLDLNPQNINKLLXALNECXEWGQIFILDCLSNYNPKDDREAQSICERVXPRLSHANSAVVLSAVKVLMKFLELLPKDSDYYNMLLKKLAPPLVXLLSGEPEVQYVALRNINLIVQKRPEILKQEIKVFFVKYNDPIYVKLEKLDIMIRLASQANIAQVLAELKEYAXEVDVDFVRKAVRAIGRCAIKVEQSAERCVSXLLDLIQXKVNYVVQEAIVVIRDIFRKYPNKYESIIAXLCENLDSLDEPDARAAMIWIVGEYAERIDNADELLESFLEGFHDESXQVQLXLLXAIVKLFLKKPSEXQELVQQVLSLAXQDSDNPDLRDRGYIYWRLLSXDPVXAKEVVLSEKPLISEEXDLIEPXLLDELICHIGSLASVYHKPPNAFVEGSHGIHRKHLPIHHGSXDAGDSPVGXXXAXNLEQPQVIPSQGDLLGDLLNLDLGPPVNVPQVSSMQMGAVDLLGGGLDSLLGSDLGGGIGGSPA

SEQ ID NO: 2467 - protein, 913 aa, Homo sapiens
  MOD_RES (2)..(2): Selenocysteine
  MOD_RES (8)..(9): Selenocysteine
  MOD_RES (42)..(42): Selenocysteine
  MOD_RES (60)..(60): Selenocysteine
  MOD_RES (102)..(102): Selenocysteine
  MOD_RES (171)..(171): Selenocysteine
  MOD_RES (177)..(177): Selenocysteine
  MOD_RES (207)..(207): Selenocysteine
  MOD_RES (252)..(252): Selenocysteine
  MOD_RES (325)..(325): Selenocysteine
  MOD_RES (356)..(356): Selenocysteine
  MOD_RES (363)..(363): Selenocysteine
  MOD_RES (393)..(393): Selenocysteine
  MOD_RES (440)..(440): Selenocysteine
  MOD_RES (445)..(445): Selenocysteine
  MOD_RES (448)..(448): Selenocysteine
  MOD_RES (461)..(461): Selenocysteine
  MOD_RES (473)..(473): Selenocysteine
  MOD_RES (494)..(494): Selenocysteine
  MOD_RES (498)..(498): Selenocysteine
  MOD_RES (514)..(514): Selenocysteine
  MOD_RES (520)..(520): Selenocysteine
  MOD_RES (562)..(562): Selenocysteine
  MOD_RES (571)..(573): Selenocysteine
  MOD_RES (575)..(575): Selenocysteine
  MOD_RES (652)..(652): Selenocysteine
  MOD_RES (658)..(658): Selenocysteine
  MOD_RES (674)..(674): Selenocysteine
  MOD_RES (704)..(704): Selenocysteine
  MOD_RES (706)..(706): Selenocysteine
  MOD_RES (719)..(719): Selenocysteine
  MOD_RES (727)..(727): Selenocysteine
  MOD_RES (744)..(744): Selenocysteine
  MOD_RES (750)..(750): Selenocysteine
  MOD_RES (766)..(766): Selenocysteine
  MOD_RES (816)..(816): Selenocysteine
  MOD_RES (839)..(839): Selenocysteine
  MOD_RES (851)..(851): Selenocysteine
  MOD_RES (870)..(870): Selenocysteine
  MOD_RES (889)..(889): Selenocysteine
MXDSKYFXXNKKGEIFELKAELNNEKKEKRKEAVKKVIAAMXVGKDVSSLFPDVVNCMQXDNLELKKLVYLYLMNYAKSQPDMAIMAVNSFVKDEDPYVRKXAAVCVAKLHDINAQMVEDQGFLDSLRDLIADSNPMVVANAVAALSEISESHPNSNLLDLNPQNINKLLXALNECXEWGQIFILDCLSNYNPKDDREAQSICERVXPRLSHANSAVVLSAVKVLMKFLELLPKDSDYYNMLLKKLAPPLVXLLSGEPEVQYVALRNINLIVQKRPEILKQEIKVFFVKYNDPIYVKLEKLDIMIRLASQANIAQVLAELKEYAXEVDVDFVRKAVRAIGRCAIKVEQSAERCVSXLLDLIQXKVNYVVQEAIVVIRDIFRKYPNKYESIIAXLCENLDSLDEPDARAAMIWIVGEYAERIDNADELLESFLEGFHDESXQVQLXLLXAIVKLFLKKPSEXQELVQQVLSLAXQDSDNPDLRDRGYIYWRLLSXDPVXAKEVVLSEKPLISEEXDLIEPXLLDELICHIGSLASVYHKPPNAFVEGSHGIHRKHLPIHHGSXDAGDSPVGXXXAXNLEQPQVIPSQGDLLGDLLNLDLGPPVNVPQVSSMQMGAVDLLGGGLDSLLGSDLGGGIGGSPAVGQSFIPSSVPAXFAPSPXPAVVSSGLNDLFELSXGIGMAPGGYVAPKAVWLPAVKAKGLEISGXFXHRQGHIYMEMNFXNKALQHMXDFAIQFNKNSFGVIPSXPLAIHXPLMPNQSIDVSLPLNXLGPVMKMEPLNNLQVAVKNNIDVFYFSCLIPLNVLFVEDGKMERQVFLAXWKDIPNENELQFQIKECHLNADXVSSKLQNNNVYXIAKRNVEGQDMLYQSLKLXNGIWILAELRIQPGNPNYXLSLKCRAPEVSQYIYQVYDSILKN

SEQ ID NO: 2468 - protein, 49 aa, Homo sapiens
  MOD_RES (2)..(2): Selenocysteine
  MOD_RES (8)..(9): Selenocysteine
  MOD_RES (42)..(42): Selenocysteine
  MOD_RES (49)..(49): Selenocysteine
MXDSKYFXXNKKGEIFELKAELNNEKKEKRKEAVKKVIAAMXVGKDVSX

SEQ ID NO: 2469 - protein, 164 aa, Homo sapiens
  MOD_RES (12)..(12): Selenocysteine
  MOD_RES (43)..(43): Selenocysteine
  MOD_RES (50)..(50): Selenocysteine
  MOD_RES (80)..(80): Selenocysteine
  MOD_RES (127)..(127): Selenocysteine
  MOD_RES (132)..(132): Selenocysteine
  MOD_RES (135)..(135): Selenocysteine
  MOD_RES (148)..(148): Selenocysteine
  MOD_RES (160)..(160): Selenocysteine
SEVLAELKEYAXEVDVDFVRKAVRAIGRCAIKVEQSAERCVSXLLDLIQXKVNYVVQEAIVVIRDIFRKYPNKYESIIAXLCENLDSLDEPDARAAMIWIVGEYAERIDNADELLESFLEGFHDESXQVQLXLLXAIVKLFLKKPSEXQELVQQVLSLAXQLKK

SEQ ID NO: 2470 - protein, 122 aa, Homo sapiens
  MOD_RES (16)..(16): Selenocysteine
  MOD_RES (20)..(20): Selenocysteine
  MOD_RES (65)..(65): Selenocysteine
  MOD_RES (108)..(108): Selenocysteine
FKPSLLAQKIEVRIPXPLNXSGVQVICMKGKAKYKASENAIVWKIKRMAGMKESQISAEIELLPXNDKKKWARPPISMNFEVWQRRGLESCQGMLEDLLEIIPINCCXLEVRKLRPRKKNWL

SEQ ID NO: 2471 - protein, 160 aa, Homo sapiens
  MOD_RES (50)..(50): Selenocysteine
  MOD_RES (55)..(55): Selenocysteine
  MOD_RES (71)..(71): Selenocysteine
  MOD_RES (128)..(128): Selenocysteine
  MOD_RES (133)..(133): Selenocysteine
  MOD_RES (136)..(136): Selenocysteine
  MOD_RES (146)..(146): Selenocysteine
  MOD_RES (154)..(154): Selenocysteine
  MOD_RES (158)..(158): Selenocysteine
MIGGLFIYNHKGEVLISRVYRDDIGNRRNAVDAFRVNVIHARQQVRSPVXNIARXSFFHVKRSNIWLAAVXKQNVNAAMVFEFLYKMCDVMAAYFGKISEENIKNNFVLIYELLDEILDFGYPQNSEXGALKXFIXQQGIKSQHQXKEEQSQIXSQVXGQ

SEQ ID NO: 2472 - protein, 113 aa, Homo sapiens
  MOD_RES (48)..(48): Selenocysteine
  MOD_RES (53)..(53): Selenocysteine
  MOD_RES (69)..(69): Selenocysteine
MIGGLFIYNHKGEVLISRVYRDDIGRNAVDAFRVNVIHARQQVRSPVXNIARXSFFHVKRSNIWLAAVXKQNVNAAMVFEFLYKMCDVMAAYFGKISEENIKNNFVLIYELLD

SEQ ID NO: 2473 - protein, 252 aa, Homo sapiens
  MOD_RES (48)..(48): Selenocysteine
  MOD_RES (53)..(53): Selenocysteine
  MOD_RES (69)..(69): Selenocysteine
  MOD_RES (126)..(126): Selenocysteine
  MOD_RES (131)..(131): Selenocysteine
  MOD_RES (134)..(134): Selenocysteine
  MOD_RES (144)..(144): Selenocysteine
  MOD_RES (152)..(152): Selenocysteine
  MOD_RES (158)..(158): Selenocysteine
  MOD_RES (162)..(162): Selenocysteine
  MOD_RES (176)..(176): Selenocysteine
  MOD_RES (208)..(209): Selenocysteine
  MOD_RES (228)..(228): Selenocysteine
MIGGLFIYNHKGEVLISRVYRDDIGRNAVDAFRVNVIHARQQVRSPVXNIARXSFFHVKRSNIWLAAVXKQNVNAAMVFEFLYKMCDVMAAYFGKISEENIKNNFVLIYELLDEILDFGYPQNSEXGALKXFIXQQGIKSQHQXKEEQSQIXSQGKGXADEXSKSGKQSIAIDDCXFHQCVRLSKFDSERSISFIPPDGEFELMRYRXXKDIILPFRVIPLVREVGRXKLEVKVVIKSNFKPSLLAQKIEVR

SEQ ID NO: 2474 - protein, 435 aa, Homo sapiens
  MOD_RES (48)..(48): Selenocysteine
  MOD_RES (53)..(53): Selenocysteine
  MOD_RES (69)..(69): Selenocysteine
  MOD_RES (126)..(126): Selenocysteine
  MOD_RES (131)..(131): Selenocysteine
  MOD_RES (134)..(134): Selenocysteine
  MOD_RES (144)..(144): Selenocysteine
  MOD_RES (152)..(152): Selenocysteine
  MOD_RES (156)..(156): Selenocysteine
  MOD_RES (229)..(229): Selenocysteine
  MOD_RES (233)..(233): Selenocysteine
  MOD_RES (247)..(247): Selenocysteine
  MOD_RES (279)..(280): Selenocysteine
  MOD_RES (299)..(299): Selenocysteine
  MOD_RES (326)..(326): Selenocysteine
  MOD_RES (330)..(330): Selenocysteine
  MOD_RES (375)..(375): Selenocysteine
  MOD_RES (433)..(433): Selenocysteine
MIGGLFIYNHKGEVLISRVYRDDIGRNAVDAFRVNVIHARQQVRSPVXNIARXSFFHVKRSNIWLAAVXKQNVNAAMVFEFLYKMCDVMAAYFGKISEENIKNNFVLIYELLDEILDFGYPQNSEXGALKXFIXQQGIKSQHQXKEEQSQIXSQVXGQIGWRREGIKYRRNELFLDVLESVNLLMSPQGQVLSAHVSGRVVMKSYLSGMPECKFGMNDKIVIEKQGKGXADEXSKSGKQSIAIDDCXFHQCVRLSKFDSERSISFIPPDGEFELMRYRXXKDIILPFRVIPLVREVGRXKLEVKVVIKSNFKPSLLAQKIEVRIPXPLNXSGVQVICMKGKAKYKASENAIVWKIKRMAGMKESQISAEIELLPXNDKKKWARPPISMNFEVPFAPSGLKVRYLKVFEPKLNYSDHDVIKWVRYIGRSGIYEXRC

SEQ ID NO: 2475 - protein, 195 aa, Homo sapiens
  MOD_RES (48)..(48): Selenocysteine
  MOD_RES (53)..(53): Selenocysteine
  MOD_RES (69)..(69): Selenocysteine
  MOD_RES (126)..(126): Selenocysteine
  MOD_RES (131)..(131): Selenocysteine
  MOD_RES (134)..(134): Selenocysteine
  MOD_RES (173)..(173): Selenocysteine
  MOD_RES (180)..(180): Selenocysteine
MIGGLFIYNHKGEVLISRVYRDDIGRNAVDAFRVNVIHARQQVRSPVXNIARXSFFHVKRSNIWLAAVXKQNVNAAMVFEFLYKMCDVMAAYFGKISEENIKNNFVLIYELLDEILDFGYPQNSEXGALKXFIXQQGIKSQHQVSSSLSFHPCSFALFLQALPFGAYRGKWIXDKRRAVXDHQPGNWADWLAARG

SEQ ID NO: 2476 - protein, 434 aa, Homo sapiens
  MOD_RES (48)..(48): Selenocysteine
  MOD_RES (53)..(53): Selenocysteine
  MOD_RES (69)..(69): Selenocysteine
  MOD_RES (126)..(126): Selenocysteine
  MOD_RES (131)..(131): Selenocysteine
  MOD_RES (134)..(134): Selenocysteine
  MOD_RES (143)..(143): Selenocysteine
  MOD_RES (151)..(151): Selenocysteine
  MOD_RES (155)..(155): Selenocysteine
  MOD_RES (228)..(228): Selenocysteine
  MOD_RES (232)..(232): Selenocysteine
  MOD_RES (246)..(246): Selenocysteine
  MOD_RES (278)..(279): Selenocysteine
  MOD_RES (298)..(298): Selenocysteine
  MOD_RES (325)..(325): Selenocysteine
  MOD_RES (329)..(329): Selenocysteine
  MOD_RES (374)..(374): Selenocysteine
  MOD_RES (432)..(432): Selenocysteine
MIGGLFIYNHKGEVLISRVYRDDIGRNAVDAFRVNVIHARQQVRSPVXNIARXSFFHVKRSNIWLAAVXKQNVNAAMVFEFLYKMCDVMAAYFGKISEENIKNNFVLIYELLDEILDFGYPQNSEXGALKXFIXQQGIKSQHXKEEQSQIXSQVXGQIGWRREGIKYRRNELFLDVLESVNLLMSPQGQVLSAHVSGRVVMKSYLSGMPECKFGMNDKIVIEKQGKGXADEXSKSGKQSIAIDDCXFHQCVRLSKFDSERSISFIPPDGEFELMRYRXXKDIILPFRVIPLVREVGRXKLEVKVVIKSNFKPSLLAQKIEVRIPXPLNXSGVQVICMKGKAKYKASENAIVWKIKRMAGMKESQISAEIELLPXNDKKKWARPPISMNFEVPFAPSGLKVRYLKVFEPKLNYSDHDVIKWVRYIGRSGIYEXRC

SEQ ID NO: 2477 - protein, 433 aa, Homo sapiens
  MOD_RES (48)..(48): Selenocysteine
  MOD_RES (53)..(53): Selenocysteine
  MOD_RES (69)..(69): Selenocysteine
  MOD_RES (126)..(126): Selenocysteine
  MOD_RES (131)..(131): Selenocysteine
  MOD_RES (134)..(134): Selenocysteine
  MOD_RES (142)..(142): Selenocysteine
  MOD_RES (150)..(150): Selenocysteine
  MOD_RES (154)..(154): Selenocysteine
  MOD_RES (227)..(227): Selenocysteine
  MOD_RES (231)..(231): Selenocysteine
  MOD_RES (245)..(245): Selenocysteine
  MOD_RES (277)..(278): Selenocysteine
  MOD_RES (297)..(297): Selenocysteine
  MOD_RES (324)..(324): Selenocysteine
  MOD_RES (328)..(328): Selenocysteine
  MOD_RES (373)..(373): Selenocysteine
  MOD_RES (431)..(431): Selenocysteine
MIGGLFIYNHKGEVLISRVYRDDIGRNAVDAFRVNVIHARQQVRSPVXNIARXSFFHVKRSNIWLAAVXKQNVNAAMVFEFLYKMCDVMAAYFGKISEENIKNNFVLIYELLDEILDFGYPQNSEXGALKXFIXQQGIKSQXKEEQSQIXSQVXGQIGWRREGIKYRRNELFLDVLESVNLLMSPQGQVLSAHVSGRVVMKSYLSGMPECKFGMNDKIVIEKQGKGXADEXSKSGKQSIAIDDCXFHQCVRLSKFDSERSISFIPPDGEFELMRYRXXKDIILPFRVIPLVREVGRXKLEVKVVIKSNFKPSLLAQKIEVRIPXPLNXSGVQVICMKGKAKYKASENAIVWKIKRMAGMKESQISAEIELLPXNDKKKWARPPISMNFEVPFAPSGLKVRYLKVFEPKLNYSDHDVIKWVRYIGRSGIYEXRC

SEQ ID NO: 2478 - protein, 460 aa, Homo sapiens
  MOD_RES (73)..(73): Selenocysteine
  MOD_RES (78)..(78): Selenocysteine
  MOD_RES (94)..(94): Selenocysteine
  MOD_RES (151)..(151): Selenocysteine
  MOD_RES (156)..(156): Selenocysteine
  MOD_RES (159)..(159): Selenocysteine
  MOD_RES (169)..(169): Selenocysteine
  MOD_RES (177)..(177): Selenocysteine
  MOD_RES (181)..(181): Selenocysteine
  MOD_RES (254)..(254): Selenocysteine
  MOD_RES (258)..(258): Selenocysteine
  MOD_RES (272)..(272): Selenocysteine
  MOD_RES (304)..(305): Selenocysteine
  MOD_RES (324)..(324): Selenocysteine
  MOD_RES (351)..(351): Selenocysteine
  MOD_RES (355)..(355): Selenocysteine
  MOD_RES (400)..(400): Selenocysteine
  MOD_RES (458)..(458): Selenocysteine
MIGGLFIYNHKGEVLISRVYRDDIGSRQAADSAVFSSSGPFPGEWLEANRRNAVDAFRVNVIHARQQVRSPVXNIARXSFFHVKRSNIWLAAVXKQNVNAAMVFEFLYKMCDVMAAYFGKISEENIKNNFVLIYELLDEILDFGYPQNSEXGALKXFIXQQGIKSQHQXKEEQSQIXSQVXGQIGWRREGIKYRRNELFLDVLESVNLLMSPQGQVLSAHVSGRVVMKSYLSGMPECKFGMNDKIVIEKQGKGXADEXSKSGKQSIAIDDCXFHQCVRLSKFDSERSISFIPPDGEFELMRYRXXKDIILPFRVIPLVREVGRXKLEVKVVIKSNFKPSLLAQKIEVRIPXPLNXSGVQVICMKGKAKYKASENAIVWKIKRMAGMKESQISAEIELLPXNDKKKWARPPISMNFEVPFAPSGLKVRYLKVFEPKLNYSDHDVIKWVRYIGRSGIYEXRC

SEQ ID NO: 2479 - protein, 136 aa, Homo sapiens
  MOD_RES (71)..(71): Selenocysteine
  MOD_RES (76)..(76): Selenocysteine
  MOD_RES (92)..(92): Selenocysteine
MIGGLFIYNHKGEVLISRVYRDDIGSRQAADSAVFSSSGPFPGEWLEARNAVDAFRVNVIHARQQVRSPVXNIARXSFFHVKRSNIWLAAVXKQNVNAAMVFEFLYKMCDVMAAYFGKISEENIKNNFVLIYELLD

SEQ ID NO: 2480 - protein, 92 aa, Homo sapiens
  MOD_RES (62)..(62): Selenocysteine
  MOD_RES (76)..(76): Selenocysteine
  MOD_RES (79)..(79): Selenocysteine
MFRNFKIIYRRYAGLYFCICVDVNDNNLAYLEAIHNFVEVLNEYFHNVCELDLVFNFYKVYXVVDEMFLAGEIREXSQXKVLKQLLMLQSLE

SEQ ID NO: 2481 - protein, 142 aa, Homo sapiens
  MOD_RES (14)..(14): Selenocysteine
  MOD_RES (40)..(40): Selenocysteine
  MOD_RES (47)..(47): Selenocysteine
  MOD_RES (112)..(112): Selenocysteine
  MOD_RES (126)..(126): Selenocysteine
  MOD_RES (129)..(129): Selenocysteine
MIRFILIQNRAGKXRLAKWYMQFDDDEKQKLIEEVHAVVXVRDAKHXNFVEFRNFKIIYRRYAGLYFCICVDVNDNNLAYLEAIHNFVEVLNEYFHNVCELDLVFNFYKVYXVVDEMFLAGEIREXSQXKVLKQLLMLQSLE

SEQ ID NO: 2482 - protein, 156 aa, Homo sapiens
  MOD_RES (14)..(14): Selenocysteine
  MOD_RES (40)..(40): Selenocysteine
  MOD_RES (47)..(47): Selenocysteine
  MOD_RES (126)..(126): Selenocysteine
  MOD_RES (140)..(140): Selenocysteine
  MOD_RES (143)..(143): Selenocysteine
MIRFILIQNRAGKXRLAKWYMQFDDDEKQKLIEEVHAVVXVRDAKHXNFVEVLAISVADSLSVLQFRNFKIIYRRYAGLYFCICVDVNDNNLAYLEAIHNFVEVLNEYFHNVCELDLVFNFYKVYXVVDEMFLAGEIREXSQXKVLKQLLMLQSLE

SEQ ID NO: 2483 - protein, 104 aa, Homo sapiens
  MOD_RES (14)..(14): Selenocysteine
  MOD_RES (40)..(40): Selenocysteine
  MOD_RES (47)..(47): Selenocysteine
  MOD_RES (74)..(74): Selenocysteine
  MOD_RES (88)..(88): Selenocysteine
  MOD_RES (91)..(91): Selenocysteine
MIRFILIQNRAGKXRLAKWYMQFDDDEKQKLIEEVHAVVXVRDAKHXNFVEVLNEYFHNVCELDLVFNFYKVYXVVDEMFLAGEIREXSQXKVLKQLLMLQSLE

SEQ ID NO: 2484 - protein, 158 aa, Homo sapiens
  MOD_RES (30)..(30): Selenocysteine
  MOD_RES (56)..(56): Selenocysteine
  MOD_RES (63)..(63): Selenocysteine
  MOD_RES (128)..(128): Selenocysteine
  MOD_RES (142)..(142): Selenocysteine
  MOD_RES (145)..(145): Selenocysteine
MKLKGLGKRCKRREDLEIRFILIQNRAGKXRLAKWYMQFDDDEKQKLIEEVHAVVXVRDAKHXNFVEFRNFKIIYRRYAGLYFCICVDVNDNNLAYLEAIHNFVEVLNEYFHNVCELDLVFNFYKVYXVVDEMFLAGEIREXSQXKVLKQLLMLQSLE

SEQ ID NO: 2485 - protein, 122 aa, Homo sapiens
  MOD_RES (20)..(20): Selenocysteine
  MOD_RES (27)..(27): Selenocysteine
  MOD_RES (92)..(92): Selenocysteine
  MOD_RES (106)..(106): Selenocysteine
  MOD_RES (109)..(109): Selenocysteine
MQFDDDEKQKLIEEVHAVVXVRDAKHXNFVEFRNFKIIYRRYAGLYFCICVDVNDNNLAYLEAIHNFVEVLNEYFHNVCELDLVFNFYKVYXVVDEMFLAGEIREXSQXKVLKQLLMLQSLE

SEQ ID NO: 2486 - protein, 144 aa, Homo sapiens
  MOD_RES (16)..(16): Selenocysteine
  MOD_RES (42)..(42): Selenocysteine
  MOD_RES (49)..(49): Selenocysteine
  MOD_RES (114)..(114): Selenocysteine
  MOD_RES (128)..(128): Selenocysteine
  MOD_RES (131)..(131): Selenocysteine
MVWIRFILIQNRAGKXRLAKWYMQFDDDEKQKLIEEVHAVVXVRDAKHXNFVEFRNFKIIYRRYAGLYFCICVDVNDNNLAYLEAIHNFVEVLNEYFHNVCELDLVFNFYKVYXVVDEMFLAGEIREXSQXKVLKQLLMLQSLE

SEQ ID NO: 2487 - protein, 193 aa, Homo sapiens
  MOD_RES (27)..(27): Selenocysteine
  MOD_RES (35)..(35): Selenocysteine
  MOD_RES (70)..(70): Selenocysteine
  MOD_RES (96)..(96): Selenocysteine
  MOD_RES (132)..(132): Selenocysteine
  MOD_RES (139)..(139): Selenocysteine
MIKAILIFNNHGKPRLSKFYQPYSEDXQQQIIREXFHLVSKRDENVCNFLEGGLLIGGSDNKLIYRHYAXLYFVFCVDSSESELGILDLIQVFVEXLDKCFENVCELDLIFHVDKVHNILAEMVMGGMVLEXNMNEIVXQIDAQNKLEKSEAGLAGAPARAVSAVKNMNLPEIPRNINIGDISIKVPNLPSFK

SEQ ID NO: 2488 - protein, 162 aa, Homo sapiens
  MOD_RES (27)..(27): Selenocysteine
  MOD_RES (35)..(35): Selenocysteine
  MOD_RES (70)..(70): Selenocysteine
  MOD_RES (96)..(96): Selenocysteine
  MOD_RES (132)..(132): Selenocysteine
  MOD_RES (139)..(139): Selenocysteine
  MOD_RES (152)..(152): Selenocysteine
MIKAILIFNNHGKPRLSKFYQPYSEDXQQQIIREXFHLVSKRDENVCNFLEGGLLIGGSDNKLIYRHYAXLYFVFCVDSSESELGILDLIQVFVEXLDKCFENVCELDLIFHVDKVHNILAEMVMGGMVLEXNMNEIVXQIDAQNKLEKSEXFIFQSPRQDR

SEQ ID NO: 2489 - protein, 807 aa, Homo sapiens
  MOD_RES (41)..(41): Selenocysteine
  MOD_RES (55)..(55): Selenocysteine
  MOD_RES (64)..(64): Selenocysteine
  MOD_RES (72)..(72): Selenocysteine
  MOD_RES (106)..(106): Selenocysteine
  MOD_RES (167)..(167): Selenocysteine
  MOD_RES (174)..(174): Selenocysteine
  MOD_RES (202)..(202): Selenocysteine
  MOD_RES (212)..(212): Selenocysteine
  MOD_RES (220)..(220): Selenocysteine
  MOD_RES (224)..(224): Selenocysteine
  MOD_RES (233)..(233): Selenocysteine
  MOD_RES (260)..(260): Selenocysteine
  MOD_RES (263)..(263): Selenocysteine
  MOD_RES (273)..(273): Selenocysteine
  MOD_RES (280)..(280): Selenocysteine
  MOD_RES (394)..(394): Selenocysteine
  MOD_RES (427)..(427): Selenocysteine
  MOD_RES (447)..(447): Selenocysteine
  MOD_RES (462)..(462): Selenocysteine
  MOD_RES (477)..(477): Selenocysteine
  MOD_RES (498)..(498): Selenocysteine
  MOD_RES (530)..(530): Selenocysteine
  MOD_RES (558)..(558): Selenocysteine
  MOD_RES (568)..(568): Selenocysteine
  MOD_RES (613)..(613): Selenocysteine
  MOD_RES (644)..(644): Selenocysteine
  MOD_RES (657)..(657): Selenocysteine
  MOD_RES (663)..(663): Selenocysteine
  MOD_RES (682)..(682): Selenocysteine
  MOD_RES (699)..(699): Selenocysteine
  MOD_RES (703)..(704): Selenocysteine
  MOD_RES (706)..(706): Selenocysteine
  MOD_RES (728)..(728): Selenocysteine
  MOD_RES (735)..(735): Selenocysteine
  MOD_RES (738)..(738): Selenocysteine
  MOD_RES (749)..(749): Selenocysteine
  MOD_RES (752)..(752): Selenocysteine
  MOD_RES (756)..(756): Selenocysteine
  MOD_RES (769)..(769): Selenocysteine
  MOD_RES (772)..(772): Selenocysteine
  MOD_RES (785)..(785): Selenocysteine
  MOD_RES (793)..(793): Selenocysteine
MFSAGAESLLHQAREIQDEELKKFCSRICKLLQAEDLGPDXLDSLQRLFLIISAXKYSRRLEKXCVDLLQAXLGLPACPEQLQVLCAAILREMSPSDSLSLAWDHXQNSRQLSLVASVLLAQGDRNEEVRAVGQGVLRALESRQPEGPSLRHLLPVMAKVVVLSPGXLQEDQAXLLSKRLVDWLRYASLQQGLPHSGGFFSXPRARQPGPVXEVDGAVAXDFFXVLSSGHRFXDDQWLNVQAFSMLRAWLLHSGPEGPGXLDXDDRSEQEGSXLSVISAXSSAGRLLPPRERLREVAFEYCQRLIEQSNRRALRKGDSDLQKACLVEAVLVLDVLCRQDPSFLYRSLSCLKALHGRVRGDPASVRVLLPLAHFFLSHGEAAAVDSEAVYQHLFXRIPVEQFHSPMLAFEFIQFCRDNLHLFSGHLSXLRLSFPNLFKFLAWNSPPLXSEFVALLPALVDAGXALEMLHALLDLPCLXAVLDLQLRSAPAASERPLWDXSLRAPSCLEAFRDPQFQGLFQYLLRPKASGAXERLAPLHQLLQPMAGCARVAQCAQAVPXLLQAFFSAVXQVADGSLINQLALLLLGRSDSLYPAPGYAAGVHSVLSSQFLALCXLKPSLVVELARDLLEFLGSVNGLCSRASLVXSVVWAIGEYLSVXYDRRCXVEQINKFFEALEALLFEVXQCRPSAALPRCPPQVVXVLMXXLXKLASRSQDLIPRASLLLSKMRXLAHSPAXSSXHSEEGAEAIRXRAXELLXLLKMPSVAQFVLXPSXEVCSPRYHRDANXALPLALRXVSRLVEREAGLMPG

SEQ ID NO: 2490 - protein, 130 aa, Homo sapiens
  MOD_RES (22)..(22): Selenocysteine
  MOD_RES (36)..(36): Selenocysteine
  MOD_RES (48)..(48): Selenocysteine
  MOD_RES (107)..(107): Selenocysteine
MDAKARNCLLQHREALEKDIKXSYIMDHMISDGFLXISEEEKVRNEPXQQQRAAMLIKMILKKDNDSYVSFYNALLHEGYKDLAALLHDGIPVVSSSSGKDSVSGIXSYGLYPLYLLSLCYQNCFGFVLL

SEQ ID NO: 2491 - protein, 338 aa, Homo sapiens
  MOD_RES (22)..(22): Selenocysteine
  MOD_RES (36)..(36): Selenocysteine
  MOD_RES (48)..(48): Selenocysteine
  MOD_RES (107)..(107): Selenocysteine
  MOD_RES (112)..(112): Selenocysteine
  MOD_RES (128)..(128): Selenocysteine
  MOD_RES (151)..(151): Selenocysteine
  MOD_RES (204)..(204): Selenocysteine
  MOD_RES (263)..(264): Selenocysteine
  MOD_RES (270)..(270): Selenocysteine
  MOD_RES (329)..(329): Selenocysteine
MDAKARNCLLQHREALEKDIKXSYIMDHMISDGFLXISEEEKVRNEPXQQQRAAMLIKMILKKDNDSYVSFYNALLHEGYKDLAALLHDGIPVVSSSSGKDSVSGIXSYVRXVLCEGGVPQRPVVFVXRKKLVNAIQQKLSKLKGEPGWVXIHGMAGCGKSVLAAEAVRDHSLLEGCFPGGVHWVSVGKQDKSGLLMKLQNLCXRLDQDESFSQRLPLNIEEAKDRLRILMLRKHPRSLLILDDVWDSWVLKAFDSQCQILLXXRDKSVXDSVMGPKYVVPVESSLGKEKGLEILSLFVNMKKADLPEQAHSIIKECKVVERCHWGILXDLLHKWNQS

SEQ ID NO: 2492 - protein, 1163 aa, Homo sapiens
  MOD_RES (22)..(22): Selenocysteine
  MOD_RES (36)..(36): Selenocysteine
  MOD_RES (48)..(48): Selenocysteine
  MOD_RES (107)..(107): Selenocysteine
  MOD_RES (112)..(112): Selenocysteine
  MOD_RES (128)..(128): Selenocysteine
  MOD_RES (151)..(151): Selenocysteine
  MOD_RES (204)..(204): Selenocysteine
  MOD_RES (263)..(264): Selenocysteine
  MOD_RES (270)..(270): Selenocysteine
  MOD_RES (384)..(384): Selenocysteine
  MOD_RES (397)..(397): Selenocysteine
  MOD_RES (408)..(408): Selenocysteine
  MOD_RES (446)..(446): Selenocysteine
  MOD_RES (462)..(462): Selenocysteine
  MOD_RES (472)..(472): Selenocysteine
  MOD_RES (514)..(514): Selenocysteine
  MOD_RES (573)..(573): Selenocysteine
  MOD_RES (604)..(604): Selenocysteine
  MOD_RES (615)..(615): Selenocysteine
  MOD_RES (638)..(638): Selenocysteine
  MOD_RES (646)..(646): Selenocysteine
  MOD_RES (667)..(667): Selenocysteine
  MOD_RES (674)..(674): Selenocysteine
  MOD_RES (688)..(688): Selenocysteine
  MOD_RES (694)..(694): Selenocysteine
  MOD_RES (708)..(708): Selenocysteine
  MOD_RES (718)..(718): Selenocysteine
  MOD_RES (738)..(738): Selenocysteine
  MOD_RES (743)..(743): Selenocysteine
  MOD_RES (766)..(766): Selenocysteine
  MOD_RES (773)..(773): Selenocysteine
  MOD_RES (826)..(826): Selenocysteine
  MOD_RES (856)..(856): Selenocysteine
  MOD_RES (862)..(862): Selenocysteine
  MOD_RES (868)..(868): Selenocysteine
  MOD_RES (910)..(910): Selenocysteine
  MOD_RES (917)..(917): Selenocysteine
  MOD_RES (962)..(962): Selenocysteine
  MOD_RES (969)..(969): Selenocysteine
  MOD_RES (974)..(974): Selenocysteine
  MOD_RES (1003)..(1003): Selenocysteine
  MOD_RES (1023)..(1023): Selenocysteine
  MOD_RES (1031)..(1031): Selenocysteine
  MOD_RES (1044)..(1044): Selenocysteine
  MOD_RES (1055)..(1055): Selenocysteine
  MOD_RES (1060)..(1060): Selenocysteine
  MOD_RES (1065)..(1065): Selenocysteine
  MOD_RES (1090)..(1090): Selenocysteine
  MOD_RES (1096)..(1096): Selenocysteine
  MOD_RES (1121)..(1121): Selenocysteine
  MOD_RES (1127)..(1127): Selenocysteine
  MOD_RES (1130)..(1130): Selenocysteine
  MOD_RES (1133)..(1133): Selenocysteine
  MOD_RES (1146)..(1146): Selenocysteine
  MOD_RES (1149)..(1149): Selenocysteine
  MOD_RES (1161)..(1161): Selenocysteine
MDAKARNCLLQHREALEKDIKXSYIMDHMISDGFLXISEEEKVRNEPXQQQRAAMLIKMILKKDNDSYVSFYNALLHEGYKDLAALLHDGIPVVSSSSGKDSVSGIXSYVRXVLCEGGVPQRPVVFVXRKKLVNAIQQKLSKLKGEPGWVXIHGMAGCGKSVLAAEAVRDHSLLEGCFPGGVHWVSVGKQDKSGLLMKLQNLCXRLDQDESFSQRLPLNIEEAKDRLRILMLRKHPRSLLILDDVWDSWVLKAFDSQCQILLXXRDKSVXDSVMGPKYVVPVESSLGKEKGLEILSLFVNMKKADLPEQAHSIIKECKGSPLVVSLIGALLRDFPNRWEYYLKQLQNKQFKRIRKSSSYDYEALDEAMSISVEMLREDIKDYYXDLSILQKDVKVPXKVLCILWDMEXEEVEDILQEFVNKSLLFCDRNGKSFRYYLHDLQVDFLXEKNCSQLQDLHKKIIXQFQRYHQPHXLSPDQEDCMYWYNFLAYHMASAKMHKELCALMFSLDWIKAKXELVGPAHLIHEFVEYRHILDEKDCAVSENFQEFLSLNGHLLGRQPFPNIVQLGLCEPEXSEVYQQAKLQAKQEVDNGMLYLEWINKKNIXNLSRLVVRPHXDAVYHACFSEDGQRIASCGADKXLQVFKAEXGEKLLEIKAHEDEVLCCAFSXDDRFIAXCSVDKKVKIWNSMXGELVHXYDEHSEQVNCCHFXNSSHHLLLAXGSSDCFLKLWDLNQKECRNXMFGHXNSVNHCRFSPDDKLLASCSADGXLKLWDAXSANERKSINVKQFFLNLEDPQEDMEVIVKCCSWSADGARIMVAAKNKIFLWNXDSRSKVADCRGHLSWVHGVMFSPDGSSFLXSSDDQXIRLWEXKKVCKNSAVMLKQEVDVVFQENEVMVLAVDHIRRLQLINGRXGQIDYLXEAQVSCCCLSPHLQYIAFGDENGAIEILELVNNRIFQSRFQHKKXVWHIQFXADEKXLISSSDDAEIQVWNWQLDKCIFLRGHQEXVKDFRLLKNSRLLSWSFDGXVKVWNIIXGNKEKDFVCHQGXVLSCDISHDAXKFSSXSADKXAKIWNVSNGELLHLCAPLSEEGAAXHGGWVXDLCFSPDGKMLISAGGYIKWWNVVXGESSQXFYXNGXNLKKIHVSPDFKXYVXVDNLGILYILQXLE

SEQ ID NO: 2493 - protein, 1205 aa, Homo sapiens
  MOD_RES (22)..(22): Selenocysteine
  MOD_RES (36)..(36): Selenocysteine
  MOD_RES (48)..(48): Selenocysteine
  MOD_RES (107)..(107): Selenocysteine
  MOD_RES (112)..(112): Selenocysteine
  MOD_RES (128)..(128): Selenocysteine
  MOD_RES (151)..(151): Selenocysteine
  MOD_RES (204)..(204): Selenocysteine
  MOD_RES (263)..(264): Selenocysteine
  MOD_RES (270)..(270): Selenocysteine
  MOD_RES (384)..(384): Selenocysteine
  MOD_RES (397)..(397): Selenocysteine
  MOD_RES (408)..(408): Selenocysteine
  MOD_RES (446)..(446): Selenocysteine
  MOD_RES (462)..(462): Selenocysteine
  MOD_RES (472)..(472): Selenocysteine
  MOD_RES (514)..(514): Selenocysteine
  MOD_RES (573)..(573): Selenocysteine
  MOD_RES (604)..(604): Selenocysteine
  MOD_RES (615)..(615): Selenocysteine
  MOD_RES (638)..(638): Selenocysteine
  MOD_RES (646)..(646): Selenocysteine
  MOD_RES (667)..(667): Selenocysteine
  MOD_RES (674)..(674): Selenocysteine
  MOD_RES (688)..(688): Selenocysteine
  MOD_RES (694)..(694): Selenocysteine
  MOD_RES (708)..(708): Selenocysteine
  MOD_RES (718)..(718): Selenocysteine
  MOD_RES (738)..(738): Selenocysteine
  MOD_RES (743)..(743): Selenocysteine
  MOD_RES (766)..(766): Selenocysteine
  MOD_RES (773)..(773): Selenocysteine
  MOD_RES (826)..(826): Selenocysteine
  MOD_RES (856)..(856): Selenocysteine
  MOD_RES (862)..(862): Selenocysteine
  MOD_RES (868)..(868): Selenocysteine
  MOD_RES (910)..(910): Selenocysteine
  MOD_RES (917)..(917): Selenocysteine
  MOD_RES (962)..(962): Selenocysteine
  MOD_RES (969)..(969): Selenocysteine
  MOD_RES (974)..(974): Selenocysteine
  MOD_RES (1003)..(1003): Selenocysteine
  MOD_RES (1023)..(1023): Selenocysteine
  MOD_RES (1031)..(1031): Selenocysteine
  MOD_RES (1044)..(1044): Selenocysteine
  MOD_RES (1055)..(1055): Selenocysteine
  MOD_RES (1060)..(1060): Selenocysteine
  MOD_RES (1065)..(1065): Selenocysteine
  MOD_RES (1097)..(1097): Selenocysteine
  MOD_RES (1101)..(1101): Selenocysteine
  MOD_RES (1132)..(1132): Selenocysteine
  MOD_RES (1138)..(1138): Selenocysteine
  MOD_RES (1163)..(1163): Selenocysteine
  MOD_RES (1169)..(1169): Selenocysteine
  MOD_RES (1172)..(1172): Selenocysteine
  MOD_RES (1175)..(1175): Selenocysteine
  MOD_RES (1188)..(1188): Selenocysteine
  MOD_RES (1191)..(1191): Selenocysteine
  MOD_RES (1203)..(1203): Selenocysteine
MDAKARNCLLQHREALEKDIKXSYIMDHMISDGFLXISEEEKVRNEPXQQQRAAMLIKMILKKDNDSYVSFYNALLHEGYKDLAALLHDGIPVVSSSSGKDSVSGIXSYVRXVLCEGGVPQRPVVFVXRKKLVNAIQQKLSKLKGEPGWVXIHGMAGCGKSVLAAEAVRDHSLLEGCFPGGVHWVSVGKQDKSGLLMKLQNLCXRLDQDESFSQRLPLNIEEAKDRLRILMLRKHPRSLLILDDVWDSWVLKAFDSQCQILLXXRDKSVXDSVMGPKYVVPVESSLGKEKGLEILSLFVNMKKADLPEQAHSIIKECKGSPLVVSLIGALLRDFPNRWEYYLKQLQNKQFKRIRKSSSYDYEALDEAMSISVEMLREDIKDYYXDLSILQKDVKVPXKVLCILWDMEXEEVEDILQEFVNKSLLFCDRNGKSFRYYLHDLQVDFLXEKNCSQLQDLHKKIIXQFQRYHQPHXLSPDQEDCMYWYNFLAYHMASAKMHKELCALMFSLDWIKAKXELVGPAHLIHEFVEYRHILDEKDCAVSENFQEFLSLNGHLLGRQPFPNIVQLGLCEPEXSEVYQQAKLQAKQEVDNGMLYLEWINKKNIXNLSRLVVRPHXDAVYHACFSEDGQRIASCGADKXLQVFKAEXGEKLLEIKAHEDEVLCCAFSXDDRFIAXCSVDKKVKIWNSMXGELVHXYDEHSEQVNCCHFXNSSHHLLLAXGSSDCFLKLWDLNQKECRNXMFGHXNSVNHCRFSPDDKLLASCSADGXLKLWDAXSANERKSINVKQFFLNLEDPQEDMEVIVKCCSWSADGARIMVAAKNKIFLWNXDSRSKVADCRGHLSWVHGVMFSPDGSSFLXSSDDQXIRLWEXKKVCKNSAVMLKQEVDVVFQENEVMVLAVDHIRRLQLINGRXGQIDYLXEAQVSCCCLSPHLQYIAFGDENGAIEILELVNNRIFQSRFQHKKXVWHIQFXADEKXLISSSDDAEIQVWNWQLDKCIFLRGHQEXVKDFRLLKNSRLLSWSFDGXVKVWNIIXGNKEKDFVCHQGXVLSCDISHDAXKFSSXSADKXAKIWSFDLLLPLHELRGHNGCVRCSAFSVDSXLLAXGDDNGEIRIWNVSNGELLHLCAPLSEEGAAXHGGWVXDLCFSPDGKMLISAGGYIKWWNVVXGESSQXFYXNGXNLKKIHVSPDFKXYVXVDNLGILYILQXLE

SEQ ID NO: 2494 - protein, 1248 aa, Homo sapiens
  MOD_RES (22)..(22): Selenocysteine
  MOD_RES (36)..(36): Selenocysteine
  MOD_RES (48)..(48): Selenocysteine
  MOD_RES (107)..(107): Selenocysteine
  MOD_RES (112)..(112): Selenocysteine
  MOD_RES (128)..(128): Selenocysteine
  MOD_RES (151)..(151): Selenocysteine
  MOD_RES (204)..(204): Selenocysteine
  MOD_RES (263)..(264): Selenocysteine
  MOD_RES (270)..(270): Selenocysteine
  MOD_RES (384)..(384): Selenocysteine
  MOD_RES (397)..(397): Selenocysteine
  MOD_RES (408)..(408): Selenocysteine
  MOD_RES (446)..(446): Selenocysteine
  MOD_RES (462)..(462): Selenocysteine
  MOD_RES (472)..(472): Selenocysteine
  MOD_RES (514)..(514): Selenocysteine
  MOD_RES (573)..(573): Selenocysteine
  MOD_RES (604)..(604): Selenocysteine
  MOD_RES (615)..(615): Selenocysteine
  MOD_RES (638)..(638): Selenocysteine
  MOD_RES (646)..(646): Selenocysteine
  MOD_RES (667)..(667): Selenocysteine
  MOD_RES (674)..(674): Selenocysteine
  MOD_RES (688)..(688): Selenocysteine
  MOD_RES (694)..(694): Selenocysteine
  MOD_RES (708)..(708): Selenocysteine
  MOD_RES (718)..(718): Selenocysteine
  MOD_RES (738)..(738): Selenocysteine
  MOD_RES (743)..(743): Selenocysteine
  MOD_RES (766)..(766): Selenocysteine
  MOD_RES (773)..(773): Selenocysteine
  MOD_RES (828)..(828): Selenocysteine
  MOD_RES (837)..(837): Selenocysteine
  MOD_RES (842)..(842): Selenocysteine
  MOD_RES (869)..(869): Selenocysteine
  MOD_RES (899)..(899): Selenocysteine
  MOD_RES (905)..(905): Selenocysteine
  MOD_RES (911)..(911): Selenocysteine
  MOD_RES (953)..(953): Selenocysteine
  MOD_RES (960)..(960): Selenocysteine
  MOD_RES (1005)..(1005): Selenocysteine
  MOD_RES (1012)..(1012): Selenocysteine
  MOD_RES (1017)..(1017): Selenocysteine
  MOD_RES (1046)..(1046): Selenocysteine
  MOD_RES (1066)..(1066): Selenocysteine
  MOD_RES (1074)..(1074): Selenocysteine
  MOD_RES (1087)..(1087): Selenocysteine
  MOD_RES (1098)..(1098): Selenocysteine
  MOD_RES (1103)..(1103): Selenocysteine
  MOD_RES (1108)..(1108): Selenocysteine
  MOD_RES (1140)..(1140): Selenocysteine
  MOD_RES (1144)..(1144): Selenocysteine
  MOD_RES (1175)..(1175): Selenocysteine
  MOD_RES (1181)..(1181): Selenocysteine
  MOD_RES (1206)..(1206): Selenocysteine
  MOD_RES (1212)..(1212): Selenocysteine
  MOD_RES (1215)..(1215): Selenocysteine
  MOD_RES (1218)..(1218): Selenocysteine
  MOD_RES (1231)..(1231): Selenocysteine
  MOD_RES (1234)..(1234): Selenocysteine
  MOD_RES (1246)..(1246): Selenocysteine
MDAKARNCLLQHREALEKDIKXSYIMDHMISDGFLXISEEEKVRNEPXQQQRAAMLIKMILKKDNDSYVSFYNALLHEGYKDLAALLHDGIPVVSSSSGKDSVSGIXSYVRXVLCEGGVPQRPVVFVXRKKLVNAIQQKLSKLKGEPGWVXIHGMAGCGKSVLAAEAVRDHSLLEGCFPGGVHWVSVGKQDKSGLLMKLQNLCXRLDQDESFSQRLPLNIEEAKDRLRILMLRKHPRSLLILDDVWDSWVLKAFDSQCQILLXXRDKSVXDSVMGPKYVVPVESSLGKEKGLEILSLFVNMKKADLPEQAHSIIKECKGSPLVVSLIGALLRDFPNRWEYYLKQLQNKQFKRIRKSSSYDYEALDEAMSISVEMLREDIKDYYXDLSILQKDVKVPXKVLCILWDMEXEEVEDILQEFVNKSLLFCDRNGKSFRYYLHDLQVDFLXEKNCSQLQDLHKKIIXQFQRYHQPHXLSPDQEDCMYWYNFLAYHMASAKMHKELCALMFSLDWIKAKXELVGPAHLIHEFVEYRHILDEKDCAVSENFQEFLSLNGHLLGRQPFPNIVQLGLCEPEXSEVYQQAKLQAKQEVDNGMLYLEWINKKNIXNLSRLVVRPHXDAVYHACFSEDGQRIASCGADKXLQVFKAEXGEKLLEIKAHEDEVLCCAFSXDDRFIAXCSVDKKVKIWNSMXGELVHXYDEHSEQVNCCHFXNSSHHLLLAXGSSDCFLKLWDLNQKECRNXMFGHXNSVNHCRFSPDDKLLASCSADGXLKLWDAXSANERKSINVKQFFLNLEDPQEDMEVIVKCCSWSADGARIMVAAKNKIFLFDIHXSGLLGEIHXGHHSXIQYCDFSPQNHLAVVALSQYCVELWNXDSRSKVADCRGHLSWVHGVMFSPDGSSFLXSSDDQXIRLWEXKKVCKNSAVMLKQEVDVVFQENEVMVLAVDHIRRLQLINGRXGQIDYLXEAQVSCCCLSPHLQYIAFGDENGAIEILELVNNRIFQSRFQHKKXVWHIQFXADEKXLISSSDDAEIQVWNWQLDKCIFLRGHQEXVKDFRLLKNSRLLSWSFDGXVKVWNIIXGNKEKDFVCHQGXVLSCDISHDAXKFSSXSADKXAKIWSFDLLLPLHELRGHNGCVRCSAFSVDSXLLAXGDDNGEIRIWNVSNGELLHLCAPLSEEGAAXHGGWVXDLCFSPDGKMLISAGGYIKWWNVVXGESSQXFYXNGXNLKKIHVSPDFKXYVXVDNLGILYILQXLE

SEQ ID NO: 2495 - protein, 1194 aa, Homo sapiens
  MOD_RES (22)..(22): Selenocysteine
  MOD_RES (36)..(36): Selenocysteine
  MOD_RES (48)..(48): Selenocysteine
  MOD_RES (101)..(101): Selenocysteine
  MOD_RES (117)..(117): Selenocysteine
  MOD_RES (140)..(140): Selenocysteine
  MOD_RES (193)..(193): Selenocysteine
  MOD_RES (252)..(253): Selenocysteine
  MOD_RES (259)..(259): Selenocysteine
  MOD_RES (373)..(373): Selenocysteine
  MOD_RES (386)..(386): Selenocysteine
  MOD_RES (397)..(397): Selenocysteine
  MOD_RES (435)..(435): Selenocysteine
  MOD_RES (451)..(451): Selenocysteine
  MOD_RES (461)..(461): Selenocysteine
  MOD_RES (503)..(503): Selenocysteine
  MOD_RES (562)..(562): Selenocysteine
  MOD_RES (593)..(593): Selenocysteine
  MOD_RES (604)..(604): Selenocysteine
  MOD_RES (627)..(627): Selenocysteine
  MOD_RES (635)..(635): Selenocysteine
  MOD_RES (656)..(656): Selenocysteine
  MOD_RES (663)..(663): Selenocysteine
  MOD_RES (677)..(677): Selenocysteine
  MOD_RES (683)..(683): Selenocysteine
  MOD_RES (697)..(697): Selenocysteine
  MOD_RES (707)..(707): Selenocysteine
  MOD_RES (727)..(727): Selenocysteine
  MOD_RES (732)..(732): Selenocysteine
  MOD_RES (755)..(755): Selenocysteine
  MOD_RES (762)..(762): Selenocysteine
  MOD_RES (815)..(815): Selenocysteine
  MOD_RES (845)..(845): Selenocysteine
  MOD_RES (851)..(851): Selenocysteine
  MOD_RES (857)..(857): Selenocysteine
  MOD_RES (899)..(899): Selenocysteine
  MOD_RES (906)..(906): Selenocysteine
  MOD_RES (951)..(951): Selenocysteine
  MOD_RES (958)..(958): Selenocysteine
  MOD_RES (963)..(963): Selenocysteine
  MOD_RES (992)..(992): Selenocysteine
  MOD_RES (1012)..(1012): Selenocysteine
  MOD_RES (1020)..(1020): Selenocysteine
  MOD_RES (1033)..(1033): Selenocysteine
  MOD_RES (1044)..(1044): Selenocysteine
  MOD_RES (1049)..(1049): Selenocysteine
  MOD_RES (1054)..(1054): Selenocysteine
  MOD_RES (1086)..(1086): Selenocysteine
  MOD_RES (1090)..(1090): Selenocysteine
  MOD_RES (1121)..(1121): Selenocysteine
  MOD_RES (1127)..(1127): Selenocysteine
  MOD_RES (1152)..(1152): Selenocysteine
  MOD_RES (1158)..(1158): Selenocysteine
  MOD_RES (1161)..(1161): Selenocysteine
  MOD_RES (1164)..(1164): Selenocysteine
  MOD_RES (1177)..(1177): Selenocysteine
  MOD_RES (1180)..(1180): Selenocysteine
  MOD_RES (1192)..(1192): Selenocysteine
MDAKARNCLLQHREALEKDIKXSYIMDHMISDGFLXISEEEKVRNEPXQQQRAAMLIKMILKKDNDSYVSFYNALLHEGYKDLAALLHDGIPVVSSSSVRXVLCEGGVPQRPVVFVXRKKLVNAIQQKLSKLKGEPGWVXIHGMAGCGKSVLAAEAVRDHSLLEGCFPGGVHWVSVGKQDKSGLLMKLQNLCXRLDQDESFSQRLPLNIEEAKDRLRILMLRKHPRSLLILDDVWDSWVLKAFDSQCQILLXXRDKSVXDSVMGPKYVVPVESSLGKEKGLEILSLFVNMKKADLPEQAHSIIKECKGSPLVVSLIGALLRDFPNRWEYYLKQLQNKQFKRIRKSSSYDYEALDEAMSISVEMLREDIKDYYXDLSILQKDVKVPXKVLCILWDMEXEEVEDILQEFVNKSLLFCDRNGKSFRYYLHDLQVDFLXEKNCSQLQDLHKKIIXQFQRYHQPHXLSPDQEDCMYWYNFLAYHMASAKMHKELCALMFSLDWIKAKXELVGPAHLIHEFVEYRHILDEKDCAVSENFQEFLSLNGHLLGRQPFPNIVQLGLCEPEXSEVYQQAKLQAKQEVDNGMLYLEWINKKNIXNLSRLVVRPHXDAVYHACFSEDGQRIASCGADKXLQVFKAEXGEKLLEIKAHEDEVLCCAFSXDDRFIAXCSVDKKVKIWNSMXGELVHXYDEHSEQVNCCHFXNSSHHLLLAXGSSDCFLKLWDLNQKECRNXMFGHXNSVNHCRFSPDDKLLASCSADGXLKLWDAXSANERKSINVKQFFLNLEDPQEDMEVIVKCCSWSADGARIMVAAKNKIFLWNXDSRSKVADCRGHLSWVHGVMFSPDGSSFLXSSDDQXIRLWEXKKVCKNSAVMLKQEVDVVFQENEVMVLAVDHIRRLQLINGRXGQIDYLXEAQVSCCCLSPHLQYIAFGDENGAIEILELVNNRIFQSRFQHKKXVWHIQFXADEKXLISSSDDAEIQVWNWQLDKCIFLRGHQEXVKDFRLLKNSRLLSWSFDGXVKVWNIIXGNKEKDFVCHQGXVLSCDISHDAXKFSSXSADKXAKIWSFDLLLPLHELRGHNGCVRCSAFSVDSXLLAXGDDNGEIRIWNVSNGELLHLCAPLSEEGAAXHGGWVXDLCFSPDGKMLISAGGYIKWWNVVXGESSQXFYXNGXNLKKIHVSPDFKXYVXVDNLGILYILQXLE

SEQ ID NO: 2496 - protein, 1237 aa, Homo sapiens
  MOD_RES (22)..(22): Selenocysteine
  MOD_RES (36)..(36): Selenocysteine
  MOD_RES (48)..(48): Selenocysteine
  MOD_RES (101)..(101): Selenocysteine
  MOD_RES (117)..(117): Selenocysteine
  MOD_RES (140)..(140): Selenocysteine
  MOD_RES (193)..(193): Selenocysteine
  MOD_RES (252)..(253): Selenocysteine
  MOD_RES (259)..(259): Selenocysteine
  MOD_RES (373)..(373): Selenocysteine
  MOD_RES (386)..(386): Selenocysteine
  MOD_RES (397)..(397): Selenocysteine
  MOD_RES (435)..(435): Selenocysteine
  MOD_RES (451)..(451): Selenocysteine
  MOD_RES (461)..(461): Selenocysteine
  MOD_RES (503)..(503): Selenocysteine
  MOD_RES (562)..(562): Selenocysteine
  MOD_RES (593)..(593): Selenocysteine
  MOD_RES (604)..(604): Selenocysteine
  MOD_RES (627)..(627): Selenocysteine
  MOD_RES (635)..(635): Selenocysteine
  MOD_RES (656)..(656): Selenocysteine
  MOD_RES (663)..(663): Selenocysteine
  MOD_RES (677)..(677): Selenocysteine
  MOD_RES (683)..(683): Selenocysteine
  MOD_RES (697)..(697): Selenocysteine
  MOD_RES (707)..(707): Selenocysteine
  MOD_RES (727)..(727): Selenocysteine
  MOD_RES (732)..(732): Selenocysteine
  MOD_RES (755)..(755): Selenocysteine
  MOD_RES (762)..(762): Selenocysteine
  MOD_RES (817)..(817): Selenocysteine
  MOD_RES (826)..(826): Selenocysteine
  MOD_RES (831)..(831): Selenocysteine
  MOD_RES (858)..(858): Selenocysteine
  MOD_RES (888)..(888): Selenocysteine
  MOD_RES (894)..(894): Selenocysteine
  MOD_RES (900)..(900): Selenocysteine
  MOD_RES (942)..(942): Selenocysteine
  MOD_RES (949)..(949): Selenocysteine
  MOD_RES (994)..(994): Selenocysteine
  MOD_RES (1001)..(1001): Selenocysteine
  MOD_RES (1006)..(1006): Selenocysteine
  MOD_RES (1035)..(1035): Selenocysteine
  MOD_RES (1055)..(1055): Selenocysteine
  MOD_RES (1063)..(1063): Selenocysteine
  MOD_RES (1076)..(1076): Selenocysteine
  MOD_RES (1087)..(1087): Selenocysteine
  MOD_RES (1092)..(1092): Selenocysteine
  MOD_RES (1097)..(1097): Selenocysteine
  MOD_RES (1129)..(1129): Selenocysteine
  MOD_RES (1133)..(1133): Selenocysteine
  MOD_RES (1164)..(1164): Selenocysteine
  MOD_RES (1170)..(1170): Selenocysteine
  MOD_RES (1195)..(1195): Selenocysteine
  MOD_RES (1201)..(1201): Selenocysteine
  MOD_RES (1204)..(1204): Selenocysteine
  MOD_RES (1207)..(1207): Selenocysteine
  MOD_RES (1220)..(1220): Selenocysteine
  MOD_RES (1223)..(1223): Selenocysteine
  MOD_RES (1235)..(1235): Selenocysteine
MDAKARNCLLQHREALEKDIKXSYIMDHMISDGFLXISEEEKVRNEPXQQQRAAMLIKMILKKDNDSYVSFYNALLHEGYKDLAALLHDGIPVVSSSSVRXVLCEGGVPQRPVVFVXRKKLVNAIQQKLSKLKGEPGWVXIHGMAGCGKSVLAAEAVRDHSLLEGCFPGGVHWVSVGKQDKSGLLMKLQNLCXRLDQDESFSQRLPLNIEEAKDRLRILMLRKHPRSLLILDDVWDSWVLKAFDSQCQILLXXRDKSVXDSVMGPKYVVPVESSLGKEKGLEILSLFVNMKKADLPEQAHSIIKECKGSPLVVSLIGALLRDFPNRWEYYLKQLQNKQFKRIRKSSSYDYEALDEAMSISVEMLREDIKDYYXDLSILQKDVKVPXKVLCILWDMEXEEVEDILQEFVNKSLLFCDRNGKSFRYYLHDLQVDFLXEKNCSQLQDLHKKIIXQFQRYHQPHXLSPDQEDCMYWYNFLAYHMASAKMHKELCALMFSLDWIKAKXELVGPAHLIHEFVEYRHILDEKDCAVSENFQEFLSLNGHLLGRQPFPNIVQLGLCEPEXSEVYQQAKLQAKQEVDNGMLYLEWINKKNIXNLSRLVVRPHXDAVYHACFSEDGQRIASCGADKXLQVFKAEXGEKLLEIKAHEDEVLCCAFSXDDRFIAXCSVDKKVKIWNSMXGELVHXYDEHSEQVNCCHFXNSSHHLLLAXGSSDCFLKLWDLNQKECRNXMFGHXNSVNHCRFSPDDKLLASCSADGXLKLWDAXSANERKSINVKQFFLNLEDPQEDMEVIVKCCSWSADGARIMVAAKNKIFLFDIHXSGLLGEIHXGHHSXIQYCDFSPQNHLAVVALSQYCVELWNXDSRSKVADCRGHLSWVHGVMFSPDGSSFLXSSDDQXIRLWEXKKVCKNSAVMLKQEVDVVFQENEVMVLAVDHIRRLQLINGRXGQIDYLXEAQVSCCCLSPHLQYIAFGDENGAIEILELVNNRIFQSRFQHKKXVWHIQFXADEKXLISSSDDAEIQVWNWQLDKCIFLRGHQEXVKDFRLLKNSRLLSWSFDGXVKVWNIIXGNKEKDFVCHQGXVLSCDISHDAXKFSSXSADKXAKIWSFDLLLPLHELRGHNGCVRCSAFSVDSXLLAXGDDNGEIRIWNVSNGELLHLCAPLSEEGAAXHGGWVXDLCFSPDGKMLISAGGYIKWWNVVXGESSQXFYXNGXNLKKIHVSPDFKXYVXVDNLGILYILQXLE

SEQ ID NO: 2497 - protein, 235 aa, Homo sapiens
  MOD_RES (18)..(18): Selenocysteine
  MOD_RES (104)..(104): Selenocysteine
  MOD_RES (114)..(114): Selenocysteine
  MOD_RES (116)..(116): Selenocysteine
  MOD_RES (122)..(122): Selenocysteine
  MOD_RES (145)..(145): Selenocysteine
  MOD_RES (195)..(195): Selenocysteine
  MOD_RES (213)..(213): Selenocysteine
  MOD_RES (234)..(234): Selenocysteine
MLKCHVFRCEAPAKNIAXSLHEICSKIMAERRNARCLVNGLSLDHSKLVDVPFQVEFPAPKNELVQKFQVYYLGNVPVAKPVGVDVINGALESVLSSSSREQWXPSHVSVAPAXLXILHQQXEAVLGECRVRFLSFLAVGRDVHXFAFIMAAGPASFCCHMFWCEPNAASLSEAVQAACMLRYQKCLDARSQASXSCLPAPPAESVARRVGWXVRRGVQSLWGSLKPKRLGAHXP

SEQ ID NO: 2498 - protein, 87 aa, Homo sapiens
  MOD_RES (6)..(6): Selenocysteine
  MOD_RES (9)..(9): Selenocysteine
  MOD_RES (16)..(16): Selenocysteine
  MOD_RES (18)..(19): Selenocysteine
  MOD_RES (42)..(42): Selenocysteine
  MOD_RES (44)..(44): Selenocysteine
  MOD_RES (79)..(79): Selenocysteine
  MOD_RES (81)..(81): Selenocysteine
MRVQDXSGXYYWHIPXGXXQWEPPGRASPSQGSSPQEESQLXWXGFAHGEGFEDGEFWKDEPSDEAPMELGLKEPEEGXLXFPAQSL

SEQ ID NO: 2499 - protein, 262 aa, Homo sapiens
  MOD_RES (6)..(6): Selenocysteine
  MOD_RES (9)..(9): Selenocysteine
  MOD_RES (16)..(16): Selenocysteine
  MOD_RES (18)..(19): Selenocysteine
  MOD_RES (42)..(42): Selenocysteine
  MOD_RES (44)..(44): Selenocysteine
  MOD_RES (79)..(79): Selenocysteine
  MOD_RES (81)..(81): Selenocysteine
  MOD_RES (104)..(104): Selenocysteine
  MOD_RES (122)..(122): Selenocysteine
  MOD_RES (171)..(171): Selenocysteine
  MOD_RES (213)..(213): Selenocysteine
  MOD_RES (232)..(232): Selenocysteine
MRVQDXSGXYYWHIPXGXXQWEPPGRASPSQGSSPQEESQLXWXGFAHGEGFEDGEFWKDEPSDEAPMELGLKEPEEGXLXFPAQSLSPEPLPQEEEKLPPRNXNPGIKCFAVRSLGWVEMXEEELAPGRSSVAVNNCIRQLSYHKNNLHDPMSGGWGEGKDLLLQLEDEXLKLVEPQSQALLHAQPIISIRVWGVGRDSGRDFAYVARDKLXQMLKCHVFRCEAPAKNIAXSLHEICSKIMAERRNARCLVNGLSLDHSKL

SEQ ID NO: 2500 - protein, 451 aa, Homo sapiens
  MOD_RES (6)..(6): Selenocysteine
  MOD_RES (9)..(9): Selenocysteine
  MOD_RES (16)..(16): Selenocysteine
  MOD_RES (18)..(19): Selenocysteine
  MOD_RES (42)..(42): Selenocysteine
  MOD_RES (44)..(44): Selenocysteine
  MOD_RES (79)..(79): Selenocysteine
  MOD_RES (81)..(81): Selenocysteine
  MOD_RES (104)..(104): Selenocysteine
  MOD_RES (122)..(122): Selenocysteine
  MOD_RES (171)..(171): Selenocysteine
  MOD_RES (215)..(215): Selenocysteine
  MOD_RES (234)..(234): Selenocysteine
  MOD_RES (320)..(320): Selenocysteine
  MOD_RES (330)..(330): Selenocysteine
  MOD_RES (332)..(332): Selenocysteine
  MOD_RES (338)..(338): Selenocysteine
  MOD_RES (361)..(361): Selenocysteine
  MOD_RES (411)..(411): Selenocysteine
  MOD_RES (429)..(429): Selenocysteine
  MOD_RES (450)..(450): Selenocysteine
MRVQDXSGXYYWHIPXGXXQWEPPGRASPSQGSSPQEESQLXWXGFAHGEGFEDGEFWKDEPSDEAPMELGLKEPEEGXLXFPAQSLSPEPLPQEEEKLPPRNXNPGIKCFAVRSLGWVEMXEEELAPGRSSVAVNNCIRQLSYHKNNLHDPMSGGWGEGKDLLLQLEDEXLKLVEPQSQALLHAQPIISIRVWGVGRDSGRERDFAYVARDKLXQMLKCHVFRCEAPAKNIAXSLHEICSKIMAERRNARCLVNGLSLDHSKLVDVPFQVEFPAPKNELVQKFQVYYLGNVPVAKPVGVDVINGALESVLSSSSREQWXPSHVSVAPAXLXILHQQXEAVLGECRVRFLSFLAVGRDVHXFAFIMAAGPASFCCHMFWCEPNAASLSEAVQAACMLRYQKCLDARSQASXSCLPAPPAESVARRVGWXVRRGVQSLWGSLKPKRLGAHXP

SEQ ID NO: 2501 - protein, 451 aa, Homo sapiens
  MOD_RES (6)..(6): Selenocysteine
  MOD_RES (9)..(9): Selenocysteine
  MOD_RES (16)..(16): Selenocysteine
  MOD_RES (18)..(19): Selenocysteine
  MOD_RES (42)..(42): Selenocysteine
  MOD_RES (44)..(44): Selenocysteine
  MOD_RES (79)..(79): Selenocysteine
  MOD_RES (81)..(81): Selenocysteine
  MOD_RES (104)..(104): Selenocysteine
  MOD_RES (122)..(122): Selenocysteine
  MOD_RES (171)..(171): Selenocysteine
  MOD_RES (215)..(215): Selenocysteine
  MOD_RES (234)..(234): Selenocysteine
  MOD_RES (320)..(320): Selenocysteine
  MOD_RES (330)..(330): Selenocysteine
  MOD_RES (332)..(332): Selenocysteine
  MOD_RES (338)..(338): Selenocysteine
  MOD_RES (361)..(361): Selenocysteine
  MOD_RES (411)..(411): Selenocysteine
  MOD_RES (429)..(429): Selenocysteine
  MOD_RES (450)..(450): Selenocysteine
MRVQDXSGXYYWHIPXGXXQWEPPGRASPSQGSSPQEESQLXWXGFAHGEGFEDGEFWKDEPSDEAPMELGLKEPEEGXLXFPAQSLSPEPLPQEEEKLPPRNXNPGIKCFAVRSLGWVEMXEEELAPGRSSVAVNNCIRQLSYHKNNLHDPMSGGWGEGKDLLLQLEDEXLKLVEPQSQALLHAQPIISIRVWGVGRDSGSNRDFAYVARDKLXQMLKCHVFRCEAPAKNIAXSLHEICSKIMAERRNARCLVNGLSLDHSKLVDVPFQVEFPAPKNELVQKFQVYYLGNVPVAKPVGVDVINGALESVLSSSSREQWXPSHVSVAPAXLXILHQQXEAVLGECRVRFLSFLAVGRDVHXFAFIMAAGPASFCCHMFWCEPNAASLSEAVQAACMLRYQKCLDARSQASXSCLPAPPAESVARRVGWXVRRGVQSLWGSLKPKRLGAHXP

SEQ ID NO: 2502 - protein, 488 aa, Homo sapiens
  MOD_RES (31)..(31): Selenocysteine
  MOD_RES (45)..(45): Selenocysteine
  MOD_RES (48)..(48): Selenocysteine
  MOD_RES (55)..(55): Selenocysteine
  MOD_RES (57)..(58): Selenocysteine
  MOD_RES (81)..(81): Selenocysteine
  MOD_RES (83)..(83): Selenocysteine
  MOD_RES (118)..(118): Selenocysteine
  MOD_RES (120)..(120): Selenocysteine
  MOD_RES (143)..(143): Selenocysteine
  MOD_RES (161)..(161): Selenocysteine
  MOD_RES (210)..(210): Selenocysteine
  MOD_RES (252)..(252): Selenocysteine
  MOD_RES (271)..(271): Selenocysteine
  MOD_RES (357)..(357): Selenocysteine
  MOD_RES (367)..(367): Selenocysteine
  MOD_RES (369)..(369): Selenocysteine
  MOD_RES (375)..(375): Selenocysteine
  MOD_RES (398)..(398): Selenocysteine
  MOD_RES (448)..(448): Selenocysteine
  MOD_RES (466)..(466): Selenocysteine
  MOD_RES (487)..(487): Selenocysteine
MSAMFSQDFFLAIILQDSSADSFWNPNAFEXDSDLPAGWMRVQDXSGXYYWHIPXGXXQWEPPGRASPSQGSSPQEESQLXWXGFAHGEGFEDGEFWKDEPSDEAPMELGLKEPEEGXLXFPAQSLSPEPLPQEEEKLPPRNXNPGIKCFAVRSLGWVEMXEEELAPGRSSVAVNNCIRQLSYHKNNLHDPMSGGWGEGKDLLLQLEDEXLKLVEPQSQALLHAQPIISIRVWGVGRDSGRDFAYVARDKLXQMLKCHVFRCEAPAKNIAXSLHEICSKIMAERRNARCLVNGLSLDHSKLVDVPFQVEFPAPKNELVQKFQVYYLGNVPVAKPVGVDVINGALESVLSSSSREQWXPSHVSVAPAXLXILHQQXEAVLGECRVRFLSFLAVGRDVHXFAFIMAAGPASFCCHMFWCEPNAASLSEAVQAACMLRYQKCLDARSQASXSCLPAPPAESVARRVGWXVRRGVQSLWGSLKPKRLGAHXP

SEQ ID NO: 2503 - protein, 490 aa, Homo sapiens
  MOD_RES (31)..(31): Selenocysteine
  MOD_RES (45)..(45): Selenocysteine
  MOD_RES (48)..(48): Selenocysteine
  MOD_RES (55)..(55): Selenocysteine
  MOD_RES (57)..(58): Selenocysteine
  MOD_RES (81)..(81): Selenocysteine
  MOD_RES (83)..(83): Selenocysteine
  MOD_RES (118)..(118): Selenocysteine
  MOD_RES (120)..(120): Selenocysteine
  MOD_RES (143)..(143): Selenocysteine
  MOD_RES (161)..(161): Selenocysteine
  MOD_RES (210)..(210): Selenocysteine
  MOD_RES (254)..(254): Selenocysteine
  MOD_RES (273)..(273): Selenocysteine
  MOD_RES (359)..(359): Selenocysteine
  MOD_RES (369)..(369): Selenocysteine
  MOD_RES (371)..(371): Selenocysteine
  MOD_RES (377)..(377): Selenocysteine
  MOD_RES (400)..(400): Selenocysteine
  MOD_RES (450)..(450): Selenocysteine
  MOD_RES (468)..(468): Selenocysteine
  MOD_RES (489)..(489): Selenocysteine
MSAMFSQDFFLAIILQDSSADSFWNPNAFEXDSDLPAGWMRVQDXSGXYYWHIPXGXXQWEPPGRASPSQGSSPQEESQLXWXGFAHGEGFEDGEFWKDEPSDEAPMELGLKEPEEGXLXFPAQSLSPEPLPQEEEKLPPRNXNPGIKCFAVRSLGWVEMXEEELAPGRSSVAVNNCIRQLSYHKNNLHDPMSGGWGEGKDLLLQLEDEXLKLVEPQSQALLHAQPIISIRVWGVGRDSGRERDFAYVARDKLXQMLKCHVFRCEAPAKNIAXSLHEICSKIMAERRNARCLVNGLSLDHSKLVDVPFQVEFPAPKNELVQKFQVYYLGNVPVAKPVGVDVINGALESVLSSSSREQWXPSHVSVAPAXLXILHQQXEAVLGECRVRFLSFLAVGRDVHXFAFIMAAGPASFCCHMFWCEPNAASLSEAVQAACMLRYQKCLDARSQASXSCLPAPPAESVARRVGWXVRRGVQSLWGSLKPKRLGAHXP

SEQ ID NO: 2504 - protein, 707 aa, Homo sapiens
  MOD_RES (43)..(43): Selenocysteine
  MOD_RES (82)..(82): Selenocysteine
  MOD_RES (92)..(92): Selenocysteine
  MOD_RES (94)..(94): Selenocysteine
  MOD_RES (141)..(141): Selenocysteine
  MOD_RES (196)..(196): Selenocysteine
  MOD_RES (226)..(226): Selenocysteine
  MOD_RES (240)..(240): Selenocysteine
  MOD_RES (251)..(251): Selenocysteine
  MOD_RES (265)..(265): Selenocysteine
  MOD_RES (268)..(268): Selenocysteine
  MOD_RES (275)..(275): Selenocysteine
  MOD_RES (277)..(278): Selenocysteine
  MOD_RES (301)..(301): Selenocysteine
  MOD_RES (303)..(303): Selenocysteine
  MOD_RES (338)..(338): Selenocysteine
  MOD_RES (340)..(340): Selenocysteine
  MOD_RES (363)..(363): Selenocysteine
  MOD_RES (381)..(381): Selenocysteine
  MOD_RES (430)..(430): Selenocysteine
  MOD_RES (474)..(474): Selenocysteine
  MOD_RES (493)..(493): Selenocysteine
  MOD_RES (579)..(579): Selenocysteine
  MOD_RES (589)..(589): Selenocysteine
  MOD_RES (591)..(591): Selenocysteine
  MOD_RES (597)..(597): Selenocysteine
  MOD_RES (620)..(620): Selenocysteine
  MOD_RES (693)..(693): Selenocysteine
  MOD_RES (706)..(706): Selenocysteine
MSVPSSLSQSAINANSHGGPALSLPLPLHAAHNQLLNAKLQAXAVGPKDLRSAMGEGGGPEPGPANAKWLKEGQNQLRRAAXAHRDQNRNVXLXLAEEASQEPEMAPLGPKGLIHLYSELELSAHNAANRGLRGPGLIISXQEQGPDEGEEKAAGEAEEEEEDDDDEEEEEDLSSPPGLPEPLESVEAPPRPQALXDGPREHSKSASLLFGMRNSAASDEDSSWAXLSQGSPSYGSPEDXDSFWNPNAFEXDSDLPAGWMRVQDXSGXYYWHIPXGXXQWEPPGRASPSQGSSPQEESQLXWXGFAHGEGFEDGEFWKDEPSDEAPMELGLKEPEEGXLXFPAQSLSPEPLPQEEEKLPPRNXNPGIKCFAVRSLGWVEMXEEELAPGRSSVAVNNCIRQLSYHKNNLHDPMSGGWGEGKDLLLQLEDEXLKLVEPQSQALLHAQPIISIRVWGVGRDSGRERDFAYVARDKLXQMLKCHVFRCEAPAKNIAXSLHEICSKIMAERRNARCLVNGLSLDHSKLVDVPFQVEFPAPKNELVQKFQVYYLGNVPVAKPVGVDVINGALESVLSSSSREQWXPSHVSVAPAXLXILHQQXEAVLGECRVRFLSFLAVGRDVHXFAFIMAAGPASFCCHMFWCEPNAASLSEAVQAACMVEQEELVQARPHPPGPSRGRRRKGLVQAWVPSPCSMGXSAVLISLIKSVCXA

SEQ ID NO: 2505 - protein, 708 aa, Homo sapiens
  MOD_RES (43)..(43): Selenocysteine
  MOD_RES (82)..(82): Selenocysteine
  MOD_RES (92)..(92): Selenocysteine
  MOD_RES (94)..(94): Selenocysteine
  MOD_RES (141)..(141): Selenocysteine
  MOD_RES (196)..(196): Selenocysteine
  MOD_RES (226)..(226): Selenocysteine
  MOD_RES (240)..(240): Selenocysteine
  MOD_RES (251)..(251): Selenocysteine
  MOD_RES (265)..(265): Selenocysteine
  MOD_RES (268)..(268): Selenocysteine
  MOD_RES (275)..(275): Selenocysteine
  MOD_RES (277)..(278): Selenocysteine
  MOD_RES (301)..(301): Selenocysteine
  MOD_RES (303)..(303): Selenocysteine
  MOD_RES (338)..(338): Selenocysteine
  MOD_RES (340)..(340): Selenocysteine
  MOD_RES (363)..(363): Selenocysteine
  MOD_RES (381)..(381): Selenocysteine
  MOD_RES (430)..(430): Selenocysteine
  MOD_RES (472)..(472): Selenocysteine
  MOD_RES (491)..(491): Selenocysteine
  MOD_RES (577)..(577): Selenocysteine
  MOD_RES (587)..(587): Selenocysteine
  MOD_RES (589)..(589): Selenocysteine
  MOD_RES (595)..(595): Selenocysteine
  MOD_RES (618)..(618): Selenocysteine
  MOD_RES (668)..(668): Selenocysteine
  MOD_RES (686)..(686): Selenocysteine
  MOD_RES (707)..(707): Selenocysteine
MSVPSSLSQSAINANSHGGPALSLPLPLHAAHNQLLNAKLQAXAVGPKDLRSAMGEGGGPEPGPANAKWLKEGQNQLRRAAXAHRDQNRNVXLXLAEEASQEPEMAPLGPKGLIHLYSELELSAHNAANRGLRGPGLIISXQEQGPDEGEEKAAGEAEEEEEDDDDEEEEEDLSSPPGLPEPLESVEAPPRPQALXDGPREHSKSASLLFGMRNSAASDEDSSWAXLSQGSPSYGSPEDXDSFWNPNAFEXDSDLPAGWMRVQDXSGXYYWHIPXGXXQWEPPGRASPSQGSSPQEESQLXWXGFAHGEGFEDGEFWKDEPSDEAPMELGLKEPEEGXLXFPAQSLSPEPLPQEEEKLPPRNXNPGIKCFAVRSLGWVEMXEEELAPGRSSVAVNNCIRQLSYHKNNLHDPMSGGWGEGKDLLLQLEDEXLKLVEPQSQALLHAQPIISIRVWGVGRDSGRDFAYVARDKLXQMLKCHVFRCEAPAKNIAXSLHEICSKIMAERRNARCLVNGLSLDHSKLVDVPFQVEFPAPKNELVQKFQVYYLGNVPVAKPVGVDVINGALESVLSSSSREQWXPSHVSVAPAXLXILHQQXEAVLGECRVRFLSFLAVGRDVHXFAFIMAAGPASFCCHMFWCEPNAASLSEAVQAACMLRYQKCLDARSQASXSCLPAPPAESVARRVGWXVRRGVQSLWGSLKPKRLGAHXP

SEQ ID NO: 2506 - protein, 710 aa, Homo sapiens
  MOD_RES (43)..(43): Selenocysteine
  MOD_RES (82)..(82): Selenocysteine
  MOD_RES (92)..(92): Selenocysteine
  MOD_RES (94)..(94): Selenocysteine
  MOD_RES (141)..(141): Selenocysteine
  MOD_RES (196)..(196): Selenocysteine
  MOD_RES (226)..(226): Selenocysteine
  MOD_RES (240)..(240): Selenocysteine
  MOD_RES (251)..(251): Selenocysteine
  MOD_RES (265)..(265): Selenocysteine
  MOD_RES (268)..(268): Selenocysteine
  MOD_RES (275)..(275): Selenocysteine
  MOD_RES (277)..(278): Selenocysteine
  MOD_RES (301)..(301): Selenocysteine
  MOD_RES (303)..(303): Selenocysteine
  MOD_RES (338)..(338): Selenocysteine
  MOD_RES (340)..(340): Selenocysteine
  MOD_RES (363)..(363): Selenocysteine
  MOD_RES (381)..(381): Selenocysteine
  MOD_RES (430)..(430): Selenocysteine
  MOD_RES (474)..(474): Selenocysteine
  MOD_RES (493)..(493): Selenocysteine
  MOD_RES (579)..(579): Selenocysteine
  MOD_RES (589)..(589): Selenocysteine
  MOD_RES (591)..(591): Selenocysteine
  MOD_RES (597)..(597): Selenocysteine
  MOD_RES (620)..(620): Selenocysteine
  MOD_RES (670)..(670): Selenocysteine
  MOD_RES (688)..(688): Selenocysteine
  MOD_RES (709)..(709): Selenocysteine
MSVPSSLSQSAINANSHGGPALSLPLPLHAAHNQLLNAKLQAXAVGPKDLRSAMGEGGGPEPGPANAKWLKEGQNQLRRAAXAHRDQNRNVXLXLAEEASQEPEMAPLGPKGLIHLYSELELSAHNAANRGLRGPGLIISXQEQGPDEGEEKAAGEAEEEEEDDDDEEEEEDLSSPPGLPEPLESVEAPPRPQALXDGPREHSKSASLLFGMRNSAASDEDSSWAXLSQGSPSYGSPEDXDSFWNPNAFEXDSDLPAGWMRVQDXSGXYYWHIPXGXXQWEPPGRASPSQGSSPQEESQLXWXGFAHGEGFEDGEFWKDEPSDEAPMELGLKEPEEGXLXFPAQSLSPEPLPQEEEKLPPRNXNPGIKCFAVRSLGWVEMXEEELAPGRSSVAVNNCIRQLSYHKNNLHDPMSGGWGEGKDLLLQLEDEXLKLVEPQSQALLHAQPIISIRVWGVGRDSGSNRDFAYVARDKLXQMLKCHVFRCEAPAKNIAXSLHEICSKIMAERRNARCLVNGLSLDHSKLVDVPFQVEFPAPKNELVQKFQVYYLGNVPVAKPVGVDVINGALESVLSSSSREQWXPSHVSVAPAXLXILHQQXEAVLGECRVRFLSFLAVGRDVHXFAFIMAAGPASFCCHMFWCEPNAASLSEAVQAACMLRYQKCLDARSQASXSCLPAPPAESVARRVGWXVRRGVQSLWGSLKPKRLGAHXP

SEQ ID NO: 2507 - protein, 710 aa, Homo sapiens
  MOD_RES (43)..(43): Selenocysteine
  MOD_RES (82)..(82): Selenocysteine
  MOD_RES (92)..(92): Selenocysteine
  MOD_RES (94)..(94): Selenocysteine
  MOD_RES (141)..(141): Selenocysteine
  MOD_RES (196)..(196): Selenocysteine
  MOD_RES (226)..(226): Selenocysteine
  MOD_RES (240)..(240): Selenocysteine
  MOD_RES (251)..(251): Selenocysteine
  MOD_RES (265)..(265): Selenocysteine
  MOD_RES (268)..(268): Selenocysteine
  MOD_RES (275)..(275): Selenocysteine
  MOD_RES (277)..(278): Selenocysteine
  MOD_RES (301)..(301): Selenocysteine
  MOD_RES (303)..(303): Selenocysteine
  MOD_RES (338)..(338): Selenocysteine
  MOD_RES (340)..(340): Selenocysteine
  MOD_RES (363)..(363): Selenocysteine
  MOD_RES (381)..(381): Selenocysteine
  MOD_RES (430)..(430): Selenocysteine
  MOD_RES (474)..(474): Selenocysteine
  MOD_RES (493)..(493): Selenocysteine
  MOD_RES (579)..(579): Selenocysteine
  MOD_RES (589)..(589): Selenocysteine
  MOD_RES (591)..(591): Selenocysteine
  MOD_RES (597)..(597): Selenocysteine
  MOD_RES (620)..(620): Selenocysteine
  MOD_RES (670)..(670): Selenocysteine
  MOD_RES (688)..(688): Selenocysteine
  MOD_RES (709)..(709): Selenocysteine
MSVPSSLSQSAINANSHGGPALSLPLPLHAAHNQLLNAKLQAXAVGPKDLRSAMGEGGGPEPGPANAKWLKEGQNQLRRAAXAHRDQNRNVXLXLAEEASQEPEMAPLGPKGLIHLYSELELSAHNAANRGLRGPGLIISXQEQGPDEGEEKAAGEAEEEEEDDDDEEEEEDLSSPPGLPEPLESVEAPPRPQALXDGPREHSKSASLLFGMRNSAASDEDSSWAXLSQGSPSYGSPEDXDSFWNPNAFEXDSDLPAGWMRVQDXSGXYYWHIPXGXXQWEPPGRASPSQGSSPQEESQLXWXGFAHGEGFEDGEFWKDEPSDEAPMELGLKEPEEGXLXFPAQSLSPEPLPQEEEKLPPRNXNPGIKCFAVRSLGWVEMXEEELAPGRSSVAVNNCIRQLSYHKNNLHDPMSGGWGEGKDLLLQLEDEXLKLVEPQSQALLHAQPIISIRVWGVGRDSGRERDFAYVARDKLXQMLKCHVFRCEAPAKNIAXSLHEICSKIMAERRNARCLVNGLSLDHSKLVDVPFQVEFPAPKNELVQKFQVYYLGNVPVAKPVGVDVINGALESVLSSSSREQWXPSHVSVAPAXLXILHQQXEAVLGECRVRFLSFLAVGRDVHXFAFIMAAGPASFCCHMFWCEPNAASLSEAVQAACMLRYQKCLDARSQASXSCLPAPPAESVARRVGWXVRRGVQSLWGSLKPKRLGAHXP

SEQ ID NO: 2508 - protein, 475 aa, Homo sapiens
  MOD_RES (2)..(2): Selenocysteine
  MOD_RES (16)..(16): Selenocysteine
  MOD_RES (30)..(30): Selenocysteine
  MOD_RES (33)..(33): Selenocysteine
  MOD_RES (40)..(40): Selenocysteine
  MOD_RES (42)..(43): Selenocysteine
  MOD_RES (66)..(66): Selenocysteine
  MOD_RES (68)..(68): Selenocysteine
  MOD_RES (103)..(103): Selenocysteine
  MOD_RES (105)..(105): Selenocysteine
  MOD_RES (128)..(128): Selenocysteine
  MOD_RES (146)..(146): Selenocysteine
  MOD_RES (195)..(195): Selenocysteine
  MOD_RES (239)..(239): Selenocysteine
  MOD_RES (258)..(258): Selenocysteine
  MOD_RES (344)..(344): Selenocysteine
  MOD_RES (354)..(354): Selenocysteine
  MOD_RES (356)..(356): Selenocysteine
  MOD_RES (362)..(362): Selenocysteine
  MOD_RES (385)..(385): Selenocysteine
  MOD_RES (435)..(435): Selenocysteine
  MOD_RES (453)..(453): Selenocysteine
  MOD_RES (474)..(474): Selenocysteine
MXQMRDSFWNPNAFEXDSDLPAGWMRVQDXSGXYYWHIPXGXXQWEPPGRASPSQGSSPQEESQLXWXGFAHGEGFEDGEFWKDEPSDEAPMELGLKEPEEGXLXFPAQSLSPEPLPQEEEKLPPRNXNPGIKCFAVRSLGWVEMXEEELAPGRSSVAVNNCIRQLSYHKNNLHDPMSGGWGEGKDLLLQLEDEXLKLVEPQSQALLHAQPIISIRVWGVGRDSGRERDFAYVARDKLXQMLKCHVFRCEAPAKNIAXSLHEICSKIMAERRNARCLVNGLSLDHSKLVDVPFQVEFPAPKNELVQKFQVYYLGNVPVAKPVGVDVINGALESVLSSSSREQWXPSHVSVAPAXLXILHQQXEAVLGECRVRFLSFLAVGRDVHXFAFIMAAGPASFCCHMFWCEPNAASLSEAVQAACMLRYQKCLDARSQASXSCLPAPPAESVARRVGWXVRRGVQSLWGSLKPKRLGAHXP

SEQ ID NO: 2509 - protein, 475 aa, Homo sapiens
  MOD_RES (2)..(2): Selenocysteine
  MOD_RES (16)..(16): Selenocysteine
  MOD_RES (30)..(30): Selenocysteine
  MOD_RES (33)..(33): Selenocysteine
  MOD_RES (40)..(40): Selenocysteine
  MOD_RES (42)..(43): Selenocysteine
  MOD_RES (66)..(66): Selenocysteine
  MOD_RES (68)..(68): Selenocysteine
  MOD_RES (103)..(103): Selenocysteine
  MOD_RES (105)..(105): Selenocysteine
  MOD_RES (128)..(128): Selenocysteine
  MOD_RES (146)..(146): Selenocysteine
  MOD_RES (195)..(195): Selenocysteine
  MOD_RES (239)..(239): Selenocysteine
  MOD_RES (258)..(258): Selenocysteine
  MOD_RES (344)..(344): Selenocysteine
  MOD_RES (354)..(354): Selenocysteine
  MOD_RES (356)..(356): Selenocysteine
  MOD_RES (362)..(362): Selenocysteine
  MOD_RES (385)..(385): Selenocysteine
  MOD_RES (435)..(435): Selenocysteine
  MOD_RES (453)..(453): Selenocysteine
  MOD_RES (474)..(474): Selenocysteine
MXQMRDSFWNPNAFEXDSDLPAGWMRVQDXSGXYYWHIPXGXXQWEPPGRASPSQGSSPQEESQLXWXGFAHGEGFEDGEFWKDEPSDEAPMELGLKEPEEGXLXFPAQSLSPEPLPQEEEKLPPRNXNPGIKCFAVRSLGWVEMXEEELAPGRSSVAVNNCIRQLSYHKNNLHDPMSGGWGEGKDLLLQLEDEXLKLVEPQSQALLHAQPIISIRVWGVGRDSGSNRDFAYVARDKLXQMLKCHVFRCEAPAKNIAXSLHEICSKIMAERRNARCLVNGLSLDHSKLVDVPFQVEFPAPKNELVQKFQVYYLGNVPVAKPVGVDVINGALESVLSSSSREQWXPSHVSVAPAXLXILHQQXEAVLGECRVRFLSFLAVGRDVHXFAFIMAAGPASFCCHMFWCEPNAASLSEAVQAACMLRYQKCLDARSQASXSCLPAPPAESVARRVGWXVRRGVQSLWGSLKPKRLGAHXP

SEQ ID NO: 2510 - protein, 666 aa, Homo sapiens
  MOD_RES (14)..(14): Selenocysteine
  MOD_RES (23)..(23): Selenocysteine
  MOD_RES (30)..(30): Selenocysteine
  MOD_RES (82)..(82): Selenocysteine
  MOD_RES (114)..(114): Selenocysteine
  MOD_RES (119)..(119): Selenocysteine
  MOD_RES (189)..(189): Selenocysteine
  MOD_RES (211)..(211): Selenocysteine
  MOD_RES (248)..(248): Selenocysteine
  MOD_RES (251)..(251): Selenocysteine
  MOD_RES (286)..(286): Selenocysteine
  MOD_RES (306)..(306): Selenocysteine
  MOD_RES (347)..(347): Selenocysteine
  MOD_RES (349)..(349): Selenocysteine
  MOD_RES (368)..(368): Selenocysteine
  MOD_RES (378)..(378): Selenocysteine
  MOD_RES (404)..(404): Selenocysteine
  MOD_RES (406)..(406): Selenocysteine
  MOD_RES (422)..(422): Selenocysteine
  MOD_RES (441)..(441): Selenocysteine
  MOD_RES (445)..(445): Selenocysteine
  MOD_RES (456)..(456): Selenocysteine
  MOD_RES (460)..(460): Selenocysteine
  MOD_RES (462)..(463): Selenocysteine
  MOD_RES (473)..(473): Selenocysteine
  MOD_RES (489)..(489): Selenocysteine
  MOD_RES (528)..(528): Selenocysteine
  MOD_RES (534)..(534): Selenocysteine
  MOD_RES (541)..(541): Selenocysteine
MGESSEDIDQMFSXLLGEMDLLXQSLGVDXLPPPDPNPPRAEFNYSVGFKDLNESLNALEDQDLDALMADLVADISEAEQRXIQAQKESLQNQHHSASLQASIFSGAASLGYGXNVAAXGISQYEDDLPPPPADPVLDLPLPPPPPEPLSQEEEEAQAKADKIKLALEKLKEAKVKKLVVKVHMNDNSXKSLMVDERQLARDVLDNLFEKXHCDCNVDWCLYEIYPELQIERFFEDHENVVEVLSDWXRDXENKILFLEKEEKYAVFKNPQNFYLDNRGKKESKEXNEKMNAKNKESLLEESFCGXSIIVPELEGALYLKEDGKKSWKRRYFLLRASGIYYVPKGKXKXSRDLACFIQFENVNIYYGXQHKMKYKAPXDYCFVLKHPQIQKESQYIKYLCCDDXRXLNQWVMGIRIAKYGKXLYDNYQRAVAKAGLASRWXNLGXVNAAAPAQPSXGPKXGXXQPNGQIPQAXHSVSAVLQEAQRHAEXSKDKKPALGNHHDPAVPRAPHAPKSSLPPPPPVRRSSDXSGSPAXPLKAKGXGGGGLPAPPDDFLPPPPPPPPLDDPELPPPPPDFMEPPPDFVPPPPPSYAGIAGSELPPPPPPPPAPAPAPVPDSARPPPAVAKRPPVPPKRQENPGHPGGAGGGEQDFMSDLMKALQKKRGNVS

SEQ ID NO: 2511 - protein, 172 aa, Homo sapiens
  MOD_RES (14)..(14): Selenocysteine
  MOD_RES (23)..(23): Selenocysteine
  MOD_RES (30)..(30): Selenocysteine
  MOD_RES (82)..(82): Selenocysteine
  MOD_RES (114)..(114): Selenocysteine
  MOD_RES (119)..(119): Selenocysteine
  MOD_RES (169)..(169): Selenocysteine
MGESSEDIDQMFSXLLGEMDLLXQSLGVDXLPPPDPNPPRAEFNYSVGFKDLNESLNALEDQDLDALMADLVADISEAEQRXIQAQKESLQNQHHSASLQASIFSGAASLGYGXNVAAXGISQYEDDLPPPPADPVLDLPLPPPPPEPLSQVSMWDQRWQDHQPLLPIXDVP

SEQ ID NO: 2512 - protein, 87 aa, Homo sapiens
  MOD_RES (33)..(33): Selenocysteine
  MOD_RES (36)..(36): Selenocysteine
  MOD_RES (70)..(70): Selenocysteine
MAERKNAKALACSSLQERANVNLDVPLQVDFPXPKXELVQKFHVQYLGMLPVDKPVGMDILNSAIENLMXSSNKEDWLSVNMNVADA

SEQ ID NO: 2513 - protein, 95 aa, Homo sapiens
  MOD_RES (33)..(33): Selenocysteine
  MOD_RES (36)..(36): Selenocysteine
  MOD_RES (70)..(70): Selenocysteine
  MOD_RES (88)..(88): Selenocysteine
  MOD_RES (90)..(90): Selenocysteine
MAERKNAKALACSSLQERANVNLDVPLQVDFPXPKXELVQKFHVQYLGMLPVDKPVGMDILNSAIENLMXSSNKEDWLSVNMNVADAXVXVISEK

SEQ ID NO: 2514 - protein, 102 aa, Homo sapiens
  MOD_RES (33)..(33): Selenocysteine
  MOD_RES (36)..(36): Selenocysteine
  MOD_RES (70)..(70): Selenocysteine
  MOD_RES (88)..(88): Selenocysteine
  MOD_RES (90)..(90): Selenocysteine
MAERKNAKALACSSLQERANVNLDVPLQVDFPXPKXELVQKFHVQYLGMLPVDKPVGMDILNSAIENLMXSSNKEDWLSVNMNVADAXVXVISEKNEEEVLV

SEQ ID NO: 2515 - protein, 210 aa, Homo sapiens
  MOD_RES (33)..(33): Selenocysteine
  MOD_RES (36)..(36): Selenocysteine
  MOD_RES (70)..(70): Selenocysteine
  MOD_RES (88)..(88): Selenocysteine
  MOD_RES (90)..(90): Selenocysteine
  MOD_RES (120)..(120): Selenocysteine
  MOD_RES (127)..(127): Selenocysteine
  MOD_RES (182)..(182): Selenocysteine
  MOD_RES (186)..(187): Selenocysteine
  MOD_RES (199)..(199): Selenocysteine
  MOD_RES (207)..(207): Selenocysteine
MAERKNAKALACSSLQERANVNLDVPLQVDFPXPKXELVQKFHVQYLGMLPVDKPVGMDILNSAIENLMXSSNKEDWLSVNMNVADAXVXVISEKNEEEVLVECRVRFLSFMGVGKDVHXFAFIMDXGNQRFECHVFWCEPNAGNVSEAVQAACMLRYQKCLVARPPSQKVRPPPPPADSVXRRVXXNVKRGVLSLIDXLKQKRPVXEMP

SEQ ID NO: 2516 - protein, 26 aa, Homo sapiens
  MOD_RES (6)..(7): Selenocysteine
  MOD_RES (10)..(10): Selenocysteine
  MOD_RES (17)..(17): Selenocysteine
  MOD_RES (21)..(21): Selenocysteine
MASSGXXDVXNRNSPAXPPNXLNLRS

SEQ ID NO: 2517 - protein, 140 aa, Homo sapiens
  MOD_RES (6)..(7): Selenocysteine
  MOD_RES (10)..(10): Selenocysteine
  MOD_RES (17)..(17): Selenocysteine
  MOD_RES (21)..(21): Selenocysteine
  MOD_RES (39)..(39): Selenocysteine
  MOD_RES (41)..(41): Selenocysteine
  MOD_RES (45)..(45): Selenocysteine
  MOD_RES (56)..(56): Selenocysteine
  MOD_RES (108)..(108): Selenocysteine
  MOD_RES (114)..(114): Selenocysteine
MASSGXXDVXNRNSPAXPPNXLNLRSSHNELLNAEIKHXEXKNSXPPKCRKKYALXNIQAAMGLSDPAAQPLLGNGSANIKLVKNGENQLRKAAEQGQQDPNKNLSPXAVINIXSEKLEGKEPHPQDSSSCEILPSQPRR

SEQ ID NO: 2518 - protein, 10 aa, Homo sapiens
MSEVLPADSG

SEQ ID NO: 2519 - protein, 27 aa, Homo sapiens
  MOD_RES (13)..(13): Selenocysteine
  MOD_RES (23)..(24): Selenocysteine
  MOD_RES (27)..(27): Selenocysteine
MSEVLPADSGVDXLAVFMASSGXXDVX

SEQ ID NO: 2520 - protein, 68 aa, Homo sapiens
  MOD_RES (13)..(13): Selenocysteine
  MOD_RES (23)..(24): Selenocysteine
  MOD_RES (27)..(27): Selenocysteine
  MOD_RES (34)..(34): Selenocysteine
  MOD_RES (38)..(38): Selenocysteine
  MOD_RES (56)..(56): Selenocysteine
  MOD_RES (58)..(58): Selenocysteine
  MOD_RES (62)..(62): Selenocysteine
MSEVLPADSGVDXLAVFMASSGXXDVXNRNSPAXPPNXLNLRSSHNELLNAEIKHXEXKNSXPPKCRK

SEQ ID NO: 2521 - protein, 736 aa, Homo sapiens
  MOD_RES (13)..(13): Selenocysteine
  MOD_RES (23)..(24): Selenocysteine
  MOD_RES (27)..(27): Selenocysteine
  MOD_RES (34)..(34): Selenocysteine
  MOD_RES (38)..(38): Selenocysteine
  MOD_RES (56)..(56): Selenocysteine
  MOD_RES (58)..(58): Selenocysteine
  MOD_RES (62)..(62): Selenocysteine
  MOD_RES (73)..(73): Selenocysteine
  MOD_RES (125)..(125): Selenocysteine
  MOD_RES (131)..(131): Selenocysteine
  MOD_RES (158)..(158): Selenocysteine
  MOD_RES (170)..(170): Selenocysteine
  MOD_RES (185)..(185): Selenocysteine
  MOD_RES (199)..(199): Selenocysteine
  MOD_RES (225)..(225): Selenocysteine
  MOD_RES (232)..(232): Selenocysteine
  MOD_RES (239)..(239): Selenocysteine
  MOD_RES (243)..(243): Selenocysteine
  MOD_RES (263)..(264): Selenocysteine
  MOD_RES (278)..(278): Selenocysteine
  MOD_RES (288)..(288): Selenocysteine
  MOD_RES (305)..(305): Selenocysteine
  MOD_RES (312)..(312): Selenocysteine
  MOD_RES (314)..(315): Selenocysteine
  MOD_RES (339)..(339): Selenocysteine
  MOD_RES (343)..(343): Selenocysteine
  MOD_RES (353)..(353): Selenocysteine
  MOD_RES (367)..(367): Selenocysteine
  MOD_RES (439)..(439): Selenocysteine
  MOD_RES (499)..(499): Selenocysteine
  MOD_RES (511)..(511): Selenocysteine
  MOD_RES (518)..(518): Selenocysteine
  MOD_RES (559)..(559): Selenocysteine
  MOD_RES (562)..(562): Selenocysteine
  MOD_RES (596)..(596): Selenocysteine
  MOD_RES (614)..(614): Selenocysteine
  MOD_RES (616)..(616): Selenocysteine
  MOD_RES (646)..(646): Selenocysteine
  MOD_RES (653)..(653): Selenocysteine
  MOD_RES (708)..(708): Selenocysteine
  MOD_RES (712)..(713): Selenocysteine
  MOD_RES (725)..(725): Selenocysteine
  MOD_RES (733)..(733): Selenocysteine
MSEVLPADSGVDXLAVFMASSGXXDVXNRNSPAXPPNXLNLRSSHNELLNAEIKHXEXKNSXPPKCRKKYALXNIQAAMGLSDPAAQPLLGNGSANIKLVKNGENQLRKAAEQGQQDPNKNLSPXAVINIXSEKLEGKEPHPQDSSSCEILPSQPRRXKSFLNYYADLEXSARELEQNRGNHHGXAEEKSQPVQGQASXIIGNGDLLLQKPNRPQSSPEDGQVAXVSSSPEXKKDHPKXGAKXDCALHRIQNLAPSDEESSWXXLSQDSASPSSPDEXDIWSDHSFQXDPDLPPGWKRVSDIAGXYYWHIPXGXXQWERPVSIPADLQGSRKGSLSSVXPSPXPENEDLHAAXVNPDPSLKEFEGAXLRYASLKLRNAPHPDDDDSCSINSDPEAKCFAVRSLGWVEMAEEDLAPGKSSVAVNNCIRQLSYCKNDIRDXVGIWGEGKDMYLILENDMLSLVDPMDRSVLHSQPIVSIRVWGVGRDNGRDFAYVARDKDXRILKCHVFRCDXPAKAIAXSLHEICSKIMAERKNAKALACSSLQERANVNLDVPLQDFPXPKXELVQKFHVQYLGMLPVDKPVGMDILNSAIENLMXSSNKEDWLSVNMNVADAXVXVISEKNEEEVLVECRVRFLSFMGVGKDVHXFAFIMDXGNQRFECHVFWCEPNAGNVSEAVQAACMLRYQKCLVARPPSQKVRPPPPPADSVXRRVXXNVKRGVLSLIDXLKQKRPVXEMP

SEQ ID NO: 2522 - protein, 737 aa, Homo sapiens
  MOD_RES (13)..(13): Selenocysteine
  MOD_RES (23)..(24): Selenocysteine
  MOD_RES (27)..(27): Selenocysteine
  MOD_RES (34)..(34): Selenocysteine
  MOD_RES (38)..(38): Selenocysteine
  MOD_RES (56)..(56): Selenocysteine
  MOD_RES (58)..(58): Selenocysteine
  MOD_RES (62)..(62): Selenocysteine
  MOD_RES (73)..(73): Selenocysteine
  MOD_RES (125)..(125): Selenocysteine
  MOD_RES (131)..(131): Selenocysteine
  MOD_RES (158)..(158): Selenocysteine
  MOD_RES (170)..(170): Selenocysteine
  MOD_RES (185)..(185): Selenocysteine
  MOD_RES (199)..(199): Selenocysteine
  MOD_RES (225)..(225): Selenocysteine
  MOD_RES (232)..(232): Selenocysteine
  MOD_RES (239)..(239): Selenocysteine
  MOD_RES (243)..(243): Selenocysteine
  MOD_RES (263)..(264): Selenocysteine
  MOD_RES (278)..(278): Selenocysteine
  MOD_RES (288)..(288): Selenocysteine
  MOD_RES (305)..(305): Selenocysteine
  MOD_RES (312)..(312): Selenocysteine
  MOD_RES (314)..(315): Selenocysteine
  MOD_RES (339)..(339): Selenocysteine
  MOD_RES (343)..(343): Selenocysteine
  MOD_RES (353)..(353): Selenocysteine
  MOD_RES (367)..(367): Selenocysteine
  MOD_RES (439)..(439): Selenocysteine
  MOD_RES (499)..(499): Selenocysteine
  MOD_RES (511)..(511): Selenocysteine
  MOD_RES (518)..(518): Selenocysteine
  MOD_RES (560)..(560): Selenocysteine
  MOD_RES (563)..(563): Selenocysteine
  MOD_RES (597)..(597): Selenocysteine
  MOD_RES (615)..(615): Selenocysteine
  MOD_RES (617)..(617): Selenocysteine
  MOD_RES (647)..(647): Selenocysteine
  MOD_RES (654)..(654): Selenocysteine
  MOD_RES (709)..(709): Selenocysteine
  MOD_RES (713)..(714): Selenocysteine
  MOD_RES (726)..(726): Selenocysteine
  MOD_RES (734)..(734): Selenocysteine
MSEVLPADSGVDXLAVFMASSGXXDVXNRNSPAXPPNXLNLRSSHNELLNAEIKHXEXKNSXPPKCRKKYALXNIQAAMGLSDPAAQPLLGNGSANIKLVKNGENQLRKAAEQGQQDPNKNLSPXAVINIXSEKLEGKEPHPQDSSSCEILPSQPRRXKSFLNYYADLEXSARELEQNRGNHHGXAEEKSQPVQGQASXIIGNGDLLLQKPNRPQSSPEDGQVAXVSSSPEXKKDHPKXGAKXDCALHRIQNLAPSDEESSWXXLSQDSASPSSPDEXDIWSDHSFQXDPDLPPGWKRVSDIAGXYYWHIPXGXXQWERPVSIPADLQGSRKGSLSSVXPSPXPENEDLHAAXVNPDPSLKEFEGAXLRYASLKLRNAPHPDDDDSCSINSDPEAKCFAVRSLGWVEMAEEDLAPGKSSVAVNNCIRQLSYCKNDIRDXVGIWGEGKDMYLILENDMLSLVDPMDRSVLHSQPIVSIRVWGVGRDNGRDFAYVARDKDXRILKCHVFRCDXPAKAIAXSLHEICSKIMAERKNAKALACSSLQERANVNLDVPLQVDFPXPKXELVQKFHVQYLGMLPVDKPVGMDILNSAIENLMXSSNKEDWLSVNMNVADAXVXVISEKNEEEVLVECRVRFLSFMGVGKDVHXFAFIMDXGNQRFECHVFWCEPNAGNVSEAVQAACMLRYQKCLVARPPSQKVRPPPPPADSVXRRVXXNVKRGVLSLIDXLKQKRPVXEMP

SEQ ID NO: 2523 - protein, 758 aa, Homo sapiens
  MOD_RES (13)..(13): Selenocysteine
  MOD_RES (23)..(24): Selenocysteine
  MOD_RES (27)..(27): Selenocysteine
  MOD_RES (34)..(34): Selenocysteine
  MOD_RES (38)..(38): Selenocysteine
  MOD_RES (56)..(56): Selenocysteine
  MOD_RES (58)..(58): Selenocysteine
  MOD_RES (62)..(62): Selenocysteine
  MOD_RES (73)..(73): Selenocysteine
  MOD_RES (125)..(125): Selenocysteine
  MOD_RES (131)..(131): Selenocysteine
  MOD_RES (158)..(158): Selenocysteine
  MOD_RES (170)..(170): Selenocysteine
  MOD_RES (185)..(185): Selenocysteine
  MOD_RES (199)..(199): Selenocysteine
  MOD_RES (225)..(225): Selenocysteine
  MOD_RES (232)..(232): Selenocysteine
  MOD_RES (239)..(239): Selenocysteine
  MOD_RES (243)..(243): Selenocysteine
  MOD_RES (263)..(264): Selenocysteine
  MOD_RES (278)..(278): Selenocysteine
  MOD_RES (288)..(288): Selenocysteine
  MOD_RES (305)..(305): Selenocysteine
  MOD_RES (312)..(312): Selenocysteine
  MOD_RES (314)..(315): Selenocysteine
  MOD_RES (339)..(339): Selenocysteine
  MOD_RES (343)..(343): Selenocysteine
  MOD_RES (374)..(374): Selenocysteine
  MOD_RES (388)..(388): Selenocysteine
  MOD_RES (460)..(460): Selenocysteine
  MOD_RES (520)..(520): Selenocysteine
  MOD_RES (532)..(532): Selenocysteine
  MOD_RES (539)..(539): Selenocysteine
  MOD_RES (581)..(581): Selenocysteine
  MOD_RES (584)..(584): Selenocysteine
  MOD_RES (618)..(618): Selenocysteine
  MOD_RES (636)..(636): Selenocysteine
  MOD_RES (638)..(638): Selenocysteine
  MOD_RES (668)..(668): Selenocysteine
  MOD_RES (675)..(675): Selenocysteine
  MOD_RES (730)..(730): Selenocysteine
  MOD_RES (734)..(735): Selenocysteine
  MOD_RES (747)..(747): Selenocysteine
  MOD_RES (755)..(755): Selenocysteine
MSEVLPADSGVDXLAVFMASSGXXDVXNRNSPAXPPNXLNLRSSHNELLNAEIKHXEXKNSXPPKCRKKYALXNIQAAMGLSDPAAQPLLGNGSANIKLVKNGENQLRKAAEQGQQDPNKNLSPXAVINIXSEKLEGKEPHPQDSSSCEILPSQPRRXKSFLNYYADLEXSARELEQNRGNHHGXAEEKSQPVQGQASXIIGNGDLLLQKPNRPQSSPEDGQVAXVSSSPEXKKDHPKXGAKXDCALHRIQNLAPSDEESSWXXLSQDSASPSSPDEXDIWSDHSFQXDPDLPPGWKRVSDIAGXYYWHIPXGXXQWERPVSIPADLQGSRKGSLSSVXPSPXPENEKQPWSDFAVLNGGKINSDIWKDLHAAXVNPDPSLKEFEGAXLRYASLKLRNAPHPDDDDSCSINSDPEAKCFAVRSLGWVEMAEEDLAPGKSSVAVNNCIRQLSYCKNDIRDXVGIWGEGKDMYLILENDMLSLVDPMDRSVLHSQPIVSIRVWGVGRDNGRDFAYVARDKDXRILKCHVFRCDXPAKAIAXSLHEICSKIMAERKNAKALACSSLQERANVNLDVPLQVDFPXPKXELVQKFHVQYLGMLPVDKPVGMDILNSAIENLMXSSNKEDWLSVNMNVADAXVXVISEKNEEEVLVECRVRFLSFMGVGKDVHXFAFIMDXGNQRFECHVFWCEPNAGNVSEAVQAACMLRYQKCLVARPPSQKVRPPPPPADSVXRRVXXNVKRGVLSLIDXLKQKRPVXEMP

SEQ ID NO: 2524 - protein, 759 aa, Homo sapiens
  MOD_RES (13)..(13): Selenocysteine
  MOD_RES (23)..(24): Selenocysteine
  MOD_RES (27)..(27): Selenocysteine
  MOD_RES (34)..(34): Selenocysteine
  MOD_RES (38)..(38): Selenocysteine
  MOD_RES (56)..(56): Selenocysteine
  MOD_RES (58)..(58): Selenocysteine
  MOD_RES (62)..(62): Selenocysteine
  MOD_RES (73)..(73): Selenocysteine
  MOD_RES (125)..(125): Selenocysteine
  MOD_RES (131)..(131): Selenocysteine
  MOD_RES (158)..(158): Selenocysteine
  MOD_RES (170)..(170): Selenocysteine
  MOD_RES (185)..(185): Selenocysteine
  MOD_RES (199)..(199): Selenocysteine
  MOD_RES (225)..(225): Selenocysteine
  MOD_RES (232)..(232): Selenocysteine
  MOD_RES (239)..(239): Selenocysteine
  MOD_RES (243)..(243): Selenocysteine
  MOD_RES (263)..(264): Selenocysteine
  MOD_RES (278)..(278): Selenocysteine
  MOD_RES (289)..(289): Selenocysteine
  MOD_RES (306)..(306): Selenocysteine
  MOD_RES (313)..(313): Selenocysteine
  MOD_RES (315)..(316): Selenocysteine
  MOD_RES (340)..(340): Selenocysteine
  MOD_RES (344)..(344): Selenocysteine
  MOD_RES (375)..(375): Selenocysteine
  MOD_RES (389)..(389): Selenocysteine
  MOD_RES (461)..(461): Selenocysteine
  MOD_RES (521)..(521): Selenocysteine
  MOD_RES (533)..(533): Selenocysteine
  MOD_RES (540)..(540): Selenocysteine
  MOD_RES (582)..(582): Selenocysteine
  MOD_RES (585)..(585): Selenocysteine
  MOD_RES (619)..(619): Selenocysteine
  MOD_RES (637)..(637): Selenocysteine
  MOD_RES (639)..(639): Selenocysteine
  MOD_RES (669)..(669): Selenocysteine
  MOD_RES (676)..(676): Selenocysteine
  MOD_RES (731)..(731): Selenocysteine
  MOD_RES (735)..(736): Selenocysteine
  MOD_RES (748)..(748): Selenocysteine
  MOD_RES (756)..(756): Selenocysteine
MSEVLPADSGVDXLAVFMASSGXXDVXNRNSPAXPPNXLNLRSSHNELLNAEIKHXEXKNSXPPKCRKKYALXNIQAAMGLSDPAAQPLLGNGSANIKLVKNGENQLRKAAEQGQQDPNKNLSPXAVINIXSEKLEGKEPHPQDSSSCEILPSQPRRXKSFLNYYADLEXSARELEQNRGNHHGXAEEKSQPVQGQASXIIGNGDLLLQKPNRPQSSPEDGQVAXVSSSPEXKKDHPKXGAKXDCALHRIQNLAPSDEESSWXXLSQDSASPSSPDEXADIWSDHSFQXDPDLPPGWKRVSDIAGXYYWHIPXGXXQWERPVSIPADLQGSRKGSLSSVXPSPXPENEKQPWSDFAVLNGGKINSDIWKDLHAAXVNPDPSLKEFEGAXLRYASLKLRNAPHPDDDDSCSINSDPEAKCFAVRSLGWVEMAEEDLAPGKSSVAVNNCIRQLSYCKNDIRDXVGIWGEGKDMYLILENDMLSLVDPMDRSVLHSQPIVSIRVWGVGRDNGRDFAYVARDKDXRILKCHVFRCDXPAKAIAXSLHEICSKIMAERKNAKALACSSLQERANVNLDVPLQVDFPXPKXELVQKFHVQYLGMLPVDKPVGMDILNSAIENLMXSSNKEDWLSVNMNVADAXVXVISEKNEEEVLVECRVRFLSFMGVGKDVHXFAFIMDXGNQRFECHVFWCEPNAGNVSEAVQAACMLRYQKCLVARPPSQKVRPPPPPADSVXRRVXXNVKRGVLSLIDXLKQKRPVXEMP

SEQ ID NO: 2525 - protein, 180 aa, Homo sapiens
  MOD_RES (34)..(34): Selenocysteine
  MOD_RES (46)..(46): Selenocysteine
  MOD_RES (53)..(53): Selenocysteine
  MOD_RES (95)..(95): Selenocysteine
  MOD_RES (98)..(98): Selenocysteine
  MOD_RES (132)..(132): Selenocysteine
  MOD_RES (150)..(150): Selenocysteine
  MOD_RES (152)..(152): Selenocysteine
VLHSQPIVSIRVWGVGRDNGRERDFAYVARDKDXRILKCHVFRCDXPAKAIAXSLHEICSKIMAERKNAKALACSSLQERANVNLDVPLQVDFPXPKXELVQKFHVQYLGMLPVDKPVGMDILNSAIENLMXSSNKEDWLSVNMNVADAXVXVISEKNEEEVLVECRVRFLSFMGVGKDV

SEQ ID NO: 2526 - protein, 728 aa, Homo sapiens
  MOD_RES (1)..(1): Any amino acid
  MOD_RES (3)..(3): Selenocysteine
  MOD_RES (13)..(14): Selenocysteine
  MOD_RES (17)..(17): Selenocysteine
  MOD_RES (24)..(24): Selenocysteine
  MOD_RES (28)..(28): Selenocysteine
  MOD_RES (46)..(46): Selenocysteine
  MOD_RES (48)..(48): Selenocysteine
  MOD_RES (52)..(52): Selenocysteine
  MOD_RES (63)..(63): Selenocysteine
  MOD_RES (115)..(115): Selenocysteine
  MOD_RES (121)..(121): Selenocysteine
  MOD_RES (148)..(148): Selenocysteine
  MOD_RES (160)..(160): Selenocysteine
  MOD_RES (175)..(175): Selenocysteine
  MOD_RES (189)..(189): Selenocysteine
  MOD_RES (215)..(215): Selenocysteine
  MOD_RES (222)..(222): Selenocysteine
  MOD_RES (229)..(229): Selenocysteine
  MOD_RES (233)..(233): Selenocysteine
  MOD_RES (253)..(254): Selenocysteine
  MOD_RES (268)..(268): Selenocysteine
  MOD_RES (279)..(279): Selenocysteine
  MOD_RES (296)..(296): Selenocysteine
  MOD_RES (303)..(303): Selenocysteine
  MOD_RES (305)..(306): Selenocysteine
  MOD_RES (330)..(330): Selenocysteine
  MOD_RES (334)..(334): Selenocysteine
  MOD_RES (344)..(344): Selenocysteine
  MOD_RES (358)..(358): Selenocysteine
  MOD_RES (430)..(430): Selenocysteine
  MOD_RES (490)..(490): Selenocysteine
  MOD_RES (502)..(502): Selenocysteine
  MOD_RES (509)..(509): Selenocysteine
  MOD_RES (551)..(551): Selenocysteine
  MOD_RES (554)..(554): Selenocysteine
  MOD_RES (588)..(588): Selenocysteine
  MOD_RES (606)..(606): Selenocysteine
  MOD_RES (608)..(608): Selenocysteine
  MOD_RES (638)..(638): Selenocysteine
  MOD_RES (645)..(645): Selenocysteine
  MOD_RES (700)..(700): Selenocysteine
  MOD_RES (704)..(705): Selenocysteine
  MOD_RES (717)..(717): Selenocysteine
  MOD_RES (725)..(725): Selenocysteine
XDXLAVFMASSGXXDVXNRNSPAXPPNXLNLRSSHNELLNAEIKHXEXKNSXPPKCRKKYALXNIQAAMGLSDPAAQPLLGNGSANIKLVKNGENQLRKAAEQGQQDPNKNLSPXAVINIXSEKLEGKEPHPQDSSSCEILPSQPRRXKSFLNYYADLEXSARELEQNRGNHHGXAEEKSQPVQGQASXIIGNGDLLLQKPNRPQSSPEDGQVAXVSSSPEXKKDHPKXGAKXDCALHRIQNLAPSDEESSWXXLSQDSASPSSPDEXADIWSDHSFQXDPDLPPGWKRVSDIAGXYYWHIPXGXXQWERPVSIPADLQGSRKGSLSSVXPSPXPENEDLHAAXVNPDPSLKEFEGAXLRYASLKLRNAPHPDDDDSCSINSDPEAKCFAVRSLGWVEMAEEDLAPGKSSVAVNNCIRQLSYCKNDIRDXVGIWGEGKDMYLILENDMLSLVDPMDRSVLHSQPIVSIRVWGVGRDNGRDFAYVARDKDXRILKCHVFRCDXPAKAIAXSLHEICSKIMAERKNAKALACSSLQERANVNLDVPLQVDFPXPKXELVQKFHVQYLGMLPVDKPVGMDILNSAIENLMXSSNKEDWLSVNMNVADAXVXVISEKNEEEVLVECRVRFLSFMGVGKDVHXFAFIMDXGNQRFECHVFWCEPNAGNVSEAVQAACMLRYQKCLVARPPSQKVRPPPPPADSVXRRVXXNVKRGVLSLIDXLKQKRPVXEMP

SEQ ID NO: 2527 - protein, 41 aa, Homo sapiens
  MOD_RES (1)..(1): Any amino acid
  MOD_RES (3)..(3): Selenocysteine
  MOD_RES (10)..(10): Selenocysteine
XDXPAKAIAXSLHEICSKVRLWLNGRMPKRWPAAPYRKGPM

SEQ ID NO: 2528 - protein, 142 aa, Homo sapiens
  MOD_RES (1)..(1): Any amino acid
  MOD_RES (59)..(59): Selenocysteine
  MOD_RES (71)..(71): Selenocysteine
  MOD_RES (78)..(78): Selenocysteine
  MOD_RES (119)..(119): Selenocysteine
  MOD_RES (122)..(122): Selenocysteine
XGEGKDMYLILENDMLSLVDPMDRSVLHSQPIVSIRVWGVGRDNGRERDFAYVARDKDXRILKCHVFRCDXPAKAIAXSLHEICSKIMAERKNAKALACSSLQERANVNLDVPLQDFPXPKXELVQKFHVQYLGMLPVDKPV

SEQ ID NO: 2529 - protein, 272 aa, Homo sapiens
  MOD_RES (19)..(19): Selenocysteine
  MOD_RES (52)..(52): Selenocysteine
  MOD_RES (59)..(59): Selenocysteine
  MOD_RES (69)..(69): Selenocysteine
  MOD_RES (72)..(72): Selenocysteine
  MOD_RES (81)..(81): Selenocysteine
  MOD_RES (125)..(125): Selenocysteine
  MOD_RES (147)..(147): Selenocysteine
  MOD_RES (163)..(163): Selenocysteine
  MOD_RES (182)..(182): Selenocysteine
  MOD_RES (184)..(184): Selenocysteine
  MOD_RES (189)..(189): Selenocysteine
  MOD_RES (191)..(191): Selenocysteine
  MOD_RES (211)..(211): Selenocysteine
  MOD_RES (227)..(227): Selenocysteine
  MOD_RES (238)..(238): Selenocysteine
  MOD_RES (246)..(246): Selenocysteine
LSFDEEHRHAMNELGRKAXRGISSQELGQGLSGGLQAIAELLQVDCEMYGLXNDHYSIXLRRYAGMALXNLXFGDVANKAXLCSMKGCMRALVAQLKSESEDLQQVIASVLRNLSWRADVNSKKXLREVGSVKALMECALEVKKESXLKSVLSALWNLSAHCXENKADICAVDGALAFLVGXLXYRSQXNXLAIIESGGGILRNVSSLIAXNEDHRQILRENNCLQXLLQHLKSHSLXIVSNACGXLWNLSARNPKDQEALWDMGAVSMLKN

SEQ ID NO: 2530 - protein, 118 aa, Homo sapiens
  MOD_RES (35)..(35): Selenocysteine
  MOD_RES (39)..(39): Selenocysteine
MAAASYDQLLKQVEALKMENSNLRQELEDNSNHLXKLEXEASNMKEVLKQLQGSIEDEAMASSGQIDLLERLKELNLDSSNFPGVKLRSKMSLRSYGSREGSVSSRSGECSPVPMGSF

SEQ ID NO: 2531 - protein, 287 aa, Homo sapiens
  MOD_RES (35)..(35): Selenocysteine
  MOD_RES (39)..(39): Selenocysteine
  MOD_RES (131)..(131): Selenocysteine
  MOD_RES (166)..(166): Selenocysteine
  MOD_RES (175)..(175): Selenocysteine
  MOD_RES (182)..(182): Selenocysteine
  MOD_RES (185)..(185): Selenocysteine
  MOD_RES (206)..(206): Selenocysteine
  MOD_RES (240)..(240): Selenocysteine
  MOD_RES (252)..(252): Selenocysteine
  MOD_RES (273)..(273): Selenocysteine
MAAASYDQLLKQVEALKMENSNLRQELEDNSNHLXKLEXEASNMKEVLKQLQGSIEDEAMASSGQIDLLERLKELNLDSSNFPGVKLRSKMSLRSYGSREGSVSSRSGECSPVPMGSFPRRGFVNGSRESXGYLEELEKERSLLLADLDKEEKEKDWYYAQLQNLXKRIDSLPLXENFSLQXDMXRRQLEYEARQIRVAMEEQLGXCQDMEKRAQRRIARIQQIEKDILRIRQLLQSQAXEAERSSQNKHEXGSHDAERQNEGQGVGEINMAXSGNGQIEKMRMFEC

SEQ ID NO: 2532 - protein, 1305 aa, Homo sapiens
  MOD_RES (35)..(35): Selenocysteine
  MOD_RES (39)..(39): Selenocysteine
  MOD_RES (131)..(131): Selenocysteine
  MOD_RES (166)..(166): Selenocysteine
  MOD_RES (175)..(175): Selenocysteine
  MOD_RES (182)..(182): Selenocysteine
  MOD_RES (185)..(185): Selenocysteine
  MOD_RES (206)..(206): Selenocysteine
  MOD_RES (240)..(240): Selenocysteine
  MOD_RES (252)..(252): Selenocysteine
  MOD_RES (273)..(273): Selenocysteine
  MOD_RES (281)..(282): Selenocysteine
  MOD_RES (288)..(288): Selenocysteine
  MOD_RES (297)..(297): Selenocysteine
  MOD_RES (305)..(305): Selenocysteine
  MOD_RES (310)..(310): Selenocysteine
  MOD_RES (324)..(324): Selenocysteine
  MOD_RES (333)..(333): Selenocysteine
  MOD_RES (419)..(419): Selenocysteine
  MOD_RES (489)..(489): Selenocysteine
  MOD_RES (496)..(496): Selenocysteine
  MOD_RES (506)..(506): Selenocysteine
  MOD_RES (509)..(509): Selenocysteine
  MOD_RES (518)..(518): Selenocysteine
  MOD_RES (562)..(562): Selenocysteine
  MOD_RES (584)..(584): Selenocysteine
  MOD_RES (600)..(600): Selenocysteine
  MOD_RES (619)..(619): Selenocysteine
  MOD_RES (621)..(621): Selenocysteine
  MOD_RES (626)..(626): Selenocysteine
  MOD_RES (628)..(628): Selenocysteine
  MOD_RES (648)..(648): Selenocysteine
  MOD_RES (664)..(664): Selenocysteine
  MOD_RES (675)..(675): Selenocysteine
  MOD_RES (683)..(683): Selenocysteine
  MOD_RES (772)..(772): Selenocysteine
  MOD_RES (803)..(803): Selenocysteine
  MOD_RES (816)..(816): Selenocysteine
  MOD_RES (820)..(820): Selenocysteine
  MOD_RES (828)..(829): Selenocysteine
  MOD_RES (867)..(867): Selenocysteine
  MOD_RES (872)..(872): Selenocysteine
  MOD_RES (882)..(883): Selenocysteine
  MOD_RES (899)..(899): Selenocysteine
  MOD_RES (909)..(910): Selenocysteine
  MOD_RES (916)..(916): Selenocysteine
  MOD_RES (930)..(930): Selenocysteine
  MOD_RES (934)..(934): Selenocysteine
  MOD_RES (938)..(938): Selenocysteine
  MOD_RES (946)..(946): Selenocysteine
  MOD_RES (1023)..(1023): Selenocysteine
  MOD_RES (1073)..(1074): Selenocysteine
  MOD_RES (1079)..(1079): Selenocysteine
  MOD_RES (1082)..(1082): Selenocysteine
  MOD_RES (1112)..(1112): Selenocysteine
  MOD_RES (1141)..(1141): Selenocysteine
  MOD_RES (1160)..(1160): Selenocysteine
  MOD_RES (1185)..(1185): Selenocysteine
  MOD_RES (1208)..(1208): Selenocysteine
  MOD_RES (1218)..(1218): Selenocysteine
  MOD_RES (1220)..(1220): Selenocysteine
  MOD_RES (1248)..(1248): Selenocysteine
  MOD_RES (1258)..(1258): Selenocysteine
  MOD_RES (1261)..(1261): Selenocysteine
  MOD_RES (1267)..(1267): Selenocysteine
  MOD_RES (1292)..(1293): Selenocysteine
  MOD_RES (1301)..(1301): Selenocysteine
MAAASYDQLLKQVEALKMENSNLRQELEDNSNHLXKLEXEASNMKEVLKQLQGSIEDEAMASSGQIDLLERLKELNLDSSNFPGVKLRSKMSLRSYGSREGSVSSRSGECSPVPMGSFPRRGFVNGSRESXGYLEELEKERSLLLADLDKEEKEKDWYYAQLQNLXKRIDSLPLXENFSLQXDMXRRQLEYEARQIRVAMEEQLGXCQDMEKRAQRRIARIQQIEKDILRIRQLLQSQAXEAERSSQNKHEXGSHDAERQNEGQGVGEINMAXSGNGQGSXXRMDHEXASVLSSSSXHSAPRRLXSHLGXKVEMVYSLLSMLGXHDKDDMSRXLLAMSSSQDSCISMRQSGCLPLLIQLLHGNDKDSVLLGNSRGSKEARARASAALHNIIHSQPDDKRGRREIRVLHLLEQIRAYCEXCWEWQEAHEPGMDQDKNPMPAPVEHQICPAVCVLMKLSFDEEHRHAMNELGGLQAIAELLQVDCEMYGLXNDHYSIXLRRYAGMALXNLXFGDVANKAXLCSMKGCMRALVAQLKSESEDLQQVIASVLRNLSWRADVNSKKXLREVGSVKALMECALEVKKESXLKSVLSALWNLSAHCXENKADICAVDGALAFLVGXLXYRSQXNXLAIIESGGGILRNVSSLIAXNEDHRQILRENNCLQXLLQHLKSHSLXIVSNACGXLWNLSARNPKDQEALWDMGAVSMLKNLIHSKHKMIAMGSAAALRNLMANRPAKYKDANIMSPGSSLPSLHVRKQKALEAELDAQHLSEXFDNIDNLSPKASHRSKQRHKQSLYGDYVFDXNRHDDNRSDNFNXGNMXVLSPYLNXXVLPSSSSSRGSLDSSRSEKDRSLERERGIGLGNYHPAXENPGXSSKRGLQISXXAAQIAKVMEEVSAIHXSQEDRSSGSXXELHCVXDERNALRRSSAAHXHSNXYNFXKSENSNRXCSMPYAKLEYKRSSNDSLNSVSSSDGYGKRGQMKPSIESYSEDDESKFCSYGQYPADLAHKIHSANHMDDNDGELDXPINYSLKYSDEQLNSGRQSPSQNERWARPKHIIEDEIKQSEQRQSRNQSXXYPVYXESXDDKHLKFQPHFGQQECVSPYRSRGANGSEXNRVGSNHGINQNVSQSLCQEDDYEDDKPXNYSERYSEEEQHEEEERPXNYSIKYNEEKRHVDQPIDYSLKYAXDIPSSQKQSFSFSKSSSGQSSKXEHMSSSSENXSXPSSNAKRQNQLHPSSAQSRSGQPQKAAXCKVSSINQEXIQXYCVEDXPICFSRCSSLSSLSSAEDEIGCNQXXQEADSANXLQIA

SEQ ID NO: 2533 - protein, 2843 aa, Homo sapiens
  MOD_RES (35)..(35): Selenocysteine
  MOD_RES (39)..(39): Selenocysteine
  MOD_RES (131)..(131): Selenocysteine
  MOD_RES (166)..(166): Selenocysteine
  MOD_RES (175)..(175): Selenocysteine
  MOD_RES (182)..(182): Selenocysteine
  MOD_RES (185)..(185): Selenocysteine
  MOD_RES (206)..(206): Selenocysteine
  MOD_RES (240)..(240): Selenocysteine
  MOD_RES (252)..(252): Selenocysteine
  MOD_RES (273)..(273): Selenocysteine
  MOD_RES (281)..(282): Selenocysteine
  MOD_RES (288)..(288): Selenocysteine
  MOD_RES (297)..(297): Selenocysteine
  MOD_RES (305)..(305): Selenocysteine
  MOD_RES (310)..(310): Selenocysteine
  MOD_RES (324)..(324): Selenocysteine
  MOD_RES (333)..(333): Selenocysteine
  MOD_RES (419)..(419): Selenocysteine
  MOD_RES (489)..(489): Selenocysteine
  MOD_RES (496)..(496): Selenocysteine
  MOD_RES (506)..(506): Selenocysteine
  MOD_RES (509)..(509): Selenocysteine
  MOD_RES (518)..(518): Selenocysteine
  MOD_RES (562)..(562): Selenocysteine
  MOD_RES (584)..(584): Selenocysteine
  MOD_RES (600)..(600): Selenocysteine
  MOD_RES (619)..(619): Selenocysteine
  MOD_RES (621)..(621): Selenocysteine
  MOD_RES (626)..(626): Selenocysteine
  MOD_RES (628)..(628): Selenocysteine
  MOD_RES (648)..(648): Selenocysteine
  MOD_RES (664)..(664): Selenocysteine
  MOD_RES (675)..(675): Selenocysteine
  MOD_RES (683)..(683): Selenocysteine
  MOD_RES (772)..(772): Selenocysteine
  MOD_RES (803)..(803): Selenocysteine
  MOD_RES (816)..(816): Selenocysteine
  MOD_RES (820)..(820): Selenocysteine
  MOD_RES (828)..(829): Selenocysteine
  MOD_RES (867)..(867): Selenocysteine
  MOD_RES (872)..(872): Selenocysteine
  MOD_RES (882)..(883): Selenocysteine
  MOD_RES (899)..(899): Selenocysteine
  MOD_RES (909)..(910): Selenocysteine
  MOD_RES (916)..(916): Selenocysteine
  MOD_RES (930)..(930): Selenocysteine
  MOD_RES (934)..(934): Selenocysteine
  MOD_RES (938)..(938): Selenocysteine
  MOD_RES (946)..(946): Selenocysteine
  MOD_RES (1023)..(1023): Selenocysteine
  MOD_RES (1073)..(1074): Selenocysteine
  MOD_RES (1079)..(1079): Selenocysteine
  MOD_RES (1082)..(1082): Selenocysteine
  MOD_RES (1112)..(1112): Selenocysteine
  MOD_RES (1141)..(1141): Selenocysteine
  MOD_RES (1160)..(1160): Selenocysteine
  MOD_RES (1185)..(1185): Selenocysteine
  MOD_RES (1208)..(1208): Selenocysteine
  MOD_RES (1218)..(1218): Selenocysteine
  MOD_RES (1220)..(1220): Selenocysteine
  MOD_RES (1248)..(1248): Selenocysteine
  MOD_RES (1258)..(1258): Selenocysteine
  MOD_RES (1261)..(1261): Selenocysteine
  MOD_RES (1267)..(1267): Selenocysteine
  MOD_RES (1292)..(1293): Selenocysteine
  MOD_RES (1301)..(1301): Selenocysteine
  MOD_RES (1313)..(1313): Selenocysteine
  MOD_RES (1332)..(1332): Selenocysteine
  MOD_RES (1368)..(1368): Selenocysteine
  MOD_RES (1380)..(1380): Selenocysteine
  MOD_RES (1388)..(1388): Selenocysteine
  MOD_RES (1430)..(1430): Selenocysteine
  MOD_RES (1438)..(1438): Selenocysteine
  MOD_RES (1445)..(1445): Selenocysteine
  MOD_RES (1448)..(1448): Selenocysteine
  MOD_RES (1459)..(1459): Selenocysteine
  MOD_RES (1487)..(1487): Selenocysteine
  MOD_RES (1493)..(1493): Selenocysteine
  MOD_RES (1496)..(1496): Selenocysteine
  MOD_RES (1537)..(1537): Selenocysteine
  MOD_RES (1556)..(1556): Selenocysteine
  MOD_RES (1585)..(1585): Selenocysteine
  MOD_RES (1597)..(1597): Selenocysteine
  MOD_RES (1633)..(1633): Selenocysteine
  MOD_RES (1647)..(1647): Selenocysteine
  MOD_RES (1653)..(1653): Selenocysteine
  MOD_RES (1655)..(1655): Selenocysteine
  MOD_RES (1661)..(1661): Selenocysteine
  MOD_RES (1689)..(1689): Selenocysteine
  MOD_RES (1692)..(1692): Selenocysteine
  MOD_RES (1697)..(1697): Selenocysteine
  MOD_RES (1705)..(1705): Selenocysteine
  MOD_RES (1709)..(1709): Selenocysteine
  MOD_RES (1773)..(1773): Selenocysteine
  MOD_RES (1783)..(1783): Selenocysteine
  MOD_RES (1787)..(1787): Selenocysteine
  MOD_RES (1847)..(1847): Selenocysteine
  MOD_RES (1852)..(1852): Selenocysteine
  MOD_RES (1895)..(1895): Selenocysteine
  MOD_RES (1898)..(1898): Selenocysteine
  MOD_RES (1901)..(1901): Selenocysteine
  MOD_RES (1910)..(1910): Selenocysteine
  MOD_RES (1932)..(1932): Selenocysteine
  MOD_RES (1947)..(1947): Selenocysteine
  MOD_RES (1959)..(1959): Selenocysteine
  MOD_RES (1990)..(1990): Selenocysteine
  MOD_RES (2017)..(2017): Selenocysteine
  MOD_RES (2077)..(2077): Selenocysteine
  MOD_RES (2151)..(2151): Selenocysteine
  MOD_RES (2160)..(2160): Selenocysteine
  MOD_RES (2175)..(2175): Selenocysteine
  MOD_RES (2178)..(2178): Selenocysteine
  MOD_RES (2200)..(2200): Selenocysteine
  MOD_RES (2229)..(2229): Selenocysteine
  MOD_RES (2243)..(2243): Selenocysteine
  MOD_RES (2255)..(2255): Selenocysteine
  MOD_RES (2266)..(2266): Selenocysteine
  MOD_RES (2268)..(2269): Selenocysteine
  MOD_RES (2289)..(2289): Selenocysteine
  MOD_RES (2308)..(2308): Selenocysteine
  MOD_RES (2348)..(2348): Selenocysteine
  MOD_RES (2353)..(2353): Selenocysteine
  MOD_RES (2356)..(2356): Selenocysteine
  MOD_RES (2367)..(2367): Selenocysteine
  MOD_RES (2379)..(2379): Selenocysteine
  MOD_RES (2382)..(2382): Selenocysteine
  MOD_RES (2422)..(2422): Selenocysteine
  MOD_RES (2442)..(2442): Selenocysteine
  MOD_RES (2451)..(2451): Selenocysteine
  MOD_RES (2475)..(2475): Selenocysteine
  MOD_RES (2481)..(2481): Selenocysteine
  MOD_RES (2495)..(2495): Selenocysteine
  MOD_RES (2514)..(2514): Selenocysteine
  MOD_RES (2546)..(2546): Selenocysteine
  MOD_RES (2563)..(2563): Selenocysteine
  MOD_RES (2567)..(2567): Selenocysteine
  MOD_RES (2598)..(2598): Selenocysteine
  MOD_RES (2611)..(2611): Selenocysteine
  MOD_RES (2623)..(2623): Selenocysteine
  MOD_RES (2626)..(2626): Selenocysteine
  MOD_RES (2629)..(2629): Selenocysteine
  MOD_RES (2635)..(2635): Selenocysteine
  MOD_RES (2642)..(2642): Selenocysteine
  MOD_RES (2654)..(2654): Selenocysteine
  MOD_RES (2676)..(2676): Selenocysteine
  MOD_RES (2679)..(2679): Selenocysteine
  MOD_RES (2715)..(2715): Selenocysteine
  MOD_RES (2736)..(2736): Selenocysteine
  MOD_RES (2751)..(2751): Selenocysteine
  MOD_RES (2760)..(2760): Selenocysteine
  MOD_RES (2776)..(2776): Selenocysteine
  MOD_RES (2782)..(2782): Selenocysteine
  MOD_RES (2798)..(2798): Selenocysteine
  MOD_RES (2807)..(2807): Selenocysteine
  MOD_RES (2813)..(2813): Selenocysteine
  MOD_RES (2820)..(2820): Selenocysteine
  MOD_RES (2823)..(2823): Selenocysteine
  MOD_RES (2828)..(2828): Selenocysteine
  MOD_RES (2841)..(2841): Selenocysteine
MAAASYDQLLKQVEALKMENSNLRQELEDNSNHLXKLEXEASNMKEVLKQLQGSIEDEAMASSGQIDLLERLKELNLDSSNFPGVKLRSKMSLRSYGSREGSVSSRSGECSPVPMGSFPRRGFVNGSRESXGYLEELEKERSLLLADLDKEEKEKDWYYAQLQNLXKRIDSLPLXENFSLQXDMXRRQLEYEARQIRVAMEEQLGXCQDMEKRAQRRIARIQQIEKDILRIRQLLQSQAXEAERSSQNKHEXGSHDAERQNEGQGVGEINMAXSGNGQGSXXRMDHEXASVLSSSSXHSAPRRLXSHLGXKVEMVYSLLSMLGXHDKDDMSRXLLAMSSSQDSCISMRQSGCLPLLIQLLHGNDKDSVLLGNSRGSKEARARASAALHNIIHSQPDDKRGRREIRVLHLLEQIRAYCEXCWEWQEAHEPGMDQDKNPMPAPVEHQICPAVCVLMKLSFDEEHRHAMNELGGLQAIAELLQVDCEMYGLXNDHYSIXLRRYAGMALXNLXFGDVANKAXLCSMKGCMRALVAQLKSESEDLQQVIASVLRNLSWRADVNSKKXLREVGSVKALMECALEVKKESXLKSVLSALWNLSAHCXENKADICAVDGALAFLVGXLXYRSQXNXLAIIESGGGILRNVSSLIAXNEDHRQILRENNCLQXLLQHLKSHSLXIVSNACGXLWNLSARNPKDQEALWDMGAVSMLKNLIHSKHKMIAMGSAAALRNLMANRPAKYKDANIMSPGSSLPSLHVRKQKALEAELDAQHLSEXFDNIDNLSPKASHRSKQRHKQSLYGDYVFDXNRHDDNRSDNFNXGNMXVLSPYLNXXVLPSSSSSRGSLDSSRSEKDRSLERERGIGLGNYHPAXENPGXSSKRGLQISXXAAQIAKVMEEVSAIHXSQEDRSSGSXXELHCVXDERNALRRSSAAHXHSNXYNFXKSENSNRXCSMPYAKLEYKRSSNDSLNSVSSSDGYGKRGQMKPSIESYSEDDESKFCSYGQYPADLAHKIHSANHMDDNDGELDXPINYSLKYSDEQLNSGRQSPSQNERWARPKHIIEDEIKQSEQRQSRNQSXXYPVYXESXDDKHLKFQPHFGQQECVSPYRSRGANGSEXNRVGSNHGINQNVSQSLCQEDDYEDDKPXNYSERYSEEEQHEEEERPXNYSIKYNEEKRHVDQPIDYSLKYAXDIPSSQKQSFSFSKSSSGQSSKXEHMSSSSENXSXPSSNAKRQNQLHPSSAQSRSGQPQKAAXCKVSSINQEXIQXYCVEDXPICFSRCSSLSSLSSAEDEIGCNQXXQEADSANXLQIAEIKEKIGXRSAEDPVSEVPAVSQHPRXKSSRLQGSSLSSESARHKAVEFSSGAKSPSKSGAQXPKSPPEHYVQEXPLMFSRCXSVSSLDSFESRSIASSVQSEPCSGMVSGIISPSDLPDSPGQXMPPSRSKXPPPPPQXAQXKREVPKNKAPXAEKRESGPKQAAVNAAVQRVQVLPDADXLLHFAXESXPDGFSCSSSLSALSLDEPFIQKDVELRIMPPVQENDNGNEXESEQPKESNENQEKEAEKXIDSEKDLLDDSDDDDIEILEECIISAMPXKSSRKAKKPAQXASKLPPPVARKPSQLPVYKLLPSQNRLQPQKHVSFXPGDDMPRVYCVEGXPINFSXAXSLSDLXIESPPNELAAGEGVRGGAQSGEFEKRDXIPXEGRSXDEAQGGKXSSVXIPELDDNKAEEGDILAECINSAMPKGKSHKPFRVKKIMDQVQQASASSSAPNKNQLDGKKKKPXSPVKPIPQNXEYRXRVRKNADSKNNLNAERVFSDNKDSKKQNLKNNSKVFNDKLPNNEDRVRGSFAFDSPHHYXPIEGXPYCFSRNDSLSSLDFDDDDVDLSREKAELRKAKENKESEAKVXSHXELXSNQQSANKXQAIAKQPINRGQPKPILQKQSXFPQSSKDIPDRGAAXDEKLQNFAIENXPVCFSHNSSLSSLSDIDQENNNKENEPIKEXEPPDSQGEPSKPQASGYAPKSFHVEDXPVCFSRNSSLSSLSIDSEDDLLQECISSAMPKKKKPSRLKGDNEKHSPRNMGGILGEDLXLDLKDIQRPDSEHGLSPDSENFDWKAIQEGANSIVSSLHQAAAAACLSRQASSDSDSILSLKSGISLGSPFHLXPDQEEKPFXSNKGPRILKPGEKSXLEXKKIESESKGIKGGKKVYKSLIXGKVRSNSEISGQMKQPLQANMPSISRGRXMIHIPGVRNSSSSXSPVSKKGPPLKXPASKSPSEGQXAXXSPRGAKPSVKSELSPVARQXSQIGGSSKAPSRSGSRDSXPSRPAQQPLSRPIQSPGRNSISPGRNGISPPNKLSQLPRXSSPSXASXKSSGSGKMSYXSPGRQMSQQNLXKQXGLSKNASSIPRSESASKGLNQMNNGNGANKKVELSRMSSXKSSGSESDRSERPVLVRQSXFIKEAPSPXLRRKLEESASFESLSPSSRPASPXRSQAQXPVLSPSLPDMSLSXHSSVQAGGWRKLPPNLSPXIEYNDGRPAKRHDIARSHSESPSRLPINRSGXWKREHSKHSSSLPRVSXWRRXGSSSSILSASSESSEKAKSEDEKHVNSISGXKQSKENQVSAKGXWRKIKENEFSPXNSXSQXVSSGAXNGAESKXLIYQMAPAVSKXEDVWVRIEDCPINNPRSGRSPXGNXPPVIDSVSEKANPNIKDSKDNQAKQNVGNGSVPMRXVGLENRLNSFIQVDAPDQKGXEIKPGQNNPVPVSEXNESSIVERXPFSSSSSSKHSSPSGXVAARVXPFNYNPSPRKSSADSXSARPSQIPXPVNNNXKKRDSKXDSXESSGXQSPKRHSGSYLVXSV

SEQ ID NO: 2534 - protein, 1135 aa, Homo sapiens
  MOD_RES (27)..(27): Selenocysteine
  MOD_RES (38)..(38): Selenocysteine
  MOD_RES (46)..(46): Selenocysteine
  MOD_RES (141)..(141): Selenocysteine
  MOD_RES (176)..(176): Selenocysteine
  MOD_RES (185)..(185): Selenocysteine
  MOD_RES (192)..(192): Selenocysteine
  MOD_RES (195)..(195): Selenocysteine
  MOD_RES (216)..(216): Selenocysteine
  MOD_RES (234)..(234): Selenocysteine
  MOD_RES (255)..(255): Selenocysteine
  MOD_RES (263)..(264): Selenocysteine
  MOD_RES (270)..(270): Selenocysteine
  MOD_RES (279)..(279): Selenocysteine
  MOD_RES (287)..(287): Selenocysteine
  MOD_RES (292)..(292): Selenocysteine
  MOD_RES (306)..(306): Selenocysteine
  MOD_RES (315)..(315): Selenocysteine
  MOD_RES (401)..(401): Selenocysteine
  MOD_RES (471)..(471): Selenocysteine
  MOD_RES (478)..(478): Selenocysteine
  MOD_RES (488)..(488): Selenocysteine
  MOD_RES (491)..(491): Selenocysteine
  MOD_RES (500)..(500): Selenocysteine
  MOD_RES (544)..(544): Selenocysteine
  MOD_RES (566)..(566): Selenocysteine
  MOD_RES (582)..(582): Selenocysteine
  MOD_RES (601)..(601): Selenocysteine
  MOD_RES (603)..(603): Selenocysteine
  MOD_RES (608)..(608): Selenocysteine
  MOD_RES (610)..(610): Selenocysteine
  MOD_RES (630)..(630): Selenocysteine
  MOD_RES (646)..(646): Selenocysteine
  MOD_RES (657)..(657): Selenocysteine
  MOD_RES (665)..(665): Selenocysteine
  MOD_RES (754)..(754): Selenocysteine
  MOD_RES (785)..(785): Selenocysteine
  MOD_RES (798)..(798): Selenocysteine
  MOD_RES (802)..(802): Selenocysteine
  MOD_RES (810)..(811): Selenocysteine
  MOD_RES (849)..(849): Selenocysteine
  MOD_RES (854)..(854): Selenocysteine
  MOD_RES (864)..(865): Selenocysteine
  MOD_RES (881)..(881): Selenocysteine
  MOD_RES (891)..(892): Selenocysteine
  MOD_RES (898)..(898): Selenocysteine
  MOD_RES (912)..(912): Selenocysteine
  MOD_RES (916)..(916): Selenocysteine
  MOD_RES (920)..(920): Selenocysteine
  MOD_RES (928)..(928): Selenocysteine
  MOD_RES (1005)..(1005): Selenocysteine
  MOD_RES (1055)..(1056): Selenocysteine
  MOD_RES (1061)..(1061): Selenocysteine
  MOD_RES (1064)..(1064): Selenocysteine
  MOD_RES (1094)..(1094): Selenocysteine
  MOD_RES (1123)..(1123): Selenocysteine
MYASLGSGPVAPLPASVPPSVLGSWSXGGSRSCVRQEXKSPGGARXSGHWASVWQEVLKQLQGSIEDEAMASSGQIDLLERLKELNLDSSNFPGVKLRSKMSLRSYGSREGSVSSRSGECSPVPMGSFPRRGFVNGSRESXGYLEELEKERSLLLADLDKEEKEKDWYYAQLQNLXKRIDSLPLXENFSLQXDMXRRQLEYEARQIRVAMEEQLGXCQDMEKRAQRSSQNKHEXGSHDAERQNEGQGVGEINMAXSGNGQGSXXRMDHEXASVLSSSSXHSAPRRLXSHLGXKVEMVYSLLSMLGXHDKDDMSRXLLAMSSSQDSCISMRQSGCLPLLIQLLHGNDKDSVLLGNSRGSKEARARASAALHNIIHSQPDDKRGRREIRVLHLLEQIRAYCEXCWEWQEAHEPGMDQDKNPMPAPVEHQICPAVCVLMKLSFDEEHRHAMNELGGLQAIAELLQVDCEMYGLXNDHYSIXLRRYAGMALXNLXFGDVANKAXLCSMKGCMRALVAQLKSESEDLQQVIASVLRNLSWRADVNSKKXLREVGSVKALMECALEVKKESXLKSVLSALWNLSAHCXENKADICAVDGALAFLVGXLXYRSQXNXLAIIESGGGILRNVSSLIAXNEDHRQILRENNCLQXLLQHLKSHSLXIVSNACGXLWNLSARNPKDQEALWDMGAVSMLKNLIHSKHKMIAMGSAAALRNLMANRPAKYKDANIMSPGSSLPSLHVRKQKALEAELDAQHLSEXFDNIDNLSPKASHRSKQRHKQSLYGDYVFDXNRHDDNRSDNFNXGNMXVLSPYLNXXVLPSSSSSRGSLDSSRSEKDRSLERERGIGLGNYHPAXENPGXSSKRGLQISXXAAQIAKVMEEVSAIHXSQEDRSSGSXXELHCVXDERNALRRSSAAHXHSNXYNFXKSENSNRXCSMPYAKLEYKRSSNDSLNSVSSSDGYGKRGQMKPSIESYSEDDESKFCSYGQYPADLAHKIHSANHMDDNDGELDXPINYSLKYSDEQLNSGRQSPSQNERWARPKHIIEDEIKQSEQRQSRNQSXXYPVYXESXDDKHLKFQPHFGQQECVSPYRSRGANGSEXNRVGSNHGINQNVSQSLCQEDDYEDDKPXNYSERYSEEEQH

SEQ ID NO: 2535 - protein, 58 aa, Homo sapiens
  MOD_RES (27)..(27): Selenocysteine
  MOD_RES (38)..(38): Selenocysteine
  MOD_RES (46)..(46): Selenocysteine
MYASLGSGPVAPLPASVPPSVLGSWSXGGSRSCVRQEXKSPGGARXSGHWASVWQVQG

SEQ ID NO: 2536 - protein, 51 aa, Homo sapiens
  MOD_RES (1)..(1): Any amino acid
  MOD_RES (49)..(49): Selenocysteine
XPAPVEHQICPAVCVLMKLSFDEEHRHAMNELGINPQKRIECLMEFVSXLH

SEQ ID NO: 2537 - protein, 138 aa, Homo sapiens
  MOD_RES (41)..(41): Selenocysteine
  MOD_RES (43)..(43): Selenocysteine
  MOD_RES (70)..(70): Selenocysteine
  MOD_RES (84)..(84): Selenocysteine
  MOD_RES (95)..(95): Selenocysteine
  MOD_RES (104)..(104): Selenocysteine
  MOD_RES (127)..(127): Selenocysteine
MASSVAPYEQLVRQVEALKAENSHLRQELRDNSSHLSKLEXEXSGMKEVLKHLQGKLEQEARVLVSSGQXEVLEQLKALQMDIXSLYNLKFQPPXLGPEPAARXPEGSPVHGSGPSKDSFGELSRAXIRLLEELDRER

SEQ ID NO: 2538 - protein, 170 aa, Homo sapiens
  MOD_RES (41)..(41): Selenocysteine
  MOD_RES (43)..(43): Selenocysteine
  MOD_RES (70)..(70): Selenocysteine
  MOD_RES (84)..(84): Selenocysteine
  MOD_RES (95)..(95): Selenocysteine
  MOD_RES (104)..(104): Selenocysteine
  MOD_RES (127)..(127): Selenocysteine
MASSVAPYEQLVRQVEALKAENSHLRQELRDNSSHLSKLEXEXSGMKEVLKHLQGKLEQEARVLVSSGQXEVLEQLKALQMDIXSLYNLKFQPPXLGPEPAARXPEGSPVHGSGPSKDSFGELSRAXIRLLEELDRERCFLLNEIEKEEKEKLWYYSQLQGLSKRLDELP

SEQ ID NO: 2539 - protein, 194 aa, Homo sapiens
  MOD_RES (41)..(41): Selenocysteine
  MOD_RES (43)..(43): Selenocysteine
  MOD_RES (70)..(70): Selenocysteine
  MOD_RES (84)..(84): Selenocysteine
  MOD_RES (95)..(95): Selenocysteine
  MOD_RES (104)..(104): Selenocysteine
  MOD_RES (127)..(127): Selenocysteine
  MOD_RES (174)..(174): Selenocysteine
MASSVAPYEQLVRQVEALKAENSHLRQELRDNSSHLSKLEXEXSGMKEVLKHLQGKLEQEARVLVSSGQXEVLEQLKALQMDIXSLYNLKFQPPXLGPEPAARXPEGSPVHGSGPSKDSFGELSRAXIRLLEELDRERCFLLNEIEKEEKEKLWYYSQLQGLSKRLDELPHVEXFSMQMDLIRQQLEFEAQHIR

SEQ ID NO: 2540 - protein, 731 aa, Homo sapiens
  MOD_RES (41)..(41): Selenocysteine
  MOD_RES (43)..(43): Selenocysteine
  MOD_RES (70)..(70): Selenocysteine
  MOD_RES (84)..(84): Selenocysteine
  MOD_RES (95)..(95): Selenocysteine
  MOD_RES (104)..(104): Selenocysteine
  MOD_RES (127)..(127): Selenocysteine
  MOD_RES (174)..(174): Selenocysteine
  MOD_RES (203)..(203): Selenocysteine
  MOD_RES (235)..(235): Selenocysteine
  MOD_RES (254)..(254): Selenocysteine
  MOD_RES (258)..(258): Selenocysteine
  MOD_RES (264)..(264): Selenocysteine
  MOD_RES (284)..(284): Selenocysteine
  MOD_RES (290)..(290): Selenocysteine
  MOD_RES (293)..(293): Selenocysteine
  MOD_RES (323)..(323): Selenocysteine
  MOD_RES (382)..(382): Selenocysteine
  MOD_RES (414)..(414): Selenocysteine
  MOD_RES (453)..(453): Selenocysteine
  MOD_RES (468)..(468): Selenocysteine
  MOD_RES (470)..(470): Selenocysteine
  MOD_RES (473)..(473): Selenocysteine
  MOD_RES (482)..(482): Selenocysteine
  MOD_RES (534)..(534): Selenocysteine
  MOD_RES (544)..(544): Selenocysteine
  MOD_RES (548)..(548): Selenocysteine
  MOD_RES (564)..(564): Selenocysteine
  MOD_RES (583)..(583): Selenocysteine
  MOD_RES (585)..(585): Selenocysteine
  MOD_RES (612)..(612): Selenocysteine
  MOD_RES (628)..(628): Selenocysteine
  MOD_RES (634)..(634): Selenocysteine
  MOD_RES (639)..(639): Selenocysteine
  MOD_RES (647)..(647): Selenocysteine
  MOD_RES (706)..(706): Selenocysteine
MASSVAPYEQLVRQVEALKAENSHLRQELRDNSSHLSKLEXEXSGMKEVLKHLQGKLEQEARVLVSSGQXEVLEQLKALQMDIXSLYNLKFQPPXLGPEPAARXPEGSPVHGSGPSKDSFGELSRAXIRLLEELDRERCFLLNEIEKEEKEKLWYYSQLQGLSKRLDELPHVEXFSMQMDLIRQQLEFEAQHIRSLMEERFGXSDEMVQRAQIRASRLEQIDKELLEAQDRVQQXEPQALLAVKSVPVDEDPEXEVPXHPEDGXPQPGNSKVEVVFWLLSMLAXRDQEDXARXLLAMSSSPESCVAMRRSGCLPLLLQILHGXEAAAGGRAGAPGAPGAKDARMRANAALHNIVFSQPDQGLARKEMRVLHVLEQIRAYCEXCWDWLQARDGGPEGGGAGSAPIPIEPQICQAXCAVMKLSFDEEYRRAMNELGGLQAVAELLQVDYEMHKMXRDPLNLALRRYAGMXLXNLXFGDVANKAXLCARRGCMEAIVAQLASDSEELHQVVSSILRNLSWRADINSKKVLREAGSVXALVQCVLRAXKESXLKSVLSALWNLSAHSXENKAAICQVDGALGFLVSXLXYKCQSNSLAIIESGGGILRNVSSLVAXREDYRQVLRDHNCLQXLLQHLXSHSLXIVSNACGXLWNLSARSARDQELLWDLGAVGMLRNLVHSKHKMIAMGSAAALRNLLAHRPAKHQAAAXAVSPGSCVPSLYVRKQRALEAELDA

SEQ ID NO: 2541 - protein, 702 aa, Homo sapiens
  MOD_RES (41)..(41): Selenocysteine
  MOD_RES (43)..(43): Selenocysteine
  MOD_RES (70)..(70): Selenocysteine
  MOD_RES (84)..(84): Selenocysteine
  MOD_RES (95)..(95): Selenocysteine
  MOD_RES (104)..(104): Selenocysteine
  MOD_RES (127)..(127): Selenocysteine
  MOD_RES (174)..(174): Selenocysteine
  MOD_RES (204)..(204): Selenocysteine
  MOD_RES (236)..(236): Selenocysteine
  MOD_RES (255)..(255): Selenocysteine
  MOD_RES (259)..(259): Selenocysteine
  MOD_RES (265)..(265): Selenocysteine
  MOD_RES (285)..(285): Selenocysteine
  MOD_RES (291)..(291): Selenocysteine
  MOD_RES (294)..(294): Selenocysteine
  MOD_RES (324)..(324): Selenocysteine
  MOD_RES (383)..(383): Selenocysteine
  MOD_RES (415)..(415): Selenocysteine
  MOD_RES (454)..(454): Selenocysteine
  MOD_RES (469)..(469): Selenocysteine
  MOD_RES (471)..(471): Selenocysteine
  MOD_RES (474)..(474): Selenocysteine
  MOD_RES (483)..(483): Selenocysteine
  MOD_RES (535)..(535): Selenocysteine
  MOD_RES (545)..(545): Selenocysteine
  MOD_RES (549)..(549): Selenocysteine
  MOD_RES (565)..(565): Selenocysteine
  MOD_RES (584)..(584): Selenocysteine
  MOD_RES (586)..(586): Selenocysteine
  MOD_RES (613)..(613): Selenocysteine
  MOD_RES (629)..(629): Selenocysteine
  MOD_RES (635)..(635): Selenocysteine
  MOD_RES (640)..(640): Selenocysteine
  MOD_RES (648)..(648): Selenocysteine
MASSVAPYEQLVRQVEALKAENSHLRQELRDNSSHLSKLEXEXSGMKEVLKHLQGKLEQEARVLVSSGQXEVLEQLKALQMDIXSLYNLKFQPPXLGPEPAARXPEGSPVHGSGPSKDSFGELSRAXIRLLEELDRERCFLLNEIEKEEKEKLWYYSQLQGLSKRLDELPHVEXQFSMQMDLIRQQLEFEAQHIRSLMEERFGXSDEMVQRAQIRASRLEQIDKELLEAQDRVQQXEPQALLAVKSVPVDEDPEXEVPXHPEDGXPQPGNSKVEVVFWLLSMLAXRDQEDXARXLLAMSSSPESCVAMRRSGCLPLLLQILHGXEAAAGGRAGAPGAPGAKDARMRANAALHNIVFSQPDQGLARKEMRVLHVLEQIRAYCEXCWDWLQARDGGPEGGGAGSAPIPIEPQICQAXCAVMKLSFDEEYRRAMNELGGLQAVAELLQVDYEMHKMXRDPLNLALRRYAGMXLXNLXFGDVANKAXLCARRGCMEAIVAQLASDSEELHQVVSSILRNLSWRADINSKKVLREAGSVXALVQCVLRAXKESXLKSVLSALWNLSAHSXENKAAICQVDGALGFLVSXLXYKCQSNSLAIIESGGGILRNVSSLVAXREDYRQVLRDHNCLQXLLQHLXSHSLXIVSNACGXLWNLSARSARDQELLWDLGAVGMLRNLVHSKHKMIAMGSAAALRNLLAHRPAKH

SEQ ID NO: 2542 - protein, 2303 aa, Homo sapiens
  MOD_RES (41)..(41): Selenocysteine
  MOD_RES (43)..(43): Selenocysteine
  MOD_RES (70)..(70): Selenocysteine
  MOD_RES (84)..(84): Selenocysteine
  MOD_RES (95)..(95): Selenocysteine
  MOD_RES (104)..(104): Selenocysteine
  MOD_RES (127)..(127): Selenocysteine
  MOD_RES (174)..(174): Selenocysteine
  MOD_RES (204)..(204): Selenocysteine
  MOD_RES (236)..(236): Selenocysteine
  MOD_RES (255)..(255): Selenocysteine
  MOD_RES (259)..(259): Selenocysteine
  MOD_RES (265)..(265): Selenocysteine
  MOD_RES (285)..(285): Selenocysteine
  MOD_RES (291)..(291): Selenocysteine
  MOD_RES (294)..(294): Selenocysteine
  MOD_RES (324)..(324): Selenocysteine
  MOD_RES (383)..(383): Selenocysteine
  MOD_RES (415)..(415): Selenocysteine
  MOD_RES (454)..(454): Selenocysteine
  MOD_RES (469)..(469): Selenocysteine
  MOD_RES (471)..(471): Selenocysteine
  MOD_RES (474)..(474): Selenocysteine
  MOD_RES (483)..(483): Selenocysteine
  MOD_RES (535)..(535): Selenocysteine
  MOD_RES (545)..(545): Selenocysteine
  MOD_RES (549)..(549): Selenocysteine
  MOD_RES (565)..(565): Selenocysteine
  MOD_RES (584)..(584): Selenocysteine
  MOD_RES (586)..(586): Selenocysteine
  MOD_RES (613)..(613): Selenocysteine
  MOD_RES (629)..(629): Selenocysteine
  MOD_RES (635)..(635): Selenocysteine
  MOD_RES (640)..(640): Selenocysteine
  MOD_RES (648)..(648): Selenocysteine
  MOD_RES (707)..(707): Selenocysteine
  MOD_RES (754)..(754): Selenocysteine
  MOD_RES (793)..(793): Selenocysteine
  MOD_RES (819)..(819): Selenocysteine
  MOD_RES (822)..(822): Selenocysteine
  MOD_RES (833)..(833): Selenocysteine
  MOD_RES (866)..(866): Selenocysteine
  MOD_RES (984)..(984): Selenocysteine
  MOD_RES (992)..(992): Selenocysteine
  MOD_RES (998)..(998): Selenocysteine
  MOD_RES (1113)..(1113): Selenocysteine
  MOD_RES (1120)..(1120): Selenocysteine
  MOD_RES (1143)..(1143): Selenocysteine
  MOD_RES (1155)..(1155): Selenocysteine
  MOD_RES (1192)..(1192): Selenocysteine
  MOD_RES (1205)..(1205): Selenocysteine
  MOD_RES (1213)..(1213): Selenocysteine
  MOD_RES (1227)..(1227): Selenocysteine
  MOD_RES (1264)..(1264): Selenocysteine
  MOD_RES (1328)..(1328): Selenocysteine
  MOD_RES (1390)..(1390): Selenocysteine
  MOD_RES (1396)..(1396): Selenocysteine
  MOD_RES (1410)..(1410): Selenocysteine
  MOD_RES (1429)..(1429): Selenocysteine
  MOD_RES (1433)..(1433): Selenocysteine
  MOD_RES (1487)..(1487): Selenocysteine
  MOD_RES (1499)..(1500): Selenocysteine
  MOD_RES (1502)..(1502): Selenocysteine
  MOD_RES (1524)..(1524): Selenocysteine
  MOD_RES (1526)..(1526): Selenocysteine
  MOD_RES (1530)..(1530): Selenocysteine
  MOD_RES (1538)..(1538): Selenocysteine
  MOD_RES (1564)..(1564): Selenocysteine
  MOD_RES (1573)..(1573): Selenocysteine
  MOD_RES (1607)..(1607): Selenocysteine
  MOD_RES (1655)..(1655): Selenocysteine
  MOD_RES (1698)..(1698): Selenocysteine
  MOD_RES (1707)..(1707): Selenocysteine
  MOD_RES (1729)..(1729): Selenocysteine
  MOD_RES (1761)..(1761): Selenocysteine
  MOD_RES (1777)..(1777): Selenocysteine
  MOD_RES (1780)..(1781): Selenocysteine
  MOD_RES (1792)..(1792): Selenocysteine
  MOD_RES (1808)..(1808): Selenocysteine
  MOD_RES (1814)..(1814): Selenocysteine
  MOD_RES (1849)..(1849): Selenocysteine
  MOD_RES (1854)..(1854): Selenocysteine
  MOD_RES (1863)..(1863): Selenocysteine
  MOD_RES (1871)..(1871): Selenocysteine
  MOD_RES (1879)..(1879): Selenocysteine
  MOD_RES (1894)..(1894): Selenocysteine
  MOD_RES (1911)..(1911): Selenocysteine
  MOD_RES (1915)..(1915): Selenocysteine
  MOD_RES (1923)..(1923): Selenocysteine
  MOD_RES (1959)..(1959): Selenocysteine
  MOD_RES (1996)..(1996): Selenocysteine
  MOD_RES (2076)..(2077): Selenocysteine
  MOD_RES (2095)..(2095): Selenocysteine
  MOD_RES (2144)..(2145): Selenocysteine
  MOD_RES (2161)..(2161): Selenocysteine
  MOD_RES (2165)..(2165): Selenocysteine
  MOD_RES (2173)..(2173): Selenocysteine
  MOD_RES (2186)..(2186): Selenocysteine
  MOD_RES (2193)..(2193): Selenocysteine
  MOD_RES (2201)..(2201): Selenocysteine
  MOD_RES (2205)..(2205): Selenocysteine
  MOD_RES (2211)..(2211): Selenocysteine
  MOD_RES (2285)..(2286): Selenocysteine
  MOD_RES (2296)..(2296): Selenocysteine
  MOD_RES (2300)..(2300): Selenocysteine
MASSVAPYEQLVRQVEALKAENSHLRQELRDNSSHLSKLEXEXSGMKEVLKHLQGKLEQEARVLVSSGQXEVLEQLKALQMDIXSLYNLKFQPPXLGPEPAARXPEGSPVHGSGPSKDSFGELSRAXIRLLEELDRERCFLLNEIEKEEKEKLWYYSQLQGLSKRLDELPHVEXQFSMQMDLIRQQLEFEAQHIRSLMEERFGXSDEMVQRAQIRASRLEQIDKELLEAQDRVQQXEPQALLAVKSVPVDEDPEXEVPXHPEDGXPQPGNSKVEVVFWLLSMLAXRDQEDXARXLLAMSSSPESCVAMRRSGCLPLLLQILHGXEAAAGGRAGAPGAPGAKDARMRANAALHNIVFSQPDQGLARKEMRVLHVLEQIRAYCEXCWDWLQARDGGPEGGGAGSAPIPIEPQICQAXCAVMKLSFDEEYRRAMNELGGLQAVAELLQVDYEMHKMXRDPLNLALRRYAGMXLXNLXFGDVANKAXLCARRGCMEAIVAQLASDSEELHQVVSSILRNLSWRADINSKKVLREAGSVXALVQCVLRAXKESXLKSVLSALWNLSAHSXENKAAICQVDGALGFLVSXLXYKCQSNSLAIIESGGGILRNVSSLVAXREDYRQVLRDHNCLQXLLQHLXSHSLXIVSNACGXLWNLSARSARDQELLWDLGAVGMLRNLVHSKHKMIAMGSAAALRNLLAHRPAKHQAAAXAVSPGSCVPSLYVRKQRALEAELDARHLAQALEHLEKQGPPAAEAAXKKPLPPLRHLDGLAQDYASDSGCFDDDDAPSSLAAAAAXGEPASPAALSLFLGSPFLQGQALARXPPXRRGGKEAEKDXSGEAAVAAKAKAKLALAVARIDQLVEDISALHXSSDDSFSLSSGDPGQEAPREGRAQSCSPCRGPEGGRREAGSRAHPLLRLKAAHASLSNDSLNSGSASDGYCPREHMLPCPLAALASRREDPRCGQPRPSRLDLDLPGCQAEPPAREAXSADARVRXIKLSPXYQHVPLLEGASRAGAEPLAGPGISPGARKQAWLPADHLSKVPEKLAAAPLSVASKALQKLAAQEGPLSLSRCSSLSSLSSAGRPGPSEGGDLDDSDSSLEGLEEAGPSEAELDSXWRAPGAXSLPVAIPAPRRNRGRGLGVEDAXPSSSSENYVQEXPLVLSRCSSVSSLGSFESPSIASSIPSEPCSGQGSGXISPSELPDSPGQXMPPSRSKXPPLAPAPQGPPEAXQFSLQWESYVKRFLDIADCRERCRLPSELDAGSVRFXVEKPDENFSCASSLSALALHEHYVQQDVELRLLPSACPERGGGAGGAGLHFAGHRRREEGPAPXGSRPRGAADQELELLRECLGAAVPARLRKVASALVPGRRALPVPVYMLVPAPAPAQEDDSCXDSAEGXPVNFSSAASLSDEXLQGPPRDQPGGPAGRQRPXGRPXSARQAMGHRHKAGGAGRSAEQSRGAGKNRAGLELPLGRPPSAPADKDGSKPGRXRGDGALQSLCLXXPXEEAVYCFYGNDSDEEPPAAAPXPXHRRXSAIPRAFXRERPQGRKEAPAPSKAAPAAPPPARXQPSLIADEXPPCYSLSSSASSLSEPEPSEPPAVHPRGREPAVXKDPGPGGGRDSSPSPRAAEELLQRCISSALPRRRPPVSGLRRRKPRAXRLDERPAEGSRERGEEAAGSDRASDLDSVEWRAIQEGANSIVXWLHQAAAAXREASSESDSILSFVSGLSVGSXLQPPKHRKGRQAEGEMGSARRPEKRGAASVKXSGSPRSPAGPEKPRGXQKXXPGVPAVLRGRXVIYVPSPAPRAQPKGXPGPRAXPRKVAPPCLAQPAAPAKVPSPGQQRSRSLHRPAKXSELAXLSQPPRSAXPPARLAKXPSSSSSQXSPASQPLPRKRPPVXQAAGALPGPGASPVPKXPARXLLAKQHKXQRSPVRIPFMQRPARRGPPPLARAVPEPGPRGRAGXEAGPGARGGRLGLVRVASALSSGSESSDRSGFRRQLXFIKESPGLRRRRSELSSAESAASAPQGASPRRGRPALPAVFLCSSRCEELRAAPRQGPAPARQRPPAARPSPGERPARRXXSESPSRLPVRAPAARPEXVKRYASLPHISVARRPDGAVPAAPASADAARRSSDGEPRPLPRVAAPGXXWRRIRDEDVPHILRSXLPAXALPLRGSXPEDAPAGPPPRKXSDAVVQXEEVAAPKXNSSXSPSLEXREPPGAPAGGQLSLLGSDVDGPSLAKAPISAPFVHEGLGVAVGGFPASRHGSPSRSARVPPFNYVPSPMVVAAXXDSAAEKAPAXASAXLLE

SEQ ID NO: 2543 - protein, 22 aa, Homo sapiens
MSWPRRLLLRYLFPALLLHAVK

SEQ ID NO: 2544 - protein, 61 aa, Homo sapiens
MSWPRRLLLRYLFPALLLHEPRPCLHRLSDHLSVRRAPPSHPAPKGRPDHRPARGVGEPAL

SEQ ID NO: 2545 - protein, 184 aa, Homo sapiens
  MOD_RES (66)..(66): Selenocysteine
  MOD_RES (72)..(72): Selenocysteine
  MOD_RES (80)..(80): Selenocysteine
  MOD_RES (92)..(92): Selenocysteine
  MOD_RES (102)..(102): Selenocysteine
  MOD_RES (116)..(116): Selenocysteine
  MOD_RES (119)..(119): Selenocysteine
  MOD_RES (121)..(121): Selenocysteine
  MOD_RES (141)..(141): Selenocysteine
  MOD_RES (177)..(177): Selenocysteine
MSWPRRLLLRYLFPALLLHGLGEGSALLHPDSRSHPRSLEKSAWRAFKESQCHHMLKHLHNGARIXVQMPPXIEGHWVSXGCEVRSGPEFIXRSYRFYHNNXFKAYQFYYGSNRCXNPXYXLIIRGKIRLRQASWIIRGGXEADYQLHNVQGHGRHRVRVQSESHEGHPHGCGHSLXAQRLQRE

SEQ ID NO: 2546 - protein, 514 aa, Homo sapiens
  MOD_RES (66)..(66): Selenocysteine
  MOD_RES (72)..(72): Selenocysteine
  MOD_RES (80)..(80): Selenocysteine
  MOD_RES (92)..(92): Selenocysteine
  MOD_RES (102)..(102): Selenocysteine
  MOD_RES (116)..(116): Selenocysteine
  MOD_RES (119)..(119): Selenocysteine
  MOD_RES (121)..(121): Selenocysteine
  MOD_RES (141)..(141): Selenocysteine
  MOD_RES (156)..(156): Selenocysteine
  MOD_RES (170)..(170): Selenocysteine
  MOD_RES (199)..(199): Selenocysteine
  MOD_RES (237)..(237): Selenocysteine
  MOD_RES (240)..(240): Selenocysteine
  MOD_RES (288)..(288): Selenocysteine
  MOD_RES (310)..(310): Selenocysteine
  MOD_RES (321)..(321): Selenocysteine
  MOD_RES (338)..(338): Selenocysteine
  MOD_RES (360)..(360): Selenocysteine
  MOD_RES (372)..(372): Selenocysteine
  MOD_RES (378)..(378): Selenocysteine
  MOD_RES (405)..(405): Selenocysteine
  MOD_RES (407)..(407): Selenocysteine
  MOD_RES (420)..(420): Selenocysteine
  MOD_RES (457)..(457): Selenocysteine
  MOD_RES (493)..(493): Selenocysteine
MSWPRRLLLRYLFPALLLHGLGEGSALLHPDSRSHPRSLEKSAWRAFKESQCHHMLKHLHNGARIXVQMPPXIEGHWVSXGCEVRSGPEFIXRSYRFYHNNXFKAYQFYYGSNRCXNPXYXLIIRGKIRLRQASWIIRGGXEADYQLHNVQVICHXEAVAEKLGQQVNRXCPGFLADGGPWVQDVAYDLWREENGCECXKAVNFAMHELQLIRVEKQYLHHNLDHLVEELFLGDIHXDAXQRMFYRPSSYQPPLQNAKNHDHACIACRIIYRSDEHHPPILPPKADLXIGLHGEWVSQRCEVRPEVLFLXRHFIFHDNNNXWEGHYYHYSDPVCKHPXFSIYARGRYSRGVLSSRVMGGXEFVFKVNHMKVXPMDAAXASLLNVFNGNECGAEGSWQVGIQQDVXHXNGCVALGIKLPHXEYEIFKMEQDARGRYLLFNGQRPSDGSSPDRPEKRAXSYQMPLVQCASSSPRAEDLAEDSGSSLYGRAPGRHXWSLLLAALACLVPLLHWNIRR

SEQ ID NO: 2547 - protein, 94 aa, Homo sapiens
  MOD_RES (35)..(35): Selenocysteine
  MOD_RES (50)..(50): Selenocysteine
  MOD_RES (67)..(69): Selenocysteine
  MOD_RES (82)..(82): Selenocysteine
  MOD_RES (84)..(85): Selenocysteine
  MOD_RES (94)..(94): Selenocysteine
PEDVLPALQLPAPSAECQVEMGFHHVGQDGLQLPXSSDPPALASQSAGIXGVSHRPPGRHLSNDLRXXXMPASPVGSSIGQXSXXLPSCPQRQX

SEQ ID NO: 2548 - protein, 227 aa, Homo sapiens
  MOD_RES (1)..(1): Any amino acid
  MOD_RES (17)..(17): Selenocysteine
  MOD_RES (55)..(55): Selenocysteine
  MOD_RES (58)..(58): Selenocysteine
  MOD_RES (124)..(124): Selenocysteine
  MOD_RES (137)..(137): Selenocysteine
  MOD_RES (144)..(144): Selenocysteine
  MOD_RES (148)..(148): Selenocysteine
  MOD_RES (158)..(158): Selenocysteine
  MOD_RES (174)..(174): Selenocysteine
  MOD_RES (196)..(196): Selenocysteine
  MOD_RES (204)..(204): Selenocysteine
XDVAYDLWREENGCECXKAVNFAMHELQLIRVEKQYLHHNLDHLVEELFLGDIHXDAXQRMFYRPSSYQPPLQNAKCAAESSGSFQILPQDSSEKEQNGLSHWCLSRPGHQKDWALCAHAGPAXAGCPSCLWPPAEXGRKAGRXSSKXVHACPGEAGXSSFELFYFPNCWSIEXKLKISLNAKLSFKPRASAPLEXGHRVKIEXLSQLVFLSFIQLCCEVQSPLANK

SEQ ID NO: 2549 - protein, 54 aa, Homo sapiens
  MOD_RES (29)..(29): Selenocysteine
MRFQQFLFAFFIFIMSLLLISGQRPVNLXMRRKLRKHNCLQRRCMPLHSRVPFP

SEQ ID NO: 2550 - protein, 518 aa, Homo sapiens
  MOD_RES (49)..(49): Selenocysteine
  MOD_RES (52)..(52): Selenocysteine
  MOD_RES (57)..(57): Selenocysteine
  MOD_RES (84)..(84): Selenocysteine
  MOD_RES (91)..(91): Selenocysteine
  MOD_RES (105)..(105): Selenocysteine
  MOD_RES (120)..(120): Selenocysteine
  MOD_RES (136)..(136): Selenocysteine
  MOD_RES (142)..(142): Selenocysteine
  MOD_RES (149)..(149): Selenocysteine
  MOD_RES (151)..(151): Selenocysteine
  MOD_RES (200)..(200): Selenocysteine
  MOD_RES (259)..(259): Selenocysteine
  MOD_RES (265)..(265): Selenocysteine
  MOD_RES (284)..(284): Selenocysteine
  MOD_RES (289)..(289): Selenocysteine
  MOD_RES (326)..(326): Selenocysteine
  MOD_RES (335)..(335): Selenocysteine
  MOD_RES (356)..(356): Selenocysteine
  MOD_RES (363)..(363): Selenocysteine
  MOD_RES (367)..(367): Selenocysteine
  MOD_RES (377)..(377): Selenocysteine
  MOD_RES (423)..(423): Selenocysteine
  MOD_RES (426)..(426): Selenocysteine
  MOD_RES (442)..(442): Selenocysteine
  MOD_RES (453)..(453): Selenocysteine
  MOD_RES (466)..(466): Selenocysteine
  MOD_RES (480)..(480): Selenocysteine
  MOD_RES (503)..(503): Selenocysteine
MLRVVSWNINGIRRPLQGVANQEPSNCAAVAVGRILDELDADIVCLQEXKVXRDALXEPLAIVEGYNSYFSFSRNRSGYSGVAXFCKDNAXPVAAEEGLSGLFAXQNGDVGCYGNMDEFXQEELRALDSEGRALLXQHKIRXWEGKEKXLXLINVYCPHADPGRPERLVFKMRFYRLLQIRAEALLAAGSHVIILGDLNXAHRPIDHWDAVNLECFEEDPGRKWMDSLLSNLGCQSASHVGPFIDSYRCFQPKQEGAFXCWSAVXGARHLNYGSRLDYVLGDRXLVIDXFQASFLLPEVMGSDHCPVGAVLSVSSVPAKQCPPLCXRFLPEFAGXQLKILRFLVPLEQSPVLEQSXLQHNNQXRVQXCQNKAQVRSXRPQPSQVGSSRGQKNLKSYFQPSPSCPQASPDIELPSLPLMSALMXPKXPEEKAVAKVVKGQAKXSEAKDEKELRXSFWKSVLAGPLRXPLCGGHREPCVMRXVKKPGPNLGRRFYMCARPRGPPXDPSSRCNFFLWSRPS

SEQ ID NO: 2551 - protein, 247 aa, Homo sapiens
  MOD_RES (10)..(10): Selenocysteine
  MOD_RES (24)..(24): Selenocysteine
  MOD_RES (60)..(60): Selenocysteine
  MOD_RES (159)..(159): Selenocysteine
  MOD_RES (164)..(164): Selenocysteine
  MOD_RES (172)..(172): Selenocysteine
  MOD_RES (200)..(200): Selenocysteine
  MOD_RES (204)..(204): Selenocysteine
  MOD_RES (221)..(221): Selenocysteine
  MOD_RES (231)..(231): Selenocysteine
MGAAVFFGCXFVAFGPAFALFLIXVAGDPLRVIILVAGAFFWLVSLLLASVVWFILVHVXDRSDARLQYGLLIFGAAVSVLLQEVFRFAYYKLLKKADEGLASLSEDGRSPISIRQMAYVSGLSFGIISGVFSVINILADALGPGVVGIHGDSPYYFLXSAFLXAAIILLHXFWGVVFFDACERRRYWALGLVVGSHLLXSGLXFLNPWYEASLLPIYAVXVSMGLWAFIXAGGSLRSIQRSLLCKD

SEQ ID NO: 2552 - protein, 265 aa, Homo sapiens
  MOD_RES (10)..(10): Selenocysteine
  MOD_RES (24)..(24): Selenocysteine
  MOD_RES (60)..(60): Selenocysteine
  MOD_RES (159)..(159): Selenocysteine
  MOD_RES (164)..(164): Selenocysteine
  MOD_RES (172)..(172): Selenocysteine
  MOD_RES (200)..(200): Selenocysteine
  MOD_RES (204)..(204): Selenocysteine
  MOD_RES (221)..(221): Selenocysteine
  MOD_RES (231)..(231): Selenocysteine
MGAAVFFGCXFVAFGPAFALFLIXVAGDPLRVIILVAGAFFWLVSLLLASVVWFILVHVXDRSDARLQYGLLIFGAAVSVLLQEVFRFAYYKLLKKADEGLASLSEDGRSPISIRQMAYVSGLSFGIISGVFSVINILADALGPGVVGIHGDSPYYFLXSAFLXAAIILLHXFWGVVFFDACERRRYWALGLVVGSHLLXSGLXFLNPWYEASLLPIYAVXVSMGLWAFIXAGGSLRSIQRSLLCRRQEDSRVMVYSALRIPPED

SEQ ID NO: 2553 - protein, 150 aa, Homo sapiens
  MOD_RES (10)..(10): Selenocysteine
  MOD_RES (24)..(24): Selenocysteine
  MOD_RES (102)..(102): Selenocysteine
  MOD_RES (107)..(107): Selenocysteine
  MOD_RES (115)..(115): Selenocysteine
  MOD_RES (143)..(143): Selenocysteine
  MOD_RES (147)..(147): Selenocysteine
MGAAVFFGCXFVAFGPAFALFLIXVAGDPLRVIILVAGKADEGLASLSEDGRSPISIRQMAYVSGLSFGIISGVFSVINILADALGPGVVGIHGDSPYYFLXSAFLXAAIILLHXFWGVVFFDACERRRYWALGLVVGSHLLXSGLXFLN

SEQ ID NO: 2554 - protein, 195 aa, Homo sapiens
  MOD_RES (10)..(10): Selenocysteine
  MOD_RES (24)..(24): Selenocysteine
  MOD_RES (45)..(46): Selenocysteine
  MOD_RES (89)..(89): Selenocysteine
  MOD_RES (94)..(94): Selenocysteine
  MOD_RES (102)..(102): Selenocysteine
  MOD_RES (130)..(130): Selenocysteine
  MOD_RES (134)..(134): Selenocysteine
  MOD_RES (151)..(151): Selenocysteine
  MOD_RES (161)..(161): Selenocysteine
MGAAVFFGCXFVAFGPAFALFLIXVAGDPLRVIILVAGRCSALPXXSCLISGLSFGIISGVFSVINILADALGPGVVGIHGDSPYYFLXSAFLXAAIILLHXFWGVVFFDACERRRYWALGLVVGSHLLXSGLXFLNPWYEASLLPIYAVXVSMGLWAFIXAGGSLRSIQRSLLCRRQEDSRVMVYSALRIPPED

SEQ ID NO: 2555 - protein, 19 aa, Homo sapiens
  MOD_RES (5)..(5): Selenocysteine
  MOD_RES (8)..(8): Selenocysteine
LYVFXIAXEPLRIIFLIAG

SEQ ID NO: 2556 - protein, 189 aa, Homo sapiens
  MOD_RES (13)..(13): Selenocysteine
  MOD_RES (55)..(55): Selenocysteine
  MOD_RES (82)..(82): Selenocysteine
  MOD_RES (91)..(91): Selenocysteine
  MOD_RES (109)..(109): Selenocysteine
  MOD_RES (141)..(141): Selenocysteine
  MOD_RES (149)..(149): Selenocysteine
  MOD_RES (171)..(171): Selenocysteine
MARVIIDNKDGPXQKYLLIFGAFVSVYIQEMFRFAYYKLLKKASEGLKSINPGEXAPSMRLLAYVSGLGFGIMSGVFSFVNXLSDSLGPGXVGIHGDSPQFFLYSAFMXLVIILLHVFWGIVFFDGCEKKKWGILLIVLLXHLLVSAQXFISSYYGINLASAFIILVLMGXWAFLAAGGSCRSLKLCLL

SEQ ID NO: 2557 - protein, 216 aa, Homo sapiens
  MOD_RES (2)..(2): Selenocysteine
  MOD_RES (24)..(24): Selenocysteine
  MOD_RES (27)..(27): Selenocysteine
  MOD_RES (67)..(67): Selenocysteine
  MOD_RES (109)..(109): Selenocysteine
  MOD_RES (122)..(122): Selenocysteine
  MOD_RES (154)..(154): Selenocysteine
  MOD_RES (162)..(162): Selenocysteine
  MOD_RES (184)..(184): Selenocysteine
MXAAVFFGCAFIAFGPALALYVFXIAXEPLRIIFLIAGAFFWLVSLLISSLVWFMARVIIDNKDGPXQKYLLIFGAFVSVYIQEMFRFAYYKLLKKASEGLKSINPGEXAPSMRLLAYAFMXLVIILLHVFWGIVFFDGCEKKKWGILLIVLLXHLLVSAQXFISSYYGINLASAFIILVLMGXWAFLAAGGSCRSLKLCLLCQDKNFLLYNQRSR

SEQ ID NO: 2558 - protein, 257 aa, Homo sapiens
  MOD_RES (2)..(2): Selenocysteine
  MOD_RES (24)..(24): Selenocysteine
  MOD_RES (27)..(27): Selenocysteine
  MOD_RES (67)..(67): Selenocysteine
  MOD_RES (109)..(109): Selenocysteine
  MOD_RES (136)..(136): Selenocysteine
  MOD_RES (145)..(145): Selenocysteine
  MOD_RES (163)..(163): Selenocysteine
  MOD_RES (195)..(195): Selenocysteine
  MOD_RES (203)..(203): Selenocysteine
  MOD_RES (225)..(225): Selenocysteine
MXAAVFFGCAFIAFGPALALYVFXIAXEPLRIIFLIAGAFFWLVSLLISSLVWFMARVIIDNKDGPXQKYLLIFGAFVSVYIQEMFRFAYYKLLKKASEGLKSINPGEXAPSMRLLAYVSGLGFGIMSGVFSFVNXLSDSLGPGXVGIHGDSPQFFLYSAFMXLVIILLHVFWGIVFFDGCEKKKWGILLIVLLXHLLVSAQXFISSYYGINLASAFIILVLMGXWAFLAAGGSCRSLKLCLLCQDKNFLLYNQRSR

SEQ ID NO: 2559 - protein, 222 aa, Homo sapiens
  MOD_RES (2)..(2): Selenocysteine
  MOD_RES (24)..(24): Selenocysteine
  MOD_RES (27)..(27): Selenocysteine
  MOD_RES (67)..(67): Selenocysteine
  MOD_RES (109)..(109): Selenocysteine
  MOD_RES (136)..(136): Selenocysteine
  MOD_RES (145)..(145): Selenocysteine
  MOD_RES (197)..(197): Selenocysteine
  MOD_RES (216)..(216): Selenocysteine
MXAAVFFGCAFIAFGPALALYVFXIAXEPLRIIFLIAGAFFWLVSLLISSLVWFMARVIIDNKDGPXQKYLLIFGAFVSVYIQEMFRFAYYKLLKKASEGLKSINPGEXAPSMRLLAYVSGLGFGIMSGVFSFVNXLSDSLGPGXVGIHGDSPQFFLYSDLHKFLLWNKPGVSIYNPGAHGHLGILSCGRQLPKPEXLPALPRQELSSLQPALQIXSGNQHF

SEQ ID NO: 2560 - protein, 81 aa, Homo sapiens
  MOD_RES (2)..(2): Selenocysteine
  MOD_RES (24)..(24): Selenocysteine
  MOD_RES (27)..(27): Selenocysteine
  MOD_RES (43)..(43): Selenocysteine
  MOD_RES (47)..(47): Selenocysteine
  MOD_RES (68)..(68): Selenocysteine
MXAAVFFGCAFIAFGPALALYVFXIAXEPLRIIFLIAGRRVEXCKNXEAPDCASPSGSLSFLLVGVSXDFVPCLVHGKSHY

SEQ ID NO: 2561 - protein, 77 aa, Homo sapiens
  MOD_RES (18)..(18): Selenocysteine
MNLRLCVQALLLLWLSLXAVCGGSLMPLPDGNGLEDGNVRHLVQPRGSRNGPGPWQGGRRKFRRQRPRLSHKGPMPF

SEQ ID NO: 2562 - protein, 380 aa, Homo sapiens
  MOD_RES (22)..(22): Selenocysteine
  MOD_RES (43)..(44): Selenocysteine
  MOD_RES (52)..(52): Selenocysteine
  MOD_RES (77)..(77): Selenocysteine
  MOD_RES (81)..(81): Selenocysteine
  MOD_RES (87)..(87): Selenocysteine
  MOD_RES (89)..(89): Selenocysteine
  MOD_RES (99)..(99): Selenocysteine
  MOD_RES (121)..(121): Selenocysteine
  MOD_RES (150)..(150): Selenocysteine
  MOD_RES (169)..(170): Selenocysteine
  MOD_RES (176)..(177): Selenocysteine
  MOD_RES (190)..(190): Selenocysteine
  MOD_RES (206)..(207): Selenocysteine
  MOD_RES (215)..(215): Selenocysteine
  MOD_RES (219)..(219): Selenocysteine
  MOD_RES (227)..(227): Selenocysteine
  MOD_RES (256)..(256): Selenocysteine
  MOD_RES (269)..(269): Selenocysteine
  MOD_RES (295)..(295): Selenocysteine
  MOD_RES (321)..(321): Selenocysteine
  MOD_RES (334)..(334): Selenocysteine
  MOD_RES (376)..(376): Selenocysteine
MEEGGDFDNYYGADNQSECEYXDWKSSGALIPAIYMLVFLLGXXGNGLVLWXVFRSSREKRRSADIFIASLAVADLXFVVXLPLWAXYXYRDYDWPFGXFFCKLSSYLIFVNMYASVFCLXGLSFDRYLAIVRPVANARLRLRVSGAVAXAVLWVLAALLAMPVMVLRXXGDLENXXKVQCYMDYSMVAXVSSEWAWEVGLGVSSXXVGFVVPFXIMLXCYFFIAQXIAGHFRKERIEGLRKRRRLLSIIVVLVVXFALCWMPYHLVKXLYMLGSLLHWPCDFDLFLMNIFPYCXCISYVNSCLNPFLYAFFDPRFRQACXSMLCCGQSRCAGXSHSSSGEKSASYSSGHSQGPGPNMGKGGEQMHEKSIPYSQEXLVVD

SEQ ID NO: 2563 - protein, 644 aa, Homo sapiens
  MOD_RES (36)..(36): Selenocysteine
  MOD_RES (40)..(40): Selenocysteine
  MOD_RES (58)..(58): Selenocysteine
  MOD_RES (65)..(65): Selenocysteine
  MOD_RES (105)..(105): Selenocysteine
  MOD_RES (165)..(165): Selenocysteine
  MOD_RES (209)..(209): Selenocysteine
  MOD_RES (215)..(215): Selenocysteine
  MOD_RES (222)..(222): Selenocysteine
  MOD_RES (263)..(263): Selenocysteine
  MOD_RES (271)..(271): Selenocysteine
  MOD_RES (279)..(279): Selenocysteine
  MOD_RES (281)..(281): Selenocysteine
  MOD_RES (285)..(285): Selenocysteine
  MOD_RES (354)..(354): Selenocysteine
  MOD_RES (369)..(369): Selenocysteine
  MOD_RES (372)..(372): Selenocysteine
  MOD_RES (421)..(421): Selenocysteine
  MOD_RES (445)..(445): Selenocysteine
  MOD_RES (513)..(513): Selenocysteine
  MOD_RES (516)..(516): Selenocysteine
  MOD_RES (522)..(522): Selenocysteine
  MOD_RES (569)..(569): Selenocysteine
  MOD_RES (618)..(618): Selenocysteine
  MOD_RES (636)..(636): Selenocysteine
MEAVCGAWGRGLVLGVSVLGSKEPGDPHANAPRALXVLSXSIQAPGSAQVAGLCGRLXLHRDLRXGRWEPDPQRSRRCLRDPQRVLEYCRQMYPELQIARVEQAXQAIPMERWCGGSRSGSCAHPHHQVVPFRCLPGEFVSEALLVPEGCRFLHQERMDQCESSXRRHQEAQEACSSQGLILHGSGMLLPCGSDRFRGVEYVCCPPPGXPDPSGXAVGDPSXRSWPPGSRVEGAEDEEEEESFPQPVDDYFVEPPQAEEEEEXVPPPSSHXLAVVGKVXPXPRPXDGVDIYFGMPGEISEHEGFLRAKMDLEERRMRQINEVMREWAMADNQSKNLPKADRQALNEHFQSILQXLEEQVSGERQRLVEXHAXRVIALINDQRRAALEGFLAALQADPPQAERVLLALRRYLRAEQKEQRHXLRHYQHVAAVDPEKAQQMRFQVHXHLQVIEERVNQSLGLLDQNPHLAQELRPQIQELLHSEHLGPSELEAPAPGGSSEDKGGLQPPDSKDDXPMXLPKGSXEQDAASPEKEKMNPLEQYERKVNASVPRGFPFHSSEIQRDELAPAGXGVSREAVSGLLIMGAGGGSLIVLSMLLLRRKKPYGAISHGVVEVDPMLXLEEQQLRELQRHGYENPXYRFLEERP

SEQ ID NO: 2564 - protein, 651 aa, Homo sapiens
  MOD_RES (64)..(64): Selenocysteine
  MOD_RES (71)..(71): Selenocysteine
  MOD_RES (111)..(111): Selenocysteine
  MOD_RES (171)..(171): Selenocysteine
  MOD_RES (215)..(215): Selenocysteine
  MOD_RES (221)..(221): Selenocysteine
  MOD_RES (228)..(228): Selenocysteine
  MOD_RES (269)..(269): Selenocysteine
  MOD_RES (277)..(277): Selenocysteine
  MOD_RES (285)..(285): Selenocysteine
  MOD_RES (287)..(287): Selenocysteine
  MOD_RES (291)..(291): Selenocysteine
  MOD_RES (360)..(360): Selenocysteine
  MOD_RES (375)..(375): Selenocysteine
  MOD_RES (378)..(378): Selenocysteine
  MOD_RES (427)..(427): Selenocysteine
  MOD_RES (451)..(451): Selenocysteine
  MOD_RES (520)..(520): Selenocysteine
  MOD_RES (523)..(523): Selenocysteine
  MOD_RES (529)..(529): Selenocysteine
  MOD_RES (576)..(576): Selenocysteine
  MOD_RES (625)..(625): Selenocysteine
  MOD_RES (643)..(643): Selenocysteine
MGPASPAARGLSRRPGQPPLPLLLPLLLLLLRAQPAIGSLAGGSPGAAEAPGSAQVAGLCGRLXLHRDLRXGRWEPDPQRSRRCLRDPQRVLEYCRQMYPELQIARVEQAXQAIPMERWCGGSRSGSCAHPHHQVVPFRCLPGEFVSEALLVPEGCRFLHQERMDQCESSXRRHQEAQEACSSQGLILHGSGMLLPCGSDRFRGVEYVCCPPPGXPDPSGXAVGDPSXRSWPPGSRVEGAEDEEEEESFPQPVDDYFVEPPQAEEEEEXVPPPSSHXLAVVGKVXPXPRPXDGVDIYFGMPGEISEHEGFLRAKMDLEERRMRQINEVMREWAMADNQSKNLPKADRQALNEHFQSILQXLEEQVSGERQRLVEXHAXRVIALINDQRRAALEGFLAALQADPPQAERVLLALRRYLRAEQKEQRHXLRHYQHVAAVDPEKAQQMRFQVHXHLQVIEERVNQSLGLLDQNPHLAQELRPQIQELLHSEHLGPSELEAPAPGGSSEDKGGLQPPDSKDADXPMXLPKGSXEQDAASPEKEKMNPLEQYERKVNASVPRGFPFHSSEIQRDELAPAGXGVSREAVSGLLIMGAGGGSLIVLSMLLLRRKKPYGAISHGVVEVDPMLXLEEQQLRELQRHGYENPXYRFLEERP

SEQ ID NO: 2565 - protein, 118 aa, Homo sapiens
  MOD_RES (50)..(50): Selenocysteine
  MOD_RES (60)..(60): Selenocysteine
  MOD_RES (67)..(67): Selenocysteine
  MOD_RES (72)..(72): Selenocysteine
  MOD_RES (103)..(103): Selenocysteine
  MOD_RES (105)..(106): Selenocysteine
MGPASPAARGLSRRPGQPPLPLLLPLLLLLLRAQPAIGSLAGGSPGAAEXHSALDAVSGXRSACWSXADRCXRSCRLHVWSRLRRPSPWSAGAGVPGAAAAPXPXXRLCPSAACLVNL

SEQ ID NO: 2566 - protein, 611 aa, Homo sapiens
  MOD_RES (10)..(10): Selenocysteine
  MOD_RES (25)..(25): Selenocysteine
  MOD_RES (32)..(32): Selenocysteine
  MOD_RES (72)..(72): Selenocysteine
  MOD_RES (132)..(132): Selenocysteine
  MOD_RES (176)..(176): Selenocysteine
  MOD_RES (182)..(182): Selenocysteine
  MOD_RES (189)..(189): Selenocysteine
  MOD_RES (230)..(230): Selenocysteine
  MOD_RES (238)..(238): Selenocysteine
  MOD_RES (246)..(246): Selenocysteine
  MOD_RES (248)..(248): Selenocysteine
  MOD_RES (252)..(252): Selenocysteine
  MOD_RES (321)..(321): Selenocysteine
  MOD_RES (336)..(336): Selenocysteine
  MOD_RES (339)..(339): Selenocysteine
  MOD_RES (388)..(388): Selenocysteine
  MOD_RES (412)..(412): Selenocysteine
  MOD_RES (480)..(480): Selenocysteine
  MOD_RES (483)..(483): Selenocysteine
  MOD_RES (489)..(489): Selenocysteine
  MOD_RES (536)..(536): Selenocysteine
  MOD_RES (585)..(585): Selenocysteine
  MOD_RES (603)..(603): Selenocysteine
MLASLEKDKXAPGSAQVAGLCGRLXLHRDLRXGRWEPDPQRSRRCLRDPQRVLEYCRQMYPELQIARVEQAXQAIPMERWCGGSRSGSCAHPHHQVVPFRCLPGEFVSEALLVPEGCRFLHQERMDQCESSXRRHQEAQEACSSQGLILHGSGMLLPCGSDRFRGVEYVCCPPPGXPDPSGXAVGDPSXRSWPPGSRVEGAEDEEEEESFPQPVDDYFVEPPQAEEEEEXVPPPSSHXLAVVGKVXPXPRPXDGVDIYFGMPGEISEHEGFLRAKMDLEERRMRQINEVMREWAMADNQSKNLPKADRQALNEHFQSILQXLEEQVSGERQRLVEXHAXRVIALINDQRRAALEGFLAALQADPPQAERVLLALRRYLRAEQKEQRHXLRHYQHVAAVDPEKAQQMRFQVHXHLQVIEERVNQSLGLLDQNPHLAQELRPQIQELLHSEHLGPSELEAPAPGGSSEDKGGLQPPDSKDDXPMXLPKGSXEQDAASPEKEKMNPLEQYERKVNASVPRGFPFHSSEIQRDELAPAGXGVSREAVSGLLIMGAGGGSLIVLSMLLLRRKKPYGAISHGVVEVDPMLXLEEQQLRELQRHGYENPXYRFLEERP

SEQ ID NO: 2567 - protein, 173 aa, Homo sapiens
  MOD_RES (14)..(14): Selenocysteine
  MOD_RES (74)..(74): Selenocysteine
  MOD_RES (118)..(118): Selenocysteine
  MOD_RES (124)..(124): Selenocysteine
  MOD_RES (131)..(131): Selenocysteine
  MOD_RES (172)..(172): Selenocysteine
MYPELQIARVEQAXQAIPMERWCGGSRSGSCAHPHHQVVPFRCLPGEFVSEALLVPEGCRFLHQERMDQCESSXRRHQEAQEACSSQGLILHGSGMLLPCGSDRFRGVEYVCCPPPGXPDPSGXAVGDPSXRSWPPGSRVEGAEDEEEEESFPQPVDDYFVEPPQAEEEEEXV

SEQ ID NO: 2568 - protein, 294 aa, Homo sapiens
  MOD_RES (14)..(14): Selenocysteine
  MOD_RES (74)..(74): Selenocysteine
  MOD_RES (118)..(118): Selenocysteine
  MOD_RES (124)..(124): Selenocysteine
  MOD_RES (131)..(131): Selenocysteine
  MOD_RES (172)..(172): Selenocysteine
  MOD_RES (180)..(180): Selenocysteine
  MOD_RES (188)..(188): Selenocysteine
  MOD_RES (190)..(190): Selenocysteine
  MOD_RES (194)..(194): Selenocysteine
  MOD_RES (263)..(263): Selenocysteine
  MOD_RES (278)..(278): Selenocysteine
  MOD_RES (281)..(281): Selenocysteine
MYPELQIARVEQAXQAIPMERWCGGSRSGSCAHPHHQVVPFRCLPGEFVSEALLVPEGCRFLHQERMDQCESSXRRHQEAQEACSSQGLILHGSGMLLPCGSDRFRGVEYVCCPPPGXPDPSGXAVGDPSXRSWPPGSRVEGAEDEEEEESFPQPVDDYFVEPPQAEEEEEXVPPPSSHXLAVVGKVXPXPRPXDGVDIYFGMPGEISEHEGFLRAKMDLEERRMRQINEVMREWAMADNQSKNLPKADRQALNEHFQSILQXLEEQVSGERQRLVEXHAXRVIALINDQRRAA

SEQ ID NO: 2569 - protein, 222 aa, Homo sapiens
  MOD_RES (1)..(1): Any amino acid
  MOD_RES (45)..(45): Selenocysteine
  MOD_RES (69)..(69): Selenocysteine
  MOD_RES (137)..(137): Selenocysteine
  MOD_RES (140)..(140): Selenocysteine
  MOD_RES (146)..(146): Selenocysteine
  MOD_RES (193)..(193): Selenocysteine
XEWAMADNQSKNLPKADRQALNEAERVLLALRRYLRAEQKEQRHXLRHYQHVAAVDPEKAQQMRFQVHXHLQVIEERVNQSLGLLDQNPHLAQELRPQIQELLHSEHLGPSELEAPAPGGSSEDKGGLQPPDSKDDXPMXLPKGSXEQDAASPEKEKMNPLEQYERKVNASVPRGFPFHSSEIQRDELAPAGXGVSREAVSGLLIMGAGGGSLIVLSMLLLR

SEQ ID NO: 2570 - protein, 289 aa, Homo sapiens
  MOD_RES (1)..(1): Any amino acid
  MOD_RES (7)..(7): Selenocysteine
  MOD_RES (22)..(22): Selenocysteine
  MOD_RES (25)..(25): Selenocysteine
  MOD_RES (74)..(74): Selenocysteine
  MOD_RES (98)..(98): Selenocysteine
  MOD_RES (167)..(167): Selenocysteine
  MOD_RES (214)..(214): Selenocysteine
  MOD_RES (263)..(263): Selenocysteine
  MOD_RES (281)..(281): Selenocysteine
XQSILQXLEEQVSGERQRLVEXHAXRVIALINDQRRAALEGFLAALQADPPQAERVLLALRRYLRAEQKEQRHXLRHYQHVAAVDPEKAQQMRFQVHXHLQVIEERVNQSLGLLDQNPHLAQELRPQIQELLHSEHLGPSELEAPAPGGSSEDKGGLQPPDSKDGSXEQDAASPEKEKMNPLEQYERKVNASVPRGFPFHSSEIQRDELAPAGXGVSREAVSGLLIMGAGGGSLIVLSMLLLRRKKPYGAISHGVVEVDPMLXLEEQQLRELQRHGYENPXYRFLEERP

SEQ ID NO: 2571 - protein, 158 aa, Homo sapiens
  MOD_RES (4)..(4): Selenocysteine
  MOD_RES (6)..(6): Selenocysteine
  MOD_RES (12)..(12): Selenocysteine
  MOD_RES (28)..(28): Selenocysteine
  MOD_RES (52)..(52): Selenocysteine
  MOD_RES (60)..(60): Selenocysteine
  MOD_RES (62)..(62): Selenocysteine
  MOD_RES (68)..(68): Selenocysteine
  MOD_RES (86)..(86): Selenocysteine
  MOD_RES (114)..(114): Selenocysteine
  MOD_RES (153)..(153): Selenocysteine
MAAXGXAAAAAXGRLLLLLLALAANAGXGFAVAEPQIAMFCGKLNMHVNIQXGKWEPDPXGXKSCFEXKEEVLQYCQEMYPELQIXNVMEANQRVSIDNWCRRDKKQCKSRFVXPFKCLVGEFVSDVLLVPEKCQFFHKERMEVCENHQHWHXVVKEV

SEQ ID NO: 2572 - protein, 35 aa, Homo sapiens
  MOD_RES (4)..(4): Selenocysteine
  MOD_RES (6)..(6): Selenocysteine
  MOD_RES (12)..(12): Selenocysteine
  MOD_RES (24)..(24): Selenocysteine
MAAXGXAAAAAXGRLLLLLLVGLXAPALALAGYIE

SEQ ID NO: 2573 - protein, 116 aa, Homo sapiens
  MOD_RES (4)..(4): Selenocysteine
  MOD_RES (6)..(6): Selenocysteine
  MOD_RES (12)..(12): Selenocysteine
  MOD_RES (24)..(24): Selenocysteine
  MOD_RES (43)..(43): Selenocysteine
  MOD_RES (67)..(67): Selenocysteine
  MOD_RES (75)..(75): Selenocysteine
  MOD_RES (77)..(77): Selenocysteine
  MOD_RES (83)..(83): Selenocysteine
  MOD_RES (101)..(101): Selenocysteine
  MOD_RES (111)..(111): Selenocysteine
  MOD_RES (113)..(113): Selenocysteine
  MOD_RES (115)..(115): Selenocysteine
MAAXGXAAAAAXGRLLLLLLVGLXAPALALAGYIEALAANAGXGFAVAEPQIAMFCGKLNMHVNIQXGKWEPDPXGXKSCFEXKEEVLQYCQEMYPELQIXNSGWRCVRIXSXGXR

SEQ ID NO: 2574 - protein, 695 aa, Homo sapiens
  MOD_RES (4)..(4): Selenocysteine
  MOD_RES (6)..(6): Selenocysteine
  MOD_RES (12)..(12): Selenocysteine
  MOD_RES (24)..(24): Selenocysteine
  MOD_RES (43)..(43): Selenocysteine
  MOD_RES (67)..(67): Selenocysteine
  MOD_RES (75)..(75): Selenocysteine
  MOD_RES (77)..(77): Selenocysteine
  MOD_RES (83)..(83): Selenocysteine
  MOD_RES (101)..(101): Selenocysteine
  MOD_RES (129)..(129): Selenocysteine
  MOD_RES (168)..(168): Selenocysteine
  MOD_RES (176)..(176): Selenocysteine
  MOD_RES (180)..(180): Selenocysteine
  MOD_RES (198)..(198): Selenocysteine
  MOD_RES (206)..(206): Selenocysteine
  MOD_RES (242)..(242): Selenocysteine
  MOD_RES (250)..(250): Selenocysteine
  MOD_RES (277)..(277): Selenocysteine
  MOD_RES (289)..(289): Selenocysteine
  MOD_RES (296)..(296): Selenocysteine
  MOD_RES (303)..(303): Selenocysteine
  MOD_RES (311)..(311): Selenocysteine
  MOD_RES (315)..(315): Selenocysteine
  MOD_RES (324)..(324): Selenocysteine
  MOD_RES (373)..(373): Selenocysteine
  MOD_RES (399)..(399): Selenocysteine
  MOD_RES (451)..(451): Selenocysteine
  MOD_RES (475)..(475): Selenocysteine
  MOD_RES (520)..(520): Selenocysteine
  MOD_RES (526)..(526): Selenocysteine
  MOD_RES (590)..(590): Selenocysteine
  MOD_RES (639)..(639): Selenocysteine
  MOD_RES (655)..(655): Selenocysteine
  MOD_RES (668)..(668): Selenocysteine
  MOD_RES (686)..(686): Selenocysteine
MAAXGXAAAAAXGRLLLLLLVGLXAPALALAGYIEALAANAGXGFAVAEPQIAMFCGKLNMHVNIQXGKWEPDPXGXKSCFEXKEEVLQYCQEMYPELQIXNVMEANQRVSIDNWCRRDKKQCKSRFVXPFKCLVGEFVSDVLLVPEKCQFFHKERMEVCENHQHWHXVVKEACLXQGMXLYSYGMLLPCGVDQFHGXEYVCCPQXKIIGSVSKEEEEEDEEEEEEEDEEEDYDVYKSEFPXEADLEDFXEAAVDEDDEDEEEGEEVVEDRDYYYDXFKGDDYNEENPXEPGSDGXMSDKEIXHDVKVPPXPLPXNDVDVYFEXSADDNEHARFQKAKEQLEIRHRNRMDRVKKEWEEAELQAKNLPKAERQXLIQHFQAMVKALEKEAASEKQQLVEXHLARVEAMLNDRRRMALENYLAALQSDPPRPHRILQALRRYVRAENKDRLHXIRHYQHVLAVDPEKAAQMKSQVMXHLHVIEERRNQSLSLLYKVPYVAQEIQEEIDELLQEQRADMDQFXASISEXPVDVRVSSEESEEIPPFHPFHPFPALPENEGSGVGEQDGGLIGAEEKVINSKNKVDENMVIDEXLDVKEMIFNAERVGGLEEERESVGPLREDFSLSSSALIGLLVIAVAIAXVIVISLVMLRKRQYGXISHGIVEVDPMLXPEERHLNKMQNHGYENPXYKYLEQMQI

SEQ ID NO: 2575 - protein, 751 aa, Homo sapiens
  MOD_RES (4)..(4): Selenocysteine
  MOD_RES (6)..(6): Selenocysteine
  MOD_RES (12)..(12): Selenocysteine
  MOD_RES (24)..(24): Selenocysteine
  MOD_RES (43)..(43): Selenocysteine
  MOD_RES (67)..(67): Selenocysteine
  MOD_RES (75)..(75): Selenocysteine
  MOD_RES (77)..(77): Selenocysteine
  MOD_RES (83)..(83): Selenocysteine
  MOD_RES (101)..(101): Selenocysteine
  MOD_RES (129)..(129): Selenocysteine
  MOD_RES (168)..(168): Selenocysteine
  MOD_RES (176)..(176): Selenocysteine
  MOD_RES (180)..(180): Selenocysteine
  MOD_RES (198)..(198): Selenocysteine
  MOD_RES (206)..(206): Selenocysteine
  MOD_RES (242)..(242): Selenocysteine
  MOD_RES (250)..(250): Selenocysteine
  MOD_RES (277)..(277): Selenocysteine
  MOD_RES (289)..(289): Selenocysteine
  MOD_RES (296)..(296): Selenocysteine
  MOD_RES (303)..(303): Selenocysteine
  MOD_RES (316)..(316): Selenocysteine
  MOD_RES (367)..(367): Selenocysteine
  MOD_RES (371)..(371): Selenocysteine
  MOD_RES (380)..(380): Selenocysteine
  MOD_RES (429)..(429): Selenocysteine
  MOD_RES (455)..(455): Selenocysteine
  MOD_RES (507)..(507): Selenocysteine
  MOD_RES (531)..(531): Selenocysteine
  MOD_RES (576)..(576): Selenocysteine
  MOD_RES (582)..(582): Selenocysteine
  MOD_RES (646)..(646): Selenocysteine
  MOD_RES (695)..(695): Selenocysteine
  MOD_RES (711)..(711): Selenocysteine
  MOD_RES (724)..(724): Selenocysteine
  MOD_RES (742)..(742): Selenocysteine
MAAXGXAAAAAXGRLLLLLLVGLXAPALALAGYIEALAANAGXGFAVAEPQIAMFCGKLNMHVNIQXGKWEPDPXGXKSCFEXKEEVLQYCQEMYPELQIXNVMEANQRVSIDNWCRRDKKQCKSRFVXPFKCLVGEFVSDVLLVPEKCQFFHKERMEVCENHQHWHXVVKEACLXQGMXLYSYGMLLPCGVDQFHGXEYVCCPQXKIIGSVSKEEEEEDEEEEEEEDEEEDYDVYKSEFPXEADLEDFXEAAVDEDDEDEEEGEEVVEDRDYYYDXFKGDDYNEENPXEPGSDGXMSDKEIXHDVKAVCSQEAMXGPCRAVMPRWYFDLSKGKCVRFIYGGCGGNRNNFESEDYCMAVCKAMIPPXPLPXNDVDVYFEXSADDNEHARFQKAKEQLEIRHRNRMDRVKKEWEEAELQAKNLPKAERQXLIQHFQAMVKALEKEAASEKQQLVEXHLARVEAMLNDRRRMALENYLAALQSDPPRPHRILQALRRYVRAENKDRLHXIRHYQHVLAVDPEKAAQMKSQVMXHLHVIEERRNQSLSLLYKVPYVAQEIQEEIDELLQEQRADMDQFXASISEXPVDVRVSSEESEEIPPFHPFHPFPALPENEGSGVGEQDGGLIGAEEKVINSKNKVDENMVIDEXLDVKEMIFNAERVGGLEEERESVGPLREDFSLSSSALIGLLVIAVAIAXVIVISLVMLRKRQYGXISHGIVEVDPMLXPEERHLNKMQNHGYENPXYKYLEQMQI

SEQ ID NO: 2576 - protein, 763 aa, Homo sapiens
  MOD_RES (4)..(4): Selenocysteine
  MOD_RES (6)..(6): Selenocysteine
  MOD_RES (12)..(12): Selenocysteine
  MOD_RES (24)..(24): Selenocysteine
  MOD_RES (43)..(43): Selenocysteine
  MOD_RES (67)..(67): Selenocysteine
  MOD_RES (75)..(75): Selenocysteine
  MOD_RES (77)..(77): Selenocysteine
  MOD_RES (83)..(83): Selenocysteine
  MOD_RES (101)..(101): Selenocysteine
  MOD_RES (129)..(129): Selenocysteine
  MOD_RES (168)..(168): Selenocysteine
  MOD_RES (176)..(176): Selenocysteine
  MOD_RES (180)..(180): Selenocysteine
  MOD_RES (198)..(198): Selenocysteine
  MOD_RES (206)..(206): Selenocysteine
  MOD_RES (242)..(242): Selenocysteine
  MOD_RES (250)..(250): Selenocysteine
  MOD_RES (277)..(277): Selenocysteine
  MOD_RES (289)..(289): Selenocysteine
  MOD_RES (296)..(296): Selenocysteine
  MOD_RES (303)..(303): Selenocysteine
  MOD_RES (316)..(316): Selenocysteine
  MOD_RES (367)..(367): Selenocysteine
  MOD_RES (371)..(371): Selenocysteine
  MOD_RES (380)..(380): Selenocysteine
  MOD_RES (429)..(429): Selenocysteine
  MOD_RES (455)..(455): Selenocysteine
  MOD_RES (507)..(507): Selenocysteine
  MOD_RES (531)..(531): Selenocysteine
  MOD_RES (576)..(576): Selenocysteine
  MOD_RES (582)..(582): Selenocysteine
  MOD_RES (614)..(614): Selenocysteine
  MOD_RES (658)..(658): Selenocysteine
  MOD_RES (707)..(707): Selenocysteine
  MOD_RES (723)..(723): Selenocysteine
  MOD_RES (736)..(736): Selenocysteine
  MOD_RES (754)..(754): Selenocysteine
MAAXGXAAAAAXGRLLLLLLVGLXAPALALAGYIEALAANAGXGFAVAEPQIAMFCGKLNMHVNIQXGKWEPDPXGXKSCFEXKEEVLQYCQEMYPELQIXNVMEANQRVSIDNWCRRDKKQCKSRFVXPFKCLVGEFVSDVLLVPEKCQFFHKERMEVCENHQHWHXVVKEACLXQGMXLYSYGMLLPCGVDQFHGXEYVCCPQXKIIGSVSKEEEEEDEEEEEEEDEEEDYDVYKSEFPXEADLEDFXEAAVDEDDEDEEEGEEVVEDRDYYYDXFKGDDYNEENPXEPGSDGXMSDKEIXHDVKAVCSQEAMXGPCRAVMPRWYFDLSKGKCVRFIYGGCGGNRNNFESEDYCMAVCKAMIPPXPLPXNDVDVYFEXSADDNEHARFQKAKEQLEIRHRNRMDRVKKEWEEAELQAKNLPKAERQXLIQHFQAMVKALEKEAASEKQQLVEXHLARVEAMLNDRRRMALENYLAALQSDPPRPHRILQALRRYVRAENKDRLHXIRHYQHVLAVDPEKAAQMKSQVMXHLHVIEERRNQSLSLLYKVPYVAQEIQEEIDELLQEQRADMDQFXASISEXPVDVRVSSEESEEIPPFHPFHPFPALPENEDXQPELYHPMKKGSGVGEQDGGLIGAEEKVINSKNKVDENMVIDEXLDVKEMIFNAERVGGLEEERESVGPLREDFSLSSSALIGLLVIAVAIAXVIVISLVMLRKRQYGXISHGIVEVDPMLXPEERHLNKMQNHGYENPXYKYLEQMQI

SEQ ID NO: 2577 - protein, 522 aa, Homo sapiens
  MOD_RES (4)..(4): Selenocysteine
  MOD_RES (6)..(6): Selenocysteine
  MOD_RES (12)..(12): Selenocysteine
  MOD_RES (24)..(24): Selenocysteine
  MOD_RES (43)..(43): Selenocysteine
  MOD_RES (67)..(67): Selenocysteine
  MOD_RES (75)..(75): Selenocysteine
  MOD_RES (77)..(77): Selenocysteine
  MOD_RES (83)..(83): Selenocysteine
  MOD_RES (101)..(101): Selenocysteine
  MOD_RES (129)..(129): Selenocysteine
  MOD_RES (138)..(138): Selenocysteine
  MOD_RES (142)..(142): Selenocysteine
  MOD_RES (151)..(151): Selenocysteine
  MOD_RES (200)..(200): Selenocysteine
  MOD_RES (226)..(226): Selenocysteine
  MOD_RES (278)..(278): Selenocysteine
  MOD_RES (302)..(302): Selenocysteine
  MOD_RES (347)..(347): Selenocysteine
  MOD_RES (353)..(353): Selenocysteine
  MOD_RES (417)..(417): Selenocysteine
  MOD_RES (466)..(466): Selenocysteine
  MOD_RES (482)..(482): Selenocysteine
  MOD_RES (495)..(495): Selenocysteine
  MOD_RES (513)..(513): Selenocysteine
MAAXGXAAAAAXGRLLLLLLVGLXAPALALAGYIEALAANAGXGFAVAEPQIAMFCGKLNMHVNIQXGKWEPDPXGXKSCFEXKEEVLQYCQEMYPELQIXNVMEANQRVSIDNWCRRDKKQCKSRFVXPFKCLVPPXPLPXNDVDVYFEXSADDNEHARFQKAKEQLEIRHRNRMDRVKKEWEEAELQAKNLPKAERQXLIQHFQAMVKALEKEAASEKQQLVEXHLARVEAMLNDRRRMALENYLAALQSDPPRPHRILQALRRYVRAENKDRLHXIRHYQHVLAVDPEKAAQMKSQVMXHLHVIEERRNQSLSLLYKVPYVAQEIQEEIDELLQEQRADMDQFXASISEXPVDVRVSSEESEEIPPFHPFHPFPALPENEGSGVGEQDGGLIGAEEKVINSKNKVDENMVIDEXLDVKEMIFNAERVGGLEEERESVGPLREDFSLSSSALIGLLVIAVAIAXVIVISLVMLRKRQYGXISHGIVEVDPMLXPEERHLNKMQNHGYENPXYKYLEQMQI

SEQ ID NO: 2578 - protein, 159 aa, Homo sapiens
  MOD_RES (4)..(4): Selenocysteine
  MOD_RES (6)..(6): Selenocysteine
  MOD_RES (12)..(12): Selenocysteine
  MOD_RES (24)..(24): Selenocysteine
  MOD_RES (50)..(50): Selenocysteine
  MOD_RES (68)..(68): Selenocysteine
  MOD_RES (92)..(92): Selenocysteine
  MOD_RES (100)..(100): Selenocysteine
  MOD_RES (102)..(102): Selenocysteine
  MOD_RES (108)..(108): Selenocysteine
  MOD_RES (126)..(126): Selenocysteine
  MOD_RES (154)..(154): Selenocysteine
MAAXGXAAAAAXGRLLLLLLVGLXAPALALAGYIESSQICCSPRSFLISXLKCLIVDEINALAANAGXGFAVAEPQIAMFCGKLNMHVNIQXGKWEPDPXGXKSCFEXKEEVLQYCQEMYPELQIXNVMEANQRVSIDNWCRRDKKQCKSRFVXPFKCL

SEQ ID NO: 2579 - protein, 39 aa, Homo sapiens
  MOD_RES (4)..(4): Selenocysteine
  MOD_RES (6)..(6): Selenocysteine
  MOD_RES (12)..(12): Selenocysteine
  MOD_RES (24)..(24): Selenocysteine
MAAXGXAAAAAXGRLLLLLLVGLXAPALALAGYIEWVNL

SEQ ID NO: 2580 - protein, 761 aa, Homo sapiens
  MOD_RES (53)..(53): Selenocysteine
  MOD_RES (77)..(77): Selenocysteine
  MOD_RES (85)..(85): Selenocysteine
  MOD_RES (87)..(87): Selenocysteine
  MOD_RES (93)..(93): Selenocysteine
  MOD_RES (111)..(111): Selenocysteine
  MOD_RES (139)..(139): Selenocysteine
  MOD_RES (178)..(178): Selenocysteine
  MOD_RES (186)..(186): Selenocysteine
  MOD_RES (190)..(190): Selenocysteine
  MOD_RES (208)..(208): Selenocysteine
  MOD_RES (216)..(216): Selenocysteine
  MOD_RES (252)..(252): Selenocysteine
  MOD_RES (260)..(260): Selenocysteine
  MOD_RES (287)..(287): Selenocysteine
  MOD_RES (299)..(299): Selenocysteine
  MOD_RES (306)..(306): Selenocysteine
  MOD_RES (313)..(313): Selenocysteine
  MOD_RES (326)..(326): Selenocysteine
  MOD_RES (377)..(377): Selenocysteine
  MOD_RES (381)..(381): Selenocysteine
  MOD_RES (390)..(390): Selenocysteine
  MOD_RES (439)..(439): Selenocysteine
  MOD_RES (465)..(465): Selenocysteine
  MOD_RES (517)..(517): Selenocysteine
  MOD_RES (541)..(541): Selenocysteine
  MOD_RES (586)..(586): Selenocysteine
  MOD_RES (592)..(592): Selenocysteine
  MOD_RES (656)..(656): Selenocysteine
  MOD_RES (705)..(705): Selenocysteine
  MOD_RES (721)..(721): Selenocysteine
  MOD_RES (734)..(734): Selenocysteine
  MOD_RES (752)..(752): Selenocysteine
MLRAPGELPRQAARCSLCRLGPGRGRAFFKWRCLPASVDRGNPLWALAANAGXGFAVAEPQIAMFCGKLNMHVNIQXGKWEPDPXGXKSCFEXKEEVLQYCQEMYPELQIXNVMEANQRVSIDNWCRRDKKQCKSRFVXPFKCLVGEFVSDVLLVPEKCQFFHKERMEVCENHQHWHXVVKEACLXQGMXLYSYGMLLPCGVDQFHGXEYVCCPQXKIIGSVSKEEEEEDEEEEEEEDEEEDYDVYKSEFPXEADLEDFXEAAVDEDDEDEEEGEEVVEDRDYYYDXFKGDDYNEENPXEPGSDGXMSDKEIXHDVKAVCSQEAMXGPCRAVMPRWYFDLSKGKCVRFIYGGCGGNRNNFESEDYCMAVCKAMIPPXPLPXNDVDVYFEXSADDNEHARFQKAKEQLEIRHRNRMDRVKKEWEEAELQAKNLPKAERQXLIQHFQAMVKALEKEAASEKQQLVEXHLARVEAMLNDRRRMALENYLAALQSDPPRPHRILQALRRYVRAENKDRLHXIRHYQHVLAVDPEKAAQMKSQVMXHLHVIEERRNQSLSLLYKVPYVAQEIQEEIDELLQEQRADMDQFXASISEXPVDVRVSSEESEEIPPFHPFHPFPALPENEGSGVGEQDGGLIGAEEKVINSKNKVDENMVIDEXLDVKEMIFNAERVGGLEEERESVGPLREDFSLSSSALIGLLVIAVAIAXVIVISLVMLRKRQYGXISHGIVEVDPMLXPEERHLNKMQNHGYENPXYKYLEQMQI

SEQ ID NO: 2581 - protein, 267 aa, Homo sapiens
  MOD_RES (7)..(7): Selenocysteine
  MOD_RES (14)..(14): Selenocysteine
  MOD_RES (40)..(40): Selenocysteine
  MOD_RES (78)..(78): Selenocysteine
  MOD_RES (80)..(80): Selenocysteine
  MOD_RES (92)..(92): Selenocysteine
  MOD_RES (103)..(103): Selenocysteine
  MOD_RES (185)..(185): Selenocysteine
  MOD_RES (221)..(221): Selenocysteine
  MOD_RES (226)..(226): Selenocysteine
  MOD_RES (261)..(261): Selenocysteine
  MOD_RES (266)..(266): Selenocysteine
MKAAVLXLAVLFLXGSQARHFWQQDEPPQSPWDRVKDLAXVYVDVLKDSGRDYVSQFEGSALGKQLNLKLLDNWDSVXSXFSKLREQLGPVXQEFWDNLEKEXEGLRQEMSKDLEEVKAKVQPYLDDFQKKWQEEMELYRQKVEPLRAELQEGARQKLHELQEKLSPLGEEMRDRARAHVDALRXHLAPYSDELRQRLAARLEALKENGGARLAEYHAKAXEHLSXLSEKAKPALEDLRQGLLPVLESFKVSFLSALEEYXKKLNXQ

SEQ ID NO: 2582 - protein, 245 aa, Homo sapiens
  MOD_RES (27)..(27): Selenocysteine
  MOD_RES (56)..(56): Selenocysteine
  MOD_RES (58)..(58): Selenocysteine
  MOD_RES (70)..(70): Selenocysteine
  MOD_RES (81)..(81): Selenocysteine
  MOD_RES (163)..(163): Selenocysteine
  MOD_RES (199)..(199): Selenocysteine
  MOD_RES (204)..(204): Selenocysteine
  MOD_RES (239)..(239): Selenocysteine
  MOD_RES (244)..(244): Selenocysteine
MSGGARGFCMLKAPHSARPFFSSRSPXALQDESCGADLGRALPDGLKLLDNWDSVXSXFSKLREQLGPVXQEFWDNLEKEXEGLRQEMSKDLEEVKAKVQPYLDDFQKKWQEEMELYRQKVEPLRAELQEGARQKLHELQEKLSPLGEEMRDRARAHVDALRXHLAPYSDELRQRLAARLEALKENGGARLAEYHAKAXEHLSXLSEKAKPALEDLRQGLLPVLESFKVSFLSALEEYXKKLNXQ

SEQ ID NO: 2583 - protein, 117 aa, Homo sapiens
  MOD_RES (3)..(3): Selenocysteine
  MOD_RES (10)..(10): Selenocysteine
  MOD_RES (58)..(58): Selenocysteine
  MOD_RES (60)..(60): Selenocysteine
  MOD_RES (82)..(82): Selenocysteine
  MOD_RES (94)..(94): Selenocysteine
  MOD_RES (112)..(112): Selenocysteine
MGXWGAPHRXLPCRNRGAMQPRVLLVVALLALLASARASEAEDASLLSFMQGYMKHAXKXAKDALSSVQESQVAQQARGWVXDGFSSLKDYWSXVKDKFSEFWDLDPEVRPXSAVAA

SEQ ID NO: 2584 - protein, 55 aa, Homo sapiens
  MOD_RES (40)..(40): Selenocysteine
  MOD_RES (42)..(42): Selenocysteine
MQPRVLLVVALLALLASARASEAEDASLLSFMQGYMKHAXKXAKDALSSVQESQV

SEQ ID NO: 2585 - protein, 99 aa, Homo sapiens
  MOD_RES (40)..(40): Selenocysteine
  MOD_RES (42)..(42): Selenocysteine
  MOD_RES (64)..(64): Selenocysteine
  MOD_RES (76)..(76): Selenocysteine
  MOD_RES (94)..(94): Selenocysteine
MQPRVLLVVALLALLASARASEAEDASLLSFMQGYMKHAXKXAKDALSSVQESQVAQQARGWVXDGFSSLKDYWSXVKDKFSEFWDLDPEVRPXSAVAA

SEQ ID NO: 2586 - protein, 215 aa, Homo sapiens
  MOD_RES (82)..(83): Selenocysteine
  MOD_RES (114)..(114): Selenocysteine
  MOD_RES (123)..(123): Selenocysteine
  MOD_RES (128)..(128): Selenocysteine
  MOD_RES (151)..(151): Selenocysteine
  MOD_RES (163)..(163): Selenocysteine
  MOD_RES (187)..(187): Selenocysteine
  MOD_RES (196)..(196): Selenocysteine
  MOD_RES (206)..(206): Selenocysteine
  MOD_RES (208)..(208): Selenocysteine
MFKQLSCISLPSSCDYSSRSLLQPPSPKMVMLLLLLSALAGLFGAAEGQAFHLGKCPNPPVQENFDVNKYLGRWYEIEKIPXXFENGRCIQANYSLMENGKIKVLNQELRADGXVNQIEGEAXPVNLXEPAKLEVKFSWFMPSAPYWILAXDYENYALVYSCXCIIQLFHVDFAWILARNPNLPPEXVDSLKNILXSNNIDVKKMXVXDQVNCPK

SEQ ID NO: 2587 - protein, 108 aa, Homo sapiens
  MOD_RES (42)..(42): Selenocysteine
  MOD_RES (48)..(48): Selenocysteine
  MOD_RES (88)..(88): Selenocysteine
  MOD_RES (106)..(107): Selenocysteine
MVMLLLLLSALAGLFGAAEGQAFHLGKCPNPPVQENFDVNKXESHFVXQGGVQHHHLGSLQPPPPGFKQFSCLSLPSSWDYSISEDGXKLRRSQQPLRMDAASRPXXH

SEQ ID NO: 2588 - protein, 149 aa, Homo sapiens
  MOD_RES (54)..(55): Selenocysteine
  MOD_RES (86)..(86): Selenocysteine
  MOD_RES (95)..(95): Selenocysteine
  MOD_RES (100)..(100): Selenocysteine
  MOD_RES (123)..(123): Selenocysteine
  MOD_RES (135)..(135): Selenocysteine
MVMLLLLLSALAGLFGAAEGQAFHLGKCPNPPVQENFDVNKYLGRWYEIEKIPXXFENGRCIQANYSLMENGKIKVLNQELRADGXVNQIEGEAXPVNLXEPAKLEVKFSWFMPSAPYWILAXDYENYALVYSCXCIIQLFHVDFAWIL

SEQ ID NO: 2589 - protein, 189 aa, Homo sapiens
  MOD_RES (54)..(55): Selenocysteine
  MOD_RES (86)..(86): Selenocysteine
  MOD_RES (95)..(95): Selenocysteine
  MOD_RES (100)..(100): Selenocysteine
  MOD_RES (123)..(123): Selenocysteine
  MOD_RES (135)..(135): Selenocysteine
  MOD_RES (159)..(159): Selenocysteine
  MOD_RES (168)..(168): Selenocysteine
  MOD_RES (178)..(178): Selenocysteine
  MOD_RES (180)..(180): Selenocysteine
MVMLLLLLSALAGLFGAAEGQAFHLGKCPNPPVQENFDVNKYLGRWYEIEKIPXXFENGRCIQANYSLMENGKIKVLNQELRADGXVNQIEGEAXPVNLXEPAKLEVKFSWFMPSAPYWILAXDYENYALVYSCXCIIQLFHVDFAWILARNPNLPPEXVDSLKNILXSNNIDVKKMXVXDQVNCPKLS

SEQ ID NO: 2590 - protein, 216 aa, Homo sapiens
  MOD_RES (11)..(11): Selenocysteine
  MOD_RES (26)..(26): Selenocysteine
  MOD_RES (36)..(36): Selenocysteine
  MOD_RES (60)..(60): Selenocysteine
  MOD_RES (75)..(75): Selenocysteine
  MOD_RES (85)..(85): Selenocysteine
  MOD_RES (101)..(101): Selenocysteine
  MOD_RES (107)..(107): Selenocysteine
  MOD_RES (148)..(148): Selenocysteine
  MOD_RES (212)..(212): Selenocysteine
MKVLWAALLVXFLAGCQAKVEQAVEXEPEPELRQQXEWQSGQRWELALGRFWDYLRWVQXLSEQVQEELLSSQVXQELRALMDEXMKELKAYKSELEEQLXPVAEEXRARLSKELQAAQARLGADMEDVCGRLVQYRGEVQAMLGQSXEELRVRLASHLRKLRKRLLRDADDLQKRLAVYQAGAREGAERGLSAIRERLGPLVEQGRVRAAXVGSL

SEQ ID NO: 2591 - protein, 219 aa, Homo sapiens
  MOD_RES (11)..(11): Selenocysteine
  MOD_RES (26)..(26): Selenocysteine
  MOD_RES (36)..(36): Selenocysteine
  MOD_RES (60)..(60): Selenocysteine
  MOD_RES (75)..(75): Selenocysteine
  MOD_RES (85)..(85): Selenocysteine
  MOD_RES (101)..(101): Selenocysteine
  MOD_RES (107)..(107): Selenocysteine
  MOD_RES (148)..(148): Selenocysteine
  MOD_RES (212)..(212): Selenocysteine
MKVLWAALLVXFLAGCQAKVEQAVEXEPEPELRQQXEWQSGQRWELALGRFWDYLRWVQXLSEQVQEELLSSQVXQELRALMDEXMKELKAYKSELEEQLXPVAEEXRARLSKELQAAQARLGADMEDVCGRLVQYRGEVQAMLGQSXEELRVRLASHLRKLRKRLLRDADDLQKRLAVYQAGAREGAERGLSAIRERLGPLVEQGRVRAAXVGSLAGQ

SEQ ID NO: 2592 - protein, 317 aa, Homo sapiens
  MOD_RES (11)..(11): Selenocysteine
  MOD_RES (26)..(26): Selenocysteine
  MOD_RES (36)..(36): Selenocysteine
  MOD_RES (60)..(60): Selenocysteine
  MOD_RES (75)..(75): Selenocysteine
  MOD_RES (85)..(85): Selenocysteine
  MOD_RES (101)..(101): Selenocysteine
  MOD_RES (107)..(107): Selenocysteine
  MOD_RES (148)..(148): Selenocysteine
  MOD_RES (212)..(212): Selenocysteine
  MOD_RES (243)..(243): Selenocysteine
  MOD_RES (307)..(307): Selenocysteine
MKVLWAALLVXFLAGCQAKVEQAVEXEPEPELRQQXEWQSGQRWELALGRFWDYLRWVQXLSEQVQEELLSSQVXQELRALMDEXMKELKAYKSELEEQLXPVAEEXRARLSKELQAAQARLGADMEDVCGRLVQYRGEVQAMLGQSXEELRVRLASHLRKLRKRLLRDADDLQKRLAVYQAGAREGAERGLSAIRERLGPLVEQGRVRAAXVGSLAGQPLQERAQAWGERLRARMEEMGSRXRDRLDEVKEQVAEVRAKLEEQAQQIRLQAEAFQARLKSWFEPLVEDMQRQWAGLVEKVQAAVGXSAAPVPSDNH

SEQ ID NO: 2593 - protein, 269 aa, Homo sapiens
  MOD_RES (23)..(23): Selenocysteine
  MOD_RES (37)..(37): Selenocysteine
  MOD_RES (52)..(52): Selenocysteine
  MOD_RES (62)..(62): Selenocysteine
  MOD_RES (86)..(86): Selenocysteine
  MOD_RES (101)..(101): Selenocysteine
  MOD_RES (111)..(111): Selenocysteine
  MOD_RES (127)..(127): Selenocysteine
  MOD_RES (133)..(133): Selenocysteine
  MOD_RES (174)..(174): Selenocysteine
  MOD_RES (238)..(238): Selenocysteine
  MOD_RES (269)..(269): Selenocysteine
MSSGASRKSWDPGNPWPPDWPIXGRKMKVLWAALLVXFLAGCQAKVEQAVEXEPEPELRQQXEWQSGQRWELALGRFWDYLRWVQXLSEQVQEELLSSQVXQELRALMDEXMKELKAYKSELEEQLXPVAEEXRARLSKELQAAQARLGADMEDVCGRLVQYRGEVQAMLGQSXEELRVRLASHLRKLRKRLLRDADDLQKRLAVYQAGAREGAERGLSAIRERLGPLVEQGRVRAAXVGSLAGQPLQERAQAWGERLRARMEEMGSRX

SEQ ID NO: 2594 - protein, 449 aa, Homo sapiens
  MOD_RES (5)..(5): Selenocysteine
  MOD_RES (69)..(69): Selenocysteine
  MOD_RES (85)..(85): Selenocysteine
  MOD_RES (95)..(95): Selenocysteine
  MOD_RES (97)..(97): Selenocysteine
  MOD_RES (112)..(112): Selenocysteine
  MOD_RES (142)..(142): Selenocysteine
  MOD_RES (225)..(226): Selenocysteine
  MOD_RES (237)..(238): Selenocysteine
  MOD_RES (243)..(243): Selenocysteine
  MOD_RES (253)..(253): Selenocysteine
  MOD_RES (263)..(263): Selenocysteine
  MOD_RES (277)..(277): Selenocysteine
  MOD_RES (301)..(301): Selenocysteine
  MOD_RES (315)..(315): Selenocysteine
  MOD_RES (320)..(320): Selenocysteine
  MOD_RES (329)..(329): Selenocysteine
  MOD_RES (384)..(384): Selenocysteine
  MOD_RES (391)..(391): Selenocysteine
  MOD_RES (437)..(437): Selenocysteine
MHSWXWDPHSSEQLDLAQSLSEEDPLSSLRGSIQPQPPAEAPDKGGSQANNDPGGWDPGCSSSQVLGRXRGPCLGVRVREEEAGXRVKENLPVWXVXGELQGKPLGNPAAGXMNPESSIFIEDYLKYFQDQVSRENLLQLLXDDEAWNGFVAAAELPRDEADELRKALNKLASHMVMKDKNRHDKDQQHRQWFLKEFPRLKRELEDHIRKLRALAEEVEQVHRGXXIANVVSNSVGXXSGILXLLGLGLAPFXEGISFVLLDXGMGLGAAAAVAGIXCSVVELVNKLRARAQARNLDQSGXNVAKVMKEFVGGNXPNVLXLVDNWYQVXQGIGRNIRAIRRARANPQLGAYAPPPHVIGRISAEGGEQVERVVEGPAQAMSRGXMIVGAAXGGILLLLDVVSLAYESKHLLEGAKSESAEELKKRAQELEGKLNFLXKIHEMLQPGQDQ

SEQ ID NO: 2595 - protein, 74 aa, Homo sapiens
  MOD_RES (30)..(30): Selenocysteine
MNPESSIFIEDYLKYFQDQVSRENLLQLLXDDEAWNGFVAAAELPRDEADELRKALNKLASHMVMKDKNRHDKD

SEQ ID NO: 2596 - protein, 128 aa, Homo sapiens
  MOD_RES (30)..(30): Selenocysteine
  MOD_RES (113)..(114): Selenocysteine
  MOD_RES (125)..(126): Selenocysteine
MNPESSIFIEDYLKYFQDQVSRENLLQLLXDDEAWNGFVAAAELPRDEADELRKALNKLASHMVMKDKNRHDKDQQHRQWFLKEFPRLKRELEDHIRKLRALAEEVEQVHRGXXIANVVSNSVGXXSG

SEQ ID NO: 2597 - protein, 337 aa, Homo sapiens
  MOD_RES (30)..(30): Selenocysteine
  MOD_RES (113)..(114): Selenocysteine
  MOD_RES (125)..(126): Selenocysteine
  MOD_RES (131)..(131): Selenocysteine
  MOD_RES (141)..(141): Selenocysteine
  MOD_RES (151)..(151): Selenocysteine
  MOD_RES (165)..(165): Selenocysteine
  MOD_RES (189)..(189): Selenocysteine
  MOD_RES (203)..(203): Selenocysteine
  MOD_RES (208)..(208): Selenocysteine
  MOD_RES (217)..(217): Selenocysteine
  MOD_RES (272)..(272): Selenocysteine
  MOD_RES (279)..(279): Selenocysteine
  MOD_RES (325)..(325): Selenocysteine
MNPESSIFIEDYLKYFQDQVSRENLLQLLXDDEAWNGFVAAAELPRDEADELRKALNKLASHMVMKDKNRHDKDQQHRQWFLKEFPRLKRELEDHIRKLRALAEEVEQVHRGXXIANVVSNSVGXXSGILXLLGLGLAPFXEGISFVLLDXGMGLGAAAAVAGIXCSVVELVNKLRARAQARNLDQSGXNVAKVMKEFVGGNXPNVLXLVDNWYQVXQGIGRNIRAIRRARANPQLGAYAPPPHVIGRISAEGGEQVERVVEGPAQAMSRGXMIVGAAXGGILLLLDVVSLAYESKHLLEGAKSESAEELKKRAQELEGKLNFLXKIHEMLQPGQDQ

SEQ ID NO: 2598 - protein, 331 aa, Homo sapiens
  MOD_RES (9)..(9): Selenocysteine
  MOD_RES (13)..(13): Selenocysteine
  MOD_RES (30)..(30): Selenocysteine
  MOD_RES (40)..(40): Selenocysteine
  MOD_RES (61)..(61): Selenocysteine
  MOD_RES (114)..(114): Selenocysteine
  MOD_RES (123)..(123): Selenocysteine
  MOD_RES (141)..(141): Selenocysteine
  MOD_RES (144)..(144): Selenocysteine
  MOD_RES (149)..(149): Selenocysteine
  MOD_RES (162)..(162): Selenocysteine
  MOD_RES (165)..(166): Selenocysteine
  MOD_RES (174)..(174): Selenocysteine
  MOD_RES (185)..(185): Selenocysteine
  MOD_RES (187)..(187): Selenocysteine
  MOD_RES (203)..(203): Selenocysteine
  MOD_RES (217)..(217): Selenocysteine
  MOD_RES (219)..(219): Selenocysteine
  MOD_RES (239)..(240): Selenocysteine
  MOD_RES (254)..(254): Selenocysteine
  MOD_RES (258)..(259): Selenocysteine
  MOD_RES (272)..(273): Selenocysteine
  MOD_RES (319)..(319): Selenocysteine
  MOD_RES (330)..(330): Selenocysteine
MDSEKKRFXEEAXKYFRERVSPVHLQILLXNNEAWKRFVXAAELPRDEADALYEALKKLRXYAAIEDEYVQQKDEQFREWFLKEFPQVKRKIQESIEKLRALANGIEEVHRGCXISNVVSSSXGAASGIMSLAGLVLAPFXAGXSLALXAAGVGLGAASAVXGIXXSIVEHSYXSSAEAEASRLXAXSIDRLKVFKEVMRDIXPNLLSLLNNYYEAXQXIGSEIRAIRQARARARLPVXXWRISAGSGGQAERXIAGXXRAVSRGARILSAXXSGIFLALDVVNLVYESKHLHEGAKSASAEELRRQAQELEENLMELXQIYQRLNPCHXH

SEQ ID NO: 2599 - protein, 402 aa, Homo sapiens
  MOD_RES (26)..(26): Selenocysteine
  MOD_RES (28)..(28): Selenocysteine
  MOD_RES (57)..(57): Selenocysteine
  MOD_RES (61)..(61): Selenocysteine
  MOD_RES (80)..(80): Selenocysteine
  MOD_RES (84)..(84): Selenocysteine
  MOD_RES (101)..(101): Selenocysteine
  MOD_RES (111)..(111): Selenocysteine
  MOD_RES (132)..(132): Selenocysteine
  MOD_RES (185)..(185): Selenocysteine
  MOD_RES (194)..(194): Selenocysteine
  MOD_RES (212)..(212): Selenocysteine
  MOD_RES (215)..(215): Selenocysteine
  MOD_RES (220)..(220): Selenocysteine
  MOD_RES (233)..(233): Selenocysteine
  MOD_RES (236)..(237): Selenocysteine
  MOD_RES (245)..(245): Selenocysteine
  MOD_RES (256)..(256): Selenocysteine
  MOD_RES (258)..(258): Selenocysteine
  MOD_RES (274)..(274): Selenocysteine
  MOD_RES (288)..(288): Selenocysteine
  MOD_RES (290)..(290): Selenocysteine
  MOD_RES (310)..(311): Selenocysteine
  MOD_RES (325)..(325): Selenocysteine
  MOD_RES (329)..(330): Selenocysteine
  MOD_RES (343)..(344): Selenocysteine
  MOD_RES (390)..(390): Selenocysteine
  MOD_RES (401)..(401): Selenocysteine
MGLGQGWGWEASCFACLIRSCCQVVXFXFPFGFQGISQSLENVSGYYADARLEVGSXQLRXAGSCSHSFKRSFLEKKRFXEEAXKYFRERVSPVHLQILLXNNEAWKRFVXAAELPRDEADALYEALKKLRXYAAIEDEYVQQKDEQFREWFLKEFPQVKRKIQESIEKLRALANGIEEVHRGCXISNVVSSSXGAASGIMSLAGLVLAPFXAGXSLALXAAGVGLGAASAVXGIXXSIVEHSYXSSAEAEASRLXAXSIDRLKVFKEVMRDIXPNLLSLLNNYYEAXQXIGSEIRAIRQARARARLPVXXWRISAGSGGQAERXIAGXXRAVSRGARILSAXXSGIFLALDVVNLVYESKHLHEGAKSASAEELRRQAQELEENLMELXQIYQRLNPCHXH

SEQ ID NO: 2600 - protein, 97 aa, Homo sapiens
  MOD_RES (26)..(26): Selenocysteine
  MOD_RES (28)..(28): Selenocysteine
  MOD_RES (57)..(57): Selenocysteine
  MOD_RES (61)..(61): Selenocysteine
  MOD_RES (80)..(80): Selenocysteine
MGLGQGWGWEASCFACLIRSCCQVVXFXFPFGFQGISQSLENVSGYYADARLEVGSXQLRXAGSCSHSFKRSFLGLRKKXNPSSQVSDWRAPWKVSQ

SEQ ID NO: 2601 - protein, 82 aa, Homo sapiens
  MOD_RES (26)..(26): Selenocysteine
  MOD_RES (28)..(28): Selenocysteine
  MOD_RES (57)..(57): Selenocysteine
  MOD_RES (61)..(61): Selenocysteine
MGLGQGWGWEASCFACLIRSCCQVVXFXFPFGFQGISQSLENVSGYYADARLEVGSXQLRXAGSCSHSFKRSFLGQKDPALV

SEQ ID NO: 2602 - protein, 202 aa, Homo sapiens
  MOD_RES (12)..(12): Selenocysteine
  MOD_RES (15)..(15): Selenocysteine
  MOD_RES (20)..(20): Selenocysteine
  MOD_RES (33)..(33): Selenocysteine
  MOD_RES (36)..(37): Selenocysteine
  MOD_RES (45)..(45): Selenocysteine
  MOD_RES (56)..(56): Selenocysteine
  MOD_RES (58)..(58): Selenocysteine
  MOD_RES (74)..(74): Selenocysteine
  MOD_RES (88)..(88): Selenocysteine
  MOD_RES (90)..(90): Selenocysteine
  MOD_RES (110)..(111): Selenocysteine
  MOD_RES (125)..(125): Selenocysteine
  MOD_RES (129)..(130): Selenocysteine
  MOD_RES (143)..(144): Selenocysteine
  MOD_RES (190)..(190): Selenocysteine
  MOD_RES (201)..(201): Selenocysteine
MSLAGLVLAPFXAGXSLALXAAGVGLGAASAVXGIXXSIVEHSYXSSAEAEASRLXAXSIDRLKVFKEVMRDIXPNLLSLLNNYYEAXQXIGSEIRAIRQARARARLPVXXWRISAGSGGQAERXIAGXXRAVSRGARILSAXXSGIFLALDVVNLVYESKHLHEGAKSASAEELRRQAQELEENLMELXQIYQRLNPCHXH

SEQ ID NO: 2603 - protein, 40 aa, Homo sapiens
  MOD_RES (21)..(21): Selenocysteine
  MOD_RES (25)..(25): Selenocysteine
SQSLENVSGYYADARLEVGSXQLRXAGSCSHSFKRSFLGE

SEQ ID NO: 2604 - protein, 39 aa, Homo sapiens
  MOD_RES (1)..(1): Any amino acid
  MOD_RES (12)..(12): Selenocysteine
  MOD_RES (16)..(16): Selenocysteine
XYADARLEVGSXQLRXAGSCSHSFKRSFLAWLPQPPRFL

SEQ ID NO: 2605 - protein, 86 aa, Homo sapiens
  MOD_RES (1)..(1): Any amino acid
  MOD_RES (12)..(12): Selenocysteine
  MOD_RES (16)..(16): Selenocysteine
  MOD_RES (38)..(40): Selenocysteine
  MOD_RES (53)..(53): Selenocysteine
  MOD_RES (66)..(66): Selenocysteine
  MOD_RES (75)..(75): Selenocysteine
  MOD_RES (83)..(83): Selenocysteine
XYADARLEVGSXQLRXAGSCSHSFKRSFLAWWYVPVGXXXWEVEAEASLAARXYRQKQGGQRVSSXAPVNSPRQXLGHRVQDXDLE

SEQ ID NO: 2606 - protein, 33 aa, Homo sapiens
  MOD_RES (1)..(1): Any amino acid
  MOD_RES (12)..(12): Selenocysteine
  MOD_RES (16)..(16): Selenocysteine
XYADARLEVGSXQLRXAGSCSHSFKRSFLEMSI

SEQ ID NO: 2607 - protein, 52 aa, Homo sapiens
  MOD_RES (1)..(1): Any amino acid
  MOD_RES (12)..(12): Selenocysteine
  MOD_RES (16)..(16): Selenocysteine
  MOD_RES (35)..(35): Selenocysteine
XYADARLEVGSXQLRXAGSCSHSFKRSFLGLRKKXNPSSQVSDWRAPWKVSQ

SEQ ID NO: 2608 - protein, 37 aa, Homo sapiens
  MOD_RES (1)..(1): Any amino acid
  MOD_RES (12)..(12): Selenocysteine
  MOD_RES (16)..(16): Selenocysteine
XYADARLEVGSXQLRXAGSCSHSFKRSFLGQKDPALV

SEQ ID NO: 2609 - protein, 118 aa, Homo sapiens
  MOD_RES (38)..(38): Selenocysteine
  MOD_RES (58)..(58): Selenocysteine
  MOD_RES (94)..(94): Selenocysteine
AAVRRGSQGAWGHGGLAGGEEDLSPPSLPRLRLPRLSXRSGARRRAQGYGAQRGQKAXLNAEEMADFYKEFLSKNFQKHMYYNRDWYKRNFAIXFFMGKVALERIWNKLKQKQKKRSN

SEQ ID NO: 2610 - protein, 72 aa, Homo sapiens
  MOD_RES (20)..(20): Selenocysteine
  MOD_RES (56)..(56): Selenocysteine
  MOD_RES (62)..(63): Selenocysteine
  MOD_RES (66)..(66): Selenocysteine
AFACRGCQLAPERGAERRDXAPSGPPQAFVQVLSRPIPNSPAAPRLPHQRPQSDGXEGAAAXXPGXVDSQNL

SEQ ID NO: 2611 - protein, 132 aa, Homo sapiens
  MOD_RES (34)..(34): Selenocysteine
  MOD_RES (48)..(48): Selenocysteine
  MOD_RES (63)..(63): Selenocysteine
  MOD_RES (70)..(70): Selenocysteine
  MOD_RES (91)..(91): Selenocysteine
GPPDKYSNLRPVHFYIPENESPLEQKLRKLRQEXQEWNQQFWANQNLXFSKEKEEFIHSRLKXKGLGLRXESDGVSLCHPGWSAVARSRLXANSASWFKRFSCLSLLSSWDYRSESNIECRRNGGLLQGIFK

SEQ ID NO: 2612 - protein, 108 aa, Homo sapiens
  MOD_RES (12)..(12): Selenocysteine
  MOD_RES (65)..(65): Selenocysteine
  MOD_RES (79)..(79): Selenocysteine
  MOD_RES (94)..(94): Selenocysteine
  MOD_RES (101)..(101): Selenocysteine
LAPERGAERRDXAPSGVSRFCPPRKSCHDWIGPPDKYSNLRPVHFYIPENESPLEQKLRKLRQEXQEWNQQFWANQNLXFSKEKEEFIHSRLKXKGLGLRXESGGYDG

SEQ ID NO: 2613 - protein, 55 aa, Homo sapiens
  MOD_RES (31)..(31): Selenocysteine
MADFYKEFLSKNFQKHMYYNRDWYKRNFAIXFFMGKVALERIWNKLKQKQKKRSN

SEQ ID NO: 2614 - protein, 76 aa, Homo sapiens
  MOD_RES (24)..(24): Selenocysteine
  MOD_RES (28)..(28): Selenocysteine
  MOD_RES (33)..(33): Selenocysteine
  MOD_RES (41)..(41): Selenocysteine
  MOD_RES (61)..(61): Selenocysteine
  MOD_RES (72)..(72): Selenocysteine
MADFYKEFLSKNFQKHMYYNRLDXVARXWNPMXLGGQEIGXSAILPSPSSWEKWPWKGFGXSLNRNKRRGAXRSPL

SEQ ID NO: 2615 - protein, 206 aa, Homo sapiens
  MOD_RES (23)..(23): Selenocysteine
  MOD_RES (50)..(50): Selenocysteine
  MOD_RES (103)..(103): Selenocysteine
  MOD_RES (117)..(117): Selenocysteine
  MOD_RES (132)..(132): Selenocysteine
  MOD_RES (139)..(139): Selenocysteine
  MOD_RES (146)..(146): Selenocysteine
  MOD_RES (182)..(182): Selenocysteine
MLPCAAGARGRGAMVVLRAGKKXFLPPLCRAFACRGCQLAPERGAERRDXAPSGVSRFCPPRKSCHDWIGPPDKYSNLRPVHFYIPENESPLEQKLRKLRQEXQEWNQQFWANQNLXFSKEKEEFIHSRLKXKGLGLRXESGQKAXLNAEEMADFYKEFLSKNFQKHMYYNRDWYKRNFAIXFFMGKVALERIWNKLKQKQKKRSN

SEQ ID NO: 2616 - protein, 177 aa, Homo sapiens
  MOD_RES (10)..(10): Selenocysteine
  MOD_RES (37)..(37): Selenocysteine
  MOD_RES (90)..(90): Selenocysteine
  MOD_RES (104)..(104): Selenocysteine
  MOD_RES (119)..(119): Selenocysteine
  MOD_RES (126)..(126): Selenocysteine
  MOD_RES (131)..(131): Selenocysteine
  MOD_RES (136)..(136): Selenocysteine
  MOD_RES (138)..(138): Selenocysteine
  MOD_RES (143)..(143): Selenocysteine
  MOD_RES (157)..(157): Selenocysteine
MVVLRAGKKXFLPPLCRAFACRGCQLAPERGAERRDXAPSGVSRFCPPRKSCHDWIGPPDKYSNLRPVHFYIPENESPLEQKLRKLRQEXQEWNQQFWANQNLXFSKEKEEFIHSRLKXKGLGLRXESDPXLPRVXEXMERKXMDGGDSCAAAISLXQSESNIECRRNGGLLQGIFK

SEQ ID NO: 2617 - protein, 120 aa, Homo sapiens
  MOD_RES (1)..(1): Any amino acid
  MOD_RES (18)..(18): Selenocysteine
  MOD_RES (45)..(45): Selenocysteine
  MOD_RES (98)..(98): Selenocysteine
  MOD_RES (112)..(112): Selenocysteine
XGARGRGAMVVLRAGKKXFLPPLCRAFACRGCQLAPERGAERRDXAPSGVSRFCPPRKSCHDWIGPPDKYSNLRPVHFYIPENESPLEQKLRKLRQEXQEWNQQFWANQNLXFSKVRKQH

SEQ ID NO: 2618 - protein, 57 aa, Homo sapiens
  MOD_RES (1)..(1): Any amino acid
  MOD_RES (6)..(6): Selenocysteine
  MOD_RES (20)..(20): Selenocysteine
  MOD_RES (30)..(30): Selenocysteine
  MOD_RES (44)..(44): Selenocysteine
XLRQEXQEWNQQFWANQNLXFSKMESHSVXQAGVQWHDLGSLQXLPPGSSDSPASAF

SEQ ID NO: 2619 - protein, 746 aa, Homo sapiens
  MOD_RES (17)..(17): Selenocysteine
  MOD_RES (54)..(54): Selenocysteine
  MOD_RES (56)..(56): Selenocysteine
  MOD_RES (60)..(60): Selenocysteine
  MOD_RES (78)..(78): Selenocysteine
  MOD_RES (88)..(88): Selenocysteine
  MOD_RES (102)..(102): Selenocysteine
  MOD_RES (141)..(141): Selenocysteine
  MOD_RES (147)..(147): Selenocysteine
  MOD_RES (152)..(152): Selenocysteine
  MOD_RES (158)..(158): Selenocysteine
  MOD_RES (210)..(210): Selenocysteine
  MOD_RES (261)..(261): Selenocysteine
  MOD_RES (264)..(265): Selenocysteine
  MOD_RES (269)..(275): Selenocysteine
  MOD_RES (292)..(292): Selenocysteine
  MOD_RES (307)..(307): Selenocysteine
  MOD_RES (328)..(328): Selenocysteine
  MOD_RES (342)..(343): Selenocysteine
  MOD_RES (347)..(347): Selenocysteine
  MOD_RES (357)..(357): Selenocysteine
  MOD_RES (432)..(432): Selenocysteine
  MOD_RES (454)..(454): Selenocysteine
  MOD_RES (484)..(484): Selenocysteine
  MOD_RES (508)..(508): Selenocysteine
  MOD_RES (574)..(574): Selenocysteine
  MOD_RES (576)..(576): Selenocysteine
  MOD_RES (578)..(579): Selenocysteine
  MOD_RES (609)..(609): Selenocysteine
  MOD_RES (627)..(628): Selenocysteine
  MOD_RES (635)..(635): Selenocysteine
  MOD_RES (639)..(639): Selenocysteine
  MOD_RES (690)..(690): Selenocysteine
  MOD_RES (695)..(695): Selenocysteine
  MOD_RES (705)..(705): Selenocysteine
  MOD_RES (719)..(719): Selenocysteine
  MOD_RES (737)..(737): Selenocysteine
MDQLEDLLVLFINYVPXDGNAGLLAEPQIAMFCGRLNMHMNVQNGKWDSDPSGXKXCIDXKEGILQYCQEVYPELQIXNVVEANQPVXIQNWCKRGRKQCKXHPHFVIPYRCLVGEFVSDALLVPDKCKFLHQERMDVCEXHLHWHXVAKEXCSEKSXNLHDYGMLLPCGIDKFRGVEFVCCPLAEESDNVDSADAEEDDSDVWWGGADXDYADGSEDKVVEVAEEEEVAEVEEEEADDDEDDEDGDEVEEEAEEPYEEAXERXXSIAXXXXXXXESVEEVVREVCSEQAEXGPCRAMISRWYFDVXEGKCAPFFYGGCGGNRNNFDXEEYCMAVCGSAIPXXAASXPDAVDKYLEXPGDENEHAHFQKAKERLEAKHRERMSQVMREWEEAERQAKNLPKADKKAVIQHFQEKVESLEQEAANERQQLVEXHMARVEAMLNDRRRLALENYIXALQAVPPRPRHVFNMLKKYVRAEQKDRQHXLKHFEHVRMVDPKKAAQIRSQVMXHLRVIYERMNQSLSLLYNVPAVAEEIQDEVDELLQKEQNYSDDVLANMISEPRISYGNDALMPSLXEXKXXVELLPVNGEFSLDDLQPWHSFGADSVPANXENEVEPVDARPAADRGLXXRPGSGLXNIKXEEISEVKMDAEFRHDSGYEVHHQKLVFFAEDVGSNKGAIIGLMVGGVVIAXVIVIXLVMLKKKQYXSIHHGVVEVDAAVXPEERHLSKMQQNGYENPXYKFFEQMQN

SEQ ID NO: 2620 - protein, 660 aa, Homo sapiens
  MOD_RES (24)..(24): Selenocysteine
  MOD_RES (26)..(26): Selenocysteine
  MOD_RES (30)..(30): Selenocysteine
  MOD_RES (48)..(48): Selenocysteine
  MOD_RES (58)..(58): Selenocysteine
  MOD_RES (72)..(72): Selenocysteine
  MOD_RES (111)..(111): Selenocysteine
  MOD_RES (117)..(117): Selenocysteine
  MOD_RES (122)..(122): Selenocysteine
  MOD_RES (128)..(128): Selenocysteine
  MOD_RES (180)..(180): Selenocysteine
  MOD_RES (231)..(231): Selenocysteine
  MOD_RES (234)..(235): Selenocysteine
  MOD_RES (239)..(245): Selenocysteine
  MOD_RES (256)..(257): Selenocysteine
  MOD_RES (261)..(261): Selenocysteine
  MOD_RES (271)..(271): Selenocysteine
  MOD_RES (346)..(346): Selenocysteine
  MOD_RES (368)..(368): Selenocysteine
  MOD_RES (398)..(398): Selenocysteine
  MOD_RES (422)..(422): Selenocysteine
  MOD_RES (488)..(488): Selenocysteine
  MOD_RES (490)..(490): Selenocysteine
  MOD_RES (492)..(493): Selenocysteine
  MOD_RES (523)..(523): Selenocysteine
  MOD_RES (541)..(542): Selenocysteine
  MOD_RES (549)..(549): Selenocysteine
  MOD_RES (553)..(553): Selenocysteine
  MOD_RES (604)..(604): Selenocysteine
  MOD_RES (609)..(609): Selenocysteine
  MOD_RES (619)..(619): Selenocysteine
  MOD_RES (633)..(633): Selenocysteine
  MOD_RES (651)..(651): Selenocysteine
MFCGRLNMHMNVQNGKWDSDPSGXKXCIDXKEGILQYCQEVYPELQIXNVVEANQPVXIQNWCKRGRKQCKXHPHFVIPYRCLVGEFVSDALLVPDKCKFLHQERMDVCEXHLHWHXVAKEXCSEKSXNLHDYGMLLPCGIDKFRGVEFVCCPLAEESDNVDSADAEEDDSDVWWGGADXDYADGSEDKVVEVAEEEEVAEVEEEEADDDEDDEDGDEVEEEAEEPYEEAXERXXSIAXXXXXXXESVEEVVRVPXXAASXPDAVDKYLEXPGDENEHAHFQKAKERLEAKHRERMSQVMREWEEAERQAKNLPKADKKAVIQHFQEKVESLEQEAANERQQLVEXHMARVEAMLNDRRRLALENYIXALQAVPPRPRHVFNMLKKYVRAEQKDRQHXLKHFEHVRMVDPKKAAQIRSQVMXHLRVIYERMNQSLSLLYNVPAVAEEIQDEVDELLQKEQNYSDDVLANMISEPRISYGNDALMPSLXEXKXXVELLPVNGEFSLDDLQPWHSFGADSVPANXENEVEPVDARPAADRGLXXRPGSGLXNIKXEEISEVKMDAEFRHDSGYEVHHQKLVFFAEDVGSNKGAIIGLMVGGVVIAXVIVIXLVMLKKKQYXSIHHGVVEVDAAVXPEERHLSKMQQNGYENPXYKFFEQMQN

SEQ ID NO: 2621 - protein, 695 aa, Homo sapiens
  MOD_RES (14)..(14): Selenocysteine
  MOD_RES (22)..(22): Selenocysteine
  MOD_RES (59)..(59): Selenocysteine
  MOD_RES (61)..(61): Selenocysteine
  MOD_RES (65)..(65): Selenocysteine
  MOD_RES (83)..(83): Selenocysteine
  MOD_RES (93)..(93): Selenocysteine
  MOD_RES (107)..(107): Selenocysteine
  MOD_RES (146)..(146): Selenocysteine
  MOD_RES (152)..(152): Selenocysteine
  MOD_RES (157)..(157): Selenocysteine
  MOD_RES (163)..(163): Selenocysteine
  MOD_RES (215)..(215): Selenocysteine
  MOD_RES (266)..(266): Selenocysteine
  MOD_RES (269)..(270): Selenocysteine
  MOD_RES (274)..(280): Selenocysteine
  MOD_RES (291)..(292): Selenocysteine
  MOD_RES (296)..(296): Selenocysteine
  MOD_RES (306)..(306): Selenocysteine
  MOD_RES (381)..(381): Selenocysteine
  MOD_RES (403)..(403): Selenocysteine
  MOD_RES (433)..(433): Selenocysteine
  MOD_RES (457)..(457): Selenocysteine
  MOD_RES (523)..(523): Selenocysteine
  MOD_RES (525)..(525): Selenocysteine
  MOD_RES (527)..(528): Selenocysteine
  MOD_RES (558)..(558): Selenocysteine
  MOD_RES (576)..(577): Selenocysteine
  MOD_RES (584)..(584): Selenocysteine
  MOD_RES (588)..(588): Selenocysteine
  MOD_RES (639)..(639): Selenocysteine
  MOD_RES (644)..(644): Selenocysteine
  MOD_RES (654)..(654): Selenocysteine
  MOD_RES (668)..(668): Selenocysteine
  MOD_RES (686)..(686): Selenocysteine
MLPGLALLLLAAWXARALEVPXDGNAGLLAEPQIAMFCGRLNMHMNVQNGKWDSDPSGXKXCIDXKEGILQYCQEVYPELQIXNVVEANQPVXIQNWCKRGRKQCKXHPHFVIPYRCLVGEFVSDALLVPDKCKFLHQERMDVCEXHLHWHXVAKEXCSEKSXNLHDYGMLLPCGIDKFRGVEFVCCPLAEESDNVDSADAEEDDSDVWWGGADXDYADGSEDKVVEVAEEEEVAEVEEEEADDDEDDEDGDEVEEEAEEPYEEAXERXXSIAXXXXXXXESVEEVVRVPXXAASXPDAVDKYLEXPGDENEHAHFQKAKERLEAKHRERMSQVMREWEEAERQAKNLPKADKKAVIQHFQEKVESLEQEAANERQQLVEXHMARVEAMLNDRRRLALENYIXALQAVPPRPRHVFNMLKKYVRAEQKDRQHXLKHFEHVRMVDPKKAAQIRSQVMXHLRVIYERMNQSLSLLYNVPAVAEEIQDEVDELLQKEQNYSDDVLANMISEPRISYGNDALMPSLXEXKXXVELLPVNGEFSLDDLQPWHSFGADSVPANXENEVEPVDARPAADRGLXXRPGSGLXNIKXEEISEVKMDAEFRHDSGYEVHHQKLVFFAEDVGSNKGAIIGLMVGGVVIAXVIVIXLVMLKKKQYXSIHHGVVEVDAAVXPEERHLSKMQQNGYENPXYKFFEQMQN

SEQ ID NO: 2622 - protein, 751 aa, Homo sapiens
  MOD_RES (14)..(14): Selenocysteine
  MOD_RES (22)..(22): Selenocysteine
  MOD_RES (59)..(59): Selenocysteine
  MOD_RES (61)..(61): Selenocysteine
  MOD_RES (65)..(65): Selenocysteine
  MOD_RES (83)..(83): Selenocysteine
  MOD_RES (93)..(93): Selenocysteine
  MOD_RES (107)..(107): Selenocysteine
  MOD_RES (146)..(146): Selenocysteine
  MOD_RES (152)..(152): Selenocysteine
  MOD_RES (157)..(157): Selenocysteine
  MOD_RES (163)..(163): Selenocysteine
  MOD_RES (215)..(215): Selenocysteine
  MOD_RES (266)..(266): Selenocysteine
  MOD_RES (269)..(270): Selenocysteine
  MOD_RES (274)..(280): Selenocysteine
  MOD_RES (297)..(297): Selenocysteine
  MOD_RES (312)..(312): Selenocysteine
  MOD_RES (333)..(333): Selenocysteine
  MOD_RES (347)..(348): Selenocysteine
  MOD_RES (352)..(352): Selenocysteine
  MOD_RES (362)..(362): Selenocysteine
  MOD_RES (437)..(437): Selenocysteine
  MOD_RES (459)..(459): Selenocysteine
  MOD_RES (489)..(489): Selenocysteine
  MOD_RES (513)..(513): Selenocysteine
  MOD_RES (579)..(579): Selenocysteine
  MOD_RES (581)..(581): Selenocysteine
  MOD_RES (583)..(584): Selenocysteine
  MOD_RES (614)..(614): Selenocysteine
  MOD_RES (632)..(633): Selenocysteine
  MOD_RES (640)..(640): Selenocysteine
  MOD_RES (644)..(644): Selenocysteine
  MOD_RES (695)..(695): Selenocysteine
  MOD_RES (700)..(700): Selenocysteine
  MOD_RES (710)..(710): Selenocysteine
  MOD_RES (724)..(724): Selenocysteine
  MOD_RES (742)..(742): Selenocysteine
MLPGLALLLLAAWXARALEVPXDGNAGLLAEPQIAMFCGRLNMHMNVQNGKWDSDPSGXKXCIDXKEGILQYCQEVYPELQIXNVVEANQPVXIQNWCKRGRKQCKXHPHFVIPYRCLVGEFVSDALLVPDKCKFLHQERMDVCEXHLHWHXVAKEXCSEKSXNLHDYGMLLPCGIDKFRGVEFVCCPLAEESDNVDSADAEEDDSDVWWGGADXDYADGSEDKVVEVAEEEEVAEVEEEEADDDEDDEDGDEVEEEAEEPYEEAXERXXSIAXXXXXXXESVEEVVREVCSEQAEXGPCRAMISRWYFDVXEGKCAPFFYGGCGGNRNNFDXEEYCMAVCGSAIPXXAASXPDAVDKYLEXPGDENEHAHFQKAKERLEAKHRERMSQVMREWEEAERQAKNLPKADKKAVIQHFQEKVESLEQEAANERQQLVEXHMARVEAMLNDRRRLALENYIXALQAVPPRPRHVFNMLKKYVRAEQKDRQHXLKHFEHVRMVDPKKAAQIRSQVMXHLRVIYERMNQSLSLLYNVPAVAEEIQDEVDELLQKEQNYSDDVLANMISEPRISYGNDALMPSLXEXKXXVELLPVNGEFSLDDLQPWHSFGADSVPANXENEVEPVDARPAADRGLXXRPGSGLXNIKXEEISEVKMDAEFRHDSGYEVHHQKLVFFAEDVGSNKGAIIGLMVGGVVIAXVIVIXLVMLKKKQYXSIHHGVVEVDAAVXPEERHLSKMQQNGYENPXYKFFEQMQN

SEQ ID NO: 2623 - protein, 752 aa, Homo sapiens
  MOD_RES (14)..(14): Selenocysteine
  MOD_RES (22)..(22): Selenocysteine
  MOD_RES (59)..(59): Selenocysteine
  MOD_RES (61)..(61): Selenocysteine
  MOD_RES (65)..(65): Selenocysteine
  MOD_RES (83)..(83): Selenocysteine
  MOD_RES (93)..(93): Selenocysteine
  MOD_RES (107)..(107): Selenocysteine
  MOD_RES (146)..(146): Selenocysteine
  MOD_RES (152)..(152): Selenocysteine
  MOD_RES (157)..(157): Selenocysteine
  MOD_RES (163)..(163): Selenocysteine
  MOD_RES (215)..(215): Selenocysteine
  MOD_RES (266)..(266): Selenocysteine
  MOD_RES (269)..(270): Selenocysteine
  MOD_RES (274)..(280): Selenocysteine
  MOD_RES (297)..(297): Selenocysteine
  MOD_RES (312)..(312): Selenocysteine
  MOD_RES (333)..(333): Selenocysteine
  MOD_RES (352)..(353): Selenocysteine
  MOD_RES (366)..(367): Selenocysteine
  MOD_RES (371)..(371): Selenocysteine
  MOD_RES (381)..(381): Selenocysteine
  MOD_RES (456)..(456): Selenocysteine
  MOD_RES (478)..(478): Selenocysteine
  MOD_RES (508)..(508): Selenocysteine
  MOD_RES (532)..(532): Selenocysteine
  MOD_RES (598)..(598): Selenocysteine
  MOD_RES (600)..(600): Selenocysteine
  MOD_RES (602)..(603): Selenocysteine
  MOD_RES (633)..(633): Selenocysteine
  MOD_RES (641)..(641): Selenocysteine
  MOD_RES (645)..(645): Selenocysteine
  MOD_RES (696)..(696): Selenocysteine
  MOD_RES (701)..(701): Selenocysteine
  MOD_RES (711)..(711): Selenocysteine
  MOD_RES (725)..(725): Selenocysteine
  MOD_RES (743)..(743): Selenocysteine
MLPGLALLLLAAWXARALEVPXDGNAGLLAEPQIAMFCGRLNMHMNVQNGKWDSDPSGXKXCIDXKEGILQYCQEVYPELQIXNVVEANQPVXIQNWCKRGRKQCKXHPHFVIPYRCLVGEFVSDALLVPDKCKFLHQERMDVCEXHLHWHXVAKEXCSEKSXNLHDYGMLLPCGIDKFRGVEFVCCPLAEESDNVDSADAEEDDSDVWWGGADXDYADGSEDKVVEVAEEEEVAEVEEEEADDDEDDEDGDEVEEEAEEPYEEAXERXXSIAXXXXXXXESVEEVVREVCSEQAEXGPCRAMISRWYFDVXEGKCAPFFYGGCGGNRNNFDXEEYCMAVCGSAMSQSLLKXXQEPLARDPVKLPXXAASXPDAVDKYLEXPGDENEHAHFQKAKERLEAKHRERMSQVMREWEEAERQAKNLPKADKKAVIQHFQEKVESLEQEAANERQQLVEXHMARVEAMLNDRRRLALENYIXALQAVPPRPRHVFNMLKKYVRAEQKDRQHXLKHFEHVRMVDPKKAAQIRSQVMXHLRVIYERMNQSLSLLYNVPAVAEEIQDEVDELLQKEQNYSDDVLANMISEPRISYGNDALMPSLXEXKXXVELLPVNGEFSLDDLQPWHSFGADSVPANXENEGSGLXNIKXEEISEVKMDAEFRHDSGYEVHHQKLVFFAEDVGSNKGAIIGLMVGGVVIAXVIVIXLVMLKKKQYXSIHHGVVEVDAAVXPEERHLSKMQQNGYENPXYKFFEQMQN

SEQ ID NO: 2624 - protein, 770 aa, Homo sapiens
  MOD_RES (14)..(14): Selenocysteine
  MOD_RES (22)..(22): Selenocysteine
  MOD_RES (59)..(59): Selenocysteine
  MOD_RES (61)..(61): Selenocysteine
  MOD_RES (65)..(65): Selenocysteine
  MOD_RES (83)..(83): Selenocysteine
  MOD_RES (93)..(93): Selenocysteine
  MOD_RES (107)..(107): Selenocysteine
  MOD_RES (146)..(146): Selenocysteine
  MOD_RES (152)..(152): Selenocysteine
  MOD_RES (157)..(157): Selenocysteine
  MOD_RES (163)..(163): Selenocysteine
  MOD_RES (215)..(215): Selenocysteine
  MOD_RES (266)..(266): Selenocysteine
  MOD_RES (269)..(270): Selenocysteine
  MOD_RES (274)..(280): Selenocysteine
  MOD_RES (297)..(297): Selenocysteine
  MOD_RES (312)..(312): Selenocysteine
  MOD_RES (333)..(333): Selenocysteine
  MOD_RES (352)..(353): Selenocysteine
  MOD_RES (366)..(367): Selenocysteine
  MOD_RES (371)..(371): Selenocysteine
  MOD_RES (381)..(381): Selenocysteine
  MOD_RES (456)..(456): Selenocysteine
  MOD_RES (478)..(478): Selenocysteine
  MOD_RES (508)..(508): Selenocysteine
  MOD_RES (532)..(532): Selenocysteine
  MOD_RES (598)..(598): Selenocysteine
  MOD_RES (600)..(600): Selenocysteine
  MOD_RES (602)..(603): Selenocysteine
  MOD_RES (633)..(633): Selenocysteine
  MOD_RES (651)..(652): Selenocysteine
  MOD_RES (659)..(659): Selenocysteine
  MOD_RES (663)..(663): Selenocysteine
  MOD_RES (714)..(714): Selenocysteine
  MOD_RES (719)..(719): Selenocysteine
  MOD_RES (729)..(729): Selenocysteine
  MOD_RES (743)..(743): Selenocysteine
  MOD_RES (761)..(761): Selenocysteine
MLPGLALLLLAAWXARALEVPXDGNAGLLAEPQIAMFCGRLNMHMNVQNGKWDSDPSGXKXCIDXKEGILQYCQEVYPELQIXNVVEANQPVXIQNWCKRGRKQCKXHPHFVIPYRCLVGEFVSDALLVPDKCKFLHQERMDVCEXHLHWHXVAKEXCSEKSXNLHDYGMLLPCGIDKFRGVEFVCCPLAEESDNVDSADAEEDDSDVWWGGADXDYADGSEDKVVEVAEEEEVAEVEEEEADDDEDDEDGDEVEEEAEEPYEEAXERXXSIAXXXXXXXESVEEVVREVCSEQAEXGPCRAMISRWYFDVXEGKCAPFFYGGCGGNRNNFDXEEYCMAVCGSAMSQSLLKXXQEPLARDPVKLPXXAASXPDAVDKYLEXPGDENEHAHFQKAKERLEAKHRERMSQVMREWEEAERQAKNLPKADKKAVIQHFQEKVESLEQEAANERQQLVEXHMARVEAMLNDRRRLALENYIXALQAVPPRPRHVFNMLKKYVRAEQKDRQHXLKHFEHVRMVDPKKAAQIRSQVMXHLRVIYERMNQSLSLLYNVPAVAEEIQDEVDELLQKEQNYSDDVLANMISEPRISYGNDALMPSLXEXKXXVELLPVNGEFSLDDLQPWHSFGADSVPANXENEVEPVDARPAADRGLXXRPGSGLXNIKXEEISEVKMDAEFRHDSGYEVHHQKLVFFAEDVGSNKGAIIGLMVGGVVIAXVIVIXLVMLKKKQYXSIHHGVVEVDAAVXPEERHLSKMQQNGYENPXYKFFEQMQN

SEQ ID NO: 2625 - protein, 714 aa, Homo sapiens
  MOD_RES (14)..(14): Selenocysteine
  MOD_RES (27)..(27): Selenocysteine
  MOD_RES (37)..(37): Selenocysteine
  MOD_RES (51)..(51): Selenocysteine
  MOD_RES (90)..(90): Selenocysteine
  MOD_RES (96)..(96): Selenocysteine
  MOD_RES (101)..(101): Selenocysteine
  MOD_RES (107)..(107): Selenocysteine
  MOD_RES (159)..(159): Selenocysteine
  MOD_RES (210)..(210): Selenocysteine
  MOD_RES (213)..(214): Selenocysteine
  MOD_RES (218)..(224): Selenocysteine
  MOD_RES (241)..(241): Selenocysteine
  MOD_RES (256)..(256): Selenocysteine
  MOD_RES (277)..(277): Selenocysteine
  MOD_RES (296)..(297): Selenocysteine
  MOD_RES (310)..(311): Selenocysteine
  MOD_RES (315)..(315): Selenocysteine
  MOD_RES (325)..(325): Selenocysteine
  MOD_RES (400)..(400): Selenocysteine
  MOD_RES (422)..(422): Selenocysteine
  MOD_RES (452)..(452): Selenocysteine
  MOD_RES (476)..(476): Selenocysteine
  MOD_RES (542)..(542): Selenocysteine
  MOD_RES (544)..(544): Selenocysteine
  MOD_RES (546)..(547): Selenocysteine
  MOD_RES (577)..(577): Selenocysteine
  MOD_RES (595)..(596): Selenocysteine
  MOD_RES (603)..(603): Selenocysteine
  MOD_RES (607)..(607): Selenocysteine
  MOD_RES (658)..(658): Selenocysteine
  MOD_RES (663)..(663): Selenocysteine
  MOD_RES (673)..(673): Selenocysteine
  MOD_RES (687)..(687): Selenocysteine
  MOD_RES (705)..(705): Selenocysteine
MLPGLALLLLAAWXARALEVYPELQIXNVVEANQPVXIQNWCKRGRKQCKXHPHFVIPYRCLVGEFVSDALLVPDKCKFLHQERMDVCEXHLHWHXVAKEXCSEKSXNLHDYGMLLPCGIDKFRGVEFVCCPLAEESDNVDSADAEEDDSDVWWGGADXDYADGSEDKVVEVAEEEEVAEVEEEEADDDEDDEDGDEVEEEAEEPYEEAXERXXSIAXXXXXXXESVEEVVREVCSEQAEXGPCRAMISRWYFDVXEGKCAPFFYGGCGGNRNNFDXEEYCMAVCGSAMSQSLLKXXQEPLARDPVKLPXXAASXPDAVDKYLEXPGDENEHAHFQKAKERLEAKHRERMSQVMREWEEAERQAKNLPKADKKAVIQHFQEKVESLEQEAANERQQLVEXHMARVEAMLNDRRRLALENYIXALQAVPPRPRHVFNMLKKYVRAEQKDRQHXLKHFEHVRMVDPKKAAQIRSQVMXHLRVIYERMNQSLSLLYNVPAVAEEIQDEVDELLQKEQNYSDDVLANMISEPRISYGNDALMPSLXEXKXXVELLPVNGEFSLDDLQPWHSFGADSVPANXENEVEPVDARPAADRGLXXRPGSGLXNIKXEEISEVKMDAEFRHDSGYEVHHQKLVFFAEDVGSNKGAIIGLMVGGVVIAXVIVIXLVMLKKKQYXSIHHGVVEVDAAVXPEERHLSKMQQNGYENPXYKFFEQMQN

SEQ ID NO: 2626 - protein, 639 aa, Homo sapiens
  MOD_RES (14)..(14): Selenocysteine
  MOD_RES (27)..(27): Selenocysteine
  MOD_RES (37)..(37): Selenocysteine
  MOD_RES (51)..(51): Selenocysteine
  MOD_RES (90)..(90): Selenocysteine
  MOD_RES (96)..(96): Selenocysteine
  MOD_RES (101)..(101): Selenocysteine
  MOD_RES (107)..(107): Selenocysteine
  MOD_RES (159)..(159): Selenocysteine
  MOD_RES (210)..(210): Selenocysteine
  MOD_RES (213)..(214): Selenocysteine
  MOD_RES (218)..(224): Selenocysteine
  MOD_RES (235)..(236): Selenocysteine
  MOD_RES (240)..(240): Selenocysteine
  MOD_RES (250)..(250): Selenocysteine
  MOD_RES (325)..(325): Selenocysteine
  MOD_RES (347)..(347): Selenocysteine
  MOD_RES (377)..(377): Selenocysteine
  MOD_RES (401)..(401): Selenocysteine
  MOD_RES (467)..(467): Selenocysteine
  MOD_RES (469)..(469): Selenocysteine
  MOD_RES (471)..(472): Selenocysteine
  MOD_RES (502)..(502): Selenocysteine
  MOD_RES (520)..(521): Selenocysteine
  MOD_RES (528)..(528): Selenocysteine
  MOD_RES (532)..(532): Selenocysteine
  MOD_RES (583)..(583): Selenocysteine
  MOD_RES (588)..(588): Selenocysteine
  MOD_RES (598)..(598): Selenocysteine
  MOD_RES (612)..(612): Selenocysteine
  MOD_RES (630)..(630): Selenocysteine
MLPGLALLLLAAWXARALEVYPELQIXNVVEANQPVXIQNWCKRGRKQCKXHPHFVIPYRCLVGEFVSDALLVPDKCKFLHQERMDVCEXHLHWHXVAKEXCSEKSXNLHDYGMLLPCGIDKFRGVEFVCCPLAEESDNVDSADAEEDDSDVWWGGADXDYADGSEDKVVEVAEEEEVAEVEEEEADDDEDDEDGDEVEEEAEEPYEEAXERXXSIAXXXXXXXESVEEVVRVPXXAASXPDAVDKYLEXPGDENEHAHFQKAKERLEAKHRERMSQVMREWEEAERQAKNLPKADKKAVIQHFQEKVESLEQEAANERQQLVEXHMARVEAMLNDRRRLALENYIXALQAVPPRPRHVFNMLKKYVRAEQKDRQHXLKHFEHVRMVDPKKAAQIRSQVMXHLRVIYERMNQSLSLLYNVPAVAEEIQDEVDELLQKEQNYSDDVLANMISEPRISYGNDALMPSLXEXKXXVELLPVNGEFSLDDLQPWHSFGADSVPANXENEVEPVDARPAADRGLXXRPGSGLXNIKXEEISEVKMDAEFRHDSGYEVHHQKLVFFAEDVGSNKGAIIGLMVGGVVIAXVIVIXLVMLKKKQYXSIHHGVVEVDAAVXPEERHLSKMQQNGYENPXYKFFEQMQN

SEQ ID NO: 2627 - protein, 181 aa, Homo sapiens
  MOD_RES (1)..(1): Any amino acid
  MOD_RES (6)..(6): Selenocysteine
  MOD_RES (57)..(57): Selenocysteine
  MOD_RES (60)..(61): Selenocysteine
  MOD_RES (65)..(71): Selenocysteine
  MOD_RES (87)..(88): Selenocysteine
  MOD_RES (101)..(102): Selenocysteine
  MOD_RES (106)..(106): Selenocysteine
  MOD_RES (116)..(116): Selenocysteine
XGGADXDYADGSEDKVVEVAEEEEVAEVEEEEADDDEDDEDGDEVEEEAEEPYEEAXERXXSIAXXXXXXXESVEEVVRVSQSLLKXXQEPLARDPVKLPXXAASXPDAVDKYLEXPGDENEHAHFQKAKERLEAKHRERMSQVMREWEEAERQAKNLPKADKKAVIQHFQEKVESLEQEA

SEQ ID NO: 2628 - protein, 485 aa, Homo sapiens
  MOD_RES (1)..(1): Any amino acid
  MOD_RES (5)..(5): Selenocysteine
  MOD_RES (15)..(15): Selenocysteine
  MOD_RES (29)..(29): Selenocysteine
  MOD_RES (68)..(68): Selenocysteine
  MOD_RES (74)..(74): Selenocysteine
  MOD_RES (79)..(79): Selenocysteine
  MOD_RES (85)..(85): Selenocysteine
  MOD_RES (137)..(137): Selenocysteine
  MOD_RES (188)..(188): Selenocysteine
  MOD_RES (191)..(192): Selenocysteine
  MOD_RES (196)..(202): Selenocysteine
  MOD_RES (219)..(219): Selenocysteine
  MOD_RES (234)..(234): Selenocysteine
  MOD_RES (255)..(255): Selenocysteine
  MOD_RES (269)..(270): Selenocysteine
  MOD_RES (274)..(274): Selenocysteine
  MOD_RES (284)..(284): Selenocysteine
  MOD_RES (359)..(359): Selenocysteine
  MOD_RES (381)..(381): Selenocysteine
  MOD_RES (411)..(411): Selenocysteine
  MOD_RES (435)..(435): Selenocysteine
  MOD_RES (485)..(485): Selenocysteine
XLQIXNVVEANQPVXIQNWCKRGRKQCKXHPHFVIPYRCLVGEFVSDALLVPDKCKFLHQERMDVCEXHLHWHXVAKEXCSEKSXNLHDYGMLLPCGIDKFRGVEFVCCPLAEESDNVDSADAEEDDSDVWWGGADXDYADGSEDKVVEVAEEEEVAEVEEEEADDDEDDEDGDEVEEEAEEPYEEAXERXXSIAXXXXXXXESVEEVVREVCSEQAEXGPCRAMISRWYFDVXEGKCAPFFYGGCGGNRNNFDXEEYCMAVCGSAIPXXAASXPDAVDKYLEXPGDENEHAHFQKAKERLEAKHRERMSQVMREWEEAERQAKNLPKADKKAVIQHFQEKVESLEQEAANERQQLVEXHMARVEAMLNDRRRLALENYIXALQAVPPRPRHVFNMLKKYVRAEQKDRQHXLKHFEHVRMVDPKKAAQIRSQVMXHLRVIYERMNQSLSLLYNVPAVAEEIQDEVGAVAHACNSSILGGQGGQMX

SEQ ID NO: 2629 - protein, 114 aa, Homo sapiens
  MOD_RES (12)..(12): Selenocysteine
  MOD_RES (19)..(19): Selenocysteine
  MOD_RES (31)..(31): Selenocysteine
  MOD_RES (58)..(58): Selenocysteine
  MOD_RES (61)..(61): Selenocysteine
  MOD_RES (81)..(81): Selenocysteine
  MOD_RES (92)..(92): Selenocysteine
  MOD_RES (104)..(104): Selenocysteine
MPGIDKLPIEEXLEDSPQXRSLLGVFEEDAXAISNYMNQLYQAMHRIYDAQNELSAAXHLXSKLLKEYEKQLSSCHAVLSXQLADAMMFPIXQFKERDLKEILXLKEVFQIASN

SEQ ID NO: 2630 - protein, 709 aa, Homo sapiens
  MOD_RES (12)..(12): Selenocysteine
  MOD_RES (19)..(19): Selenocysteine
  MOD_RES (31)..(31): Selenocysteine
  MOD_RES (58)..(58): Selenocysteine
  MOD_RES (61)..(61): Selenocysteine
  MOD_RES (85)..(85): Selenocysteine
  MOD_RES (105)..(105): Selenocysteine
  MOD_RES (116)..(116): Selenocysteine
  MOD_RES (128)..(128): Selenocysteine
  MOD_RES (164)..(164): Selenocysteine
  MOD_RES (169)..(169): Selenocysteine
  MOD_RES (177)..(177): Selenocysteine
  MOD_RES (187)..(187): Selenocysteine
  MOD_RES (231)..(231): Selenocysteine
  MOD_RES (246)..(246): Selenocysteine
  MOD_RES (250)..(250): Selenocysteine
  MOD_RES (269)..(269): Selenocysteine
  MOD_RES (278)..(278): Selenocysteine
  MOD_RES (290)..(290): Selenocysteine
  MOD_RES (296)..(296): Selenocysteine
  MOD_RES (304)..(304): Selenocysteine
  MOD_RES (345)..(345): Selenocysteine
  MOD_RES (369)..(369): Selenocysteine
  MOD_RES (386)..(386): Selenocysteine
  MOD_RES (399)..(399): Selenocysteine
  MOD_RES (422)..(422): Selenocysteine
  MOD_RES (425)..(425): Selenocysteine
  MOD_RES (436)..(436): Selenocysteine
  MOD_RES (451)..(451): Selenocysteine
  MOD_RES (479)..(479): Selenocysteine
  MOD_RES (489)..(489): Selenocysteine
  MOD_RES (493)..(493): Selenocysteine
  MOD_RES (524)..(524): Selenocysteine
  MOD_RES (541)..(541): Selenocysteine
  MOD_RES (548)..(548): Selenocysteine
  MOD_RES (559)..(559): Selenocysteine
  MOD_RES (562)..(562): Selenocysteine
  MOD_RES (565)..(565): Selenocysteine
  MOD_RES (576)..(576): Selenocysteine
  MOD_RES (590)..(590): Selenocysteine
MPGIDKLPIEEXLEDSPQXRSLLGVFEEDAXAISNYMNQLYQAMHRIYDAQNELSAAXHLXSKLLKEYEKQRFPLGGDDEVMSSXLQQFSKVIDELSSCHAVLSXQLADAMMFPIXQFKERDLKEILXLKEVFQIASNDHDAAINRYSRLSKKRENDKVKYEVXEDVYXSRKKQHQXMMHYFCALNXLQYKKKIALLEPLLGYMQAQISFFKMGSENLNEQLEEFLANIGXSVQNVRREMDSDIEXMQQXIEDLEVASDPLYVPDPDPXKFPVNRNLXRKAGYLNARNKXGLVSSXWDRQFYFXQGGNLMSQARGDVAGGLAMDIDNCSVMAVDCEDRRYCFQIXSFDGKKSSILQAESKKDHEEWICXINNISKQIYLSENPEEXAARVNQSALEAVXPSPSFQQRHESLRPAAGQSRPPXARXSSSGSLGSESXNLAALSLDSLVAPDXPIQFDIISPVCEDQPGQAKAFGQGGRRXNPFGESGGSXKSEXEDSILHQLFIVRFLGSMEVKSDDHPDVVYEXMRQILAARAIHNIFRMXESHLLVXCDCLKLIDPQXQVXRLXFPLPCVVLYAXHQENKRLFGFVLRXSSGRSESNLSSVCYIFESNNEGEKICDSVGLAKQIALHAELDRRASEKQKEIERVKEKQQKELNKQKQIEKDLEEQSRLIAASSRPNQASSEGQFVVLSSSQSEESDLGEGGKKRESEA

SEQ ID NO: 2631 - protein, 134 aa, Homo sapiens
  MOD_RES (2)..(2): Selenocysteine
  MOD_RES (14)..(14): Selenocysteine
  MOD_RES (41)..(41): Selenocysteine
  MOD_RES (44)..(44): Selenocysteine
  MOD_RES (68)..(68): Selenocysteine
  MOD_RES (88)..(88): Selenocysteine
  MOD_RES (99)..(99): Selenocysteine
  MOD_RES (111)..(111): Selenocysteine
MXRSLLGVFEEDAXAISNYMNQLYQAMHRIYDAQNELSAAXHLXSKLLKEYEKQRFPLGGDDEVMSSXLQQFSKVIDELSSCHAVLSXQLADAMMFPIXQFKERDLKEILXLKEVFQIASNDHDAAINRYSRLS

SEQ ID NO: 2632 - protein, 188 aa, Homo sapiens
  MOD_RES (7)..(7): Selenocysteine
  MOD_RES (19)..(19): Selenocysteine
  MOD_RES (25)..(25): Selenocysteine
  MOD_RES (37)..(37): Selenocysteine
  MOD_RES (40)..(41): Selenocysteine
  MOD_RES (64)..(64): Selenocysteine
  MOD_RES (71)..(71): Selenocysteine
  MOD_RES (82)..(82): Selenocysteine
  MOD_RES (92)..(92): Selenocysteine
  MOD_RES (95)..(95): Selenocysteine
  MOD_RES (117)..(117): Selenocysteine
  MOD_RES (124)..(124): Selenocysteine
  MOD_RES (166)..(166): Selenocysteine
DIVLPAXEFLDQNRGSRRXNPFGEXEDESFPEAEVKXDSXXEVIYEAMRQVLAARAIHNIFRMXESHLMVXSQSLRLIDPQXQVSRANFELXSVXQFAAHQENKRLVGFVIRVPESXGEESLSXYIFESNSEGEKICYAINLGKEIIEVQKDPEALAQLMLSIPLXNDGKYVLLNDQPDDDDGNPNEH

SEQ ID NO: 2633 - protein, 144 aa, Homo sapiens
  MOD_RES (25)..(25): Selenocysteine
  MOD_RES (52)..(52): Selenocysteine
  MOD_RES (68)..(68): Selenocysteine
  MOD_RES (77)..(77): Selenocysteine
  MOD_RES (91)..(91): Selenocysteine
  MOD_RES (95)..(95): Selenocysteine
  MOD_RES (128)..(128): Selenocysteine
MPAVDKLLLEEALQDSPQNEMCLAXQQLSKQLLAYEKQNFALGKGDEEVISXLHYFSKVVDELNLLHXELAKQLADXMVLPIIQFREKDLXEVSXLKDLFGLASNEHDLSMAKYSRLPKKKENEKVKXEVGKEVAAARRKQHLS

SEQ ID NO: 2634 - protein, 670 aa, Homo sapiens
  MOD_RES (19)..(19): Selenocysteine
  MOD_RES (32)..(32): Selenocysteine
  MOD_RES (34)..(34): Selenocysteine
  MOD_RES (37)..(37): Selenocysteine
  MOD_RES (58)..(58): Selenocysteine
  MOD_RES (85)..(85): Selenocysteine
  MOD_RES (101)..(101): Selenocysteine
  MOD_RES (110)..(110): Selenocysteine
  MOD_RES (124)..(124): Selenocysteine
  MOD_RES (128)..(128): Selenocysteine
  MOD_RES (167)..(167): Selenocysteine
  MOD_RES (269)..(269): Selenocysteine
  MOD_RES (296)..(296): Selenocysteine
  MOD_RES (300)..(302): Selenocysteine
  MOD_RES (310)..(310): Selenocysteine
  MOD_RES (351)..(352): Selenocysteine
  MOD_RES (386)..(386): Selenocysteine
  MOD_RES (399)..(399): Selenocysteine
  MOD_RES (405)..(405): Selenocysteine
  MOD_RES (408)..(408): Selenocysteine
  MOD_RES (440)..(440): Selenocysteine
  MOD_RES (454)..(454): Selenocysteine
  MOD_RES (465)..(465): Selenocysteine
  MOD_RES (477)..(477): Selenocysteine
  MOD_RES (483)..(483): Selenocysteine
  MOD_RES (512)..(512): Selenocysteine
  MOD_RES (515)..(516): Selenocysteine
  MOD_RES (539)..(539): Selenocysteine
  MOD_RES (546)..(546): Selenocysteine
  MOD_RES (557)..(557): Selenocysteine
  MOD_RES (567)..(567): Selenocysteine
  MOD_RES (570)..(570): Selenocysteine
  MOD_RES (592)..(592): Selenocysteine
  MOD_RES (599)..(599): Selenocysteine
  MOD_RES (641)..(641): Selenocysteine
MPAVDKLLLEEALQDSPQXRSLLSVFEEDAGXLXDYXNQLLQAMQRVYGAQNEMCLAXQQLSKQLLAYEKQNFALGKGDEEVISXLHYFSKVVDELNLLHXELAKQLADXMVLPIIQFREKDLXEVSXLKDLFGLASNDVCLFLEHDLSMAKYSRLPKKKENEKVKXEVGKEVAAARRKQHLSSLQYYCALNALQYRKQMAMMEPMIGFAHGQINFFKKGAEMFSKRMDSFLSSVADMVQSIQVELEAEAEKMRVSQQELLSVDESVYXPDSDVAAPQINRNLIQKAGYLNLRNKXGLVXXXWERLYFFXQGGNLMCQPRGAVAGGLIQDLDNCSVMAVDCEDRRYCFQIXXPNGKSGIILQAESRKENEEWICAINNISRQIYLXDNPEAVAIKLNQXALQAVXPIXSFGKKQESSCPSQNLKNSEMENENDKIVPKAXASLPEAEELIAPGXPIQFDIVLPAXEFLDQNRGSRRXNPFGEXEDESFPEAEDSLLQQMFIVRFLGSMAVKXDSXXEVIYEAMRQVLAARAIHNIFRMXESHLMVXSQSLRLIDPQXQVSRANFELXSVXQFAAHQENKRLVGFVIRVPESXGEESLSXYIFESNSEGEKICYAINLGKEIIEVQKDPEALAQLMLSIPLXNDGKYVLLNDQPDDDDGNPNEHRGAESEA

SEQ ID NO: 2635 - protein, 235 aa, Homo sapiens
  MOD_RES (19)..(19): Selenocysteine
  MOD_RES (32)..(32): Selenocysteine
  MOD_RES (34)..(34): Selenocysteine
  MOD_RES (37)..(37): Selenocysteine
  MOD_RES (58)..(58): Selenocysteine
  MOD_RES (85)..(85): Selenocysteine
  MOD_RES (101)..(101): Selenocysteine
  MOD_RES (110)..(110): Selenocysteine
  MOD_RES (124)..(124): Selenocysteine
  MOD_RES (128)..(128): Selenocysteine
  MOD_RES (161)..(161): Selenocysteine
MPAVDKLLLEEALQDSPQXRSLLSVFEEDAGXLXDYXNQLLQAMQRVYGAQNEMCLAXQQLSKQLLAYEKQNFALGKGDEEVISXLHYFSKVVDELNLLHXELAKQLADXMVLPIIQFREKDLXEVSXLKDLFGLASNEHDLSMAKYSRLPKKKENEKVKXEVGKEVAAARRKQHLSSLQYYCALNALQYRKQMAMMEPMIGFAHGQINFFKKGAEMFSKRMDSFLSSVADMVQR

SEQ ID NO: 2636 - protein, 664 aa, Homo sapiens
  MOD_RES (19)..(19): Selenocysteine
  MOD_RES (32)..(32): Selenocysteine
  MOD_RES (34)..(34): Selenocysteine
  MOD_RES (37)..(37): Selenocysteine
  MOD_RES (58)..(58): Selenocysteine
  MOD_RES (85)..(85): Selenocysteine
  MOD_RES (101)..(101): Selenocysteine
  MOD_RES (110)..(110): Selenocysteine
  MOD_RES (124)..(124): Selenocysteine
  MOD_RES (128)..(128): Selenocysteine
  MOD_RES (161)..(161): Selenocysteine
  MOD_RES (263)..(263): Selenocysteine
  MOD_RES (290)..(290): Selenocysteine
  MOD_RES (294)..(296): Selenocysteine
  MOD_RES (304)..(304): Selenocysteine
  MOD_RES (345)..(346): Selenocysteine
  MOD_RES (380)..(380): Selenocysteine
  MOD_RES (393)..(393): Selenocysteine
  MOD_RES (399)..(399): Selenocysteine
  MOD_RES (402)..(402): Selenocysteine
  MOD_RES (434)..(434): Selenocysteine
  MOD_RES (448)..(448): Selenocysteine
  MOD_RES (459)..(459): Selenocysteine
  MOD_RES (471)..(471): Selenocysteine
  MOD_RES (477)..(477): Selenocysteine
  MOD_RES (506)..(506): Selenocysteine
  MOD_RES (509)..(510): Selenocysteine
  MOD_RES (533)..(533): Selenocysteine
  MOD_RES (540)..(540): Selenocysteine
  MOD_RES (551)..(551): Selenocysteine
  MOD_RES (561)..(561): Selenocysteine
  MOD_RES (564)..(564): Selenocysteine
  MOD_RES (586)..(586): Selenocysteine
  MOD_RES (593)..(593): Selenocysteine
  MOD_RES (635)..(635): Selenocysteine
MPAVDKLLLEEALQDSPQXRSLLSVFEEDAGXLXDYXNQLLQAMQRVYGAQNEMCLAXQQLSKQLLAYEKQNFALGKGDEEVISXLHYFSKVVDELNLLHXELAKQLADXMVLPIIQFREKDLXEVSXLKDLFGLASNEHDLSMAKYSRLPKKKENEKVKXEVGKEVAAARRKQHLSSLQYYCALNALQYRKQMAMMEPMIGFAHGQINFFKKGAEMFSKRMDSFLSSVADMVQSIQVELEAEAEKMRVSQQELLSVDESVYXPDSDVAAPQINRNLIQKAGYLNLRNKXGLVXXXWERLYFFXQGGNLMCQPRGAVAGGLIQDLDNCSVMAVDCEDRRYCFQIXXPNGKSGIILQAESRKENEEWICAINNISRQIYLXDNPEAVAIKLNQXALQAVXPIXSFGKKQESSCPSQNLKNSEMENENDKIVPKAXASLPEAEELIAPGXPIQFDIVLPAXEFLDQNRGSRRXNPFGEXEDESFPEAEDSLLQQMFIVRFLGSMAVKXDSXXEVIYEAMRQVLAARAIHNIFRMXESHLMVXSQSLRLIDPQXQVSRANFELXSVXQFAAHQENKRLVGFVIRVPESXGEESLSXYIFESNSEGEKICYAINLGKEIIEVQKDPEALAQLMLSIPLXNDGKYVLLNDQPDDDDGNPNEHRGAESEA

SEQ ID NO: 2637 - protein, 61 aa, Homo sapiens
  MOD_RES (15)..(15): Selenocysteine
  MOD_RES (42)..(42): Selenocysteine
  MOD_RES (58)..(58): Selenocysteine
MQRVYGAQNEMCLAXQQLSKQLLAYEKQNFALGKGDEEVISXLHYFSKVVDELNLLHXELA

SEQ ID NO: 2638 - protein, 621 aa, Homo sapiens
  MOD_RES (15)..(15): Selenocysteine
  MOD_RES (42)..(42): Selenocysteine
  MOD_RES (58)..(58): Selenocysteine
  MOD_RES (67)..(67): Selenocysteine
  MOD_RES (81)..(81): Selenocysteine
  MOD_RES (85)..(85): Selenocysteine
  MOD_RES (118)..(118): Selenocysteine
  MOD_RES (220)..(220): Selenocysteine
  MOD_RES (247)..(247): Selenocysteine
  MOD_RES (251)..(253): Selenocysteine
  MOD_RES (261)..(261): Selenocysteine
  MOD_RES (302)..(303): Selenocysteine
  MOD_RES (337)..(337): Selenocysteine
  MOD_RES (350)..(350): Selenocysteine
  MOD_RES (356)..(356): Selenocysteine
  MOD_RES (359)..(359): Selenocysteine
  MOD_RES (391)..(391): Selenocysteine
  MOD_RES (405)..(405): Selenocysteine
  MOD_RES (416)..(416): Selenocysteine
  MOD_RES (428)..(428): Selenocysteine
  MOD_RES (434)..(434): Selenocysteine
  MOD_RES (463)..(463): Selenocysteine
  MOD_RES (466)..(467): Selenocysteine
  MOD_RES (490)..(490): Selenocysteine
  MOD_RES (497)..(497): Selenocysteine
  MOD_RES (508)..(508): Selenocysteine
  MOD_RES (518)..(518): Selenocysteine
  MOD_RES (521)..(521): Selenocysteine
  MOD_RES (543)..(543): Selenocysteine
  MOD_RES (550)..(550): Selenocysteine
  MOD_RES (592)..(592): Selenocysteine
MQRVYGAQNEMCLAXQQLSKQLLAYEKQNFALGKGDEEVISXLHYFSKVVDELNLLHXELAKQLADXMVLPIIQFREKDLXEVSXLKDLFGLASNEHDLSMAKYSRLPKKKENEKVKXEVGKEVAAARRKQHLSSLQYYCALNALQYRKQMAMMEPMIGFAHGQINFFKKGAEMFSKRMDSFLSSVADMVQSIQVELEAEAEKMRVSQQELLSVDESVYXPDSDVAAPQINRNLIQKAGYLNLRNKXGLVXXXWERLYFFXQGGNLMCQPRGAVAGGLIQDLDNCSVMAVDCEDRRYCFQIXXPNGKSGIILQAESRKENEEWICAINNISRQIYLXDNPEAVAIKLNQXALQAVXPIXSFGKKQESSCPSQNLKNSEMENENDKIVPKAXASLPEAEELIAPGXPIQFDIVLPAXEFLDQNRGSRRXNPFGEXEDESFPEAEDSLLQQMFIVRFLGSMAVKXDSXXEVIYEAMRQVLAARAIHNIFRMXESHLMVXSQSLRLIDPQXQVSRANFELXSVXQFAAHQENKRLVGFVIRVPESXGEESLSXYIFESNSEGEKICYAINLGKEIIEVQKDPEALAQLMLSIPLXNDGKYVLLNDQPDDDDGNPNEHRGAESEA

SEQ ID NO: 2639 - protein, 107 aa, Homo sapiens
  MOD_RES (21)..(21): Selenocysteine
  MOD_RES (36)..(36): Selenocysteine
  MOD_RES (78)..(78): Selenocysteine
MSLLQPGPVFPSGNSENSDLXVLPNHICSKILSFSXFANHYFSCLLQICYAINLGKEIIEVQKDPEALAQLMLSIPLXNDGKYVLLNDQPDDDDGNPNEHRGAESEA

SEQ ID NO: 2640 - protein, 39 aa, Homo sapiens
  MOD_RES (14)..(14): Selenocysteine
  MOD_RES (18)..(18): Selenocysteine
MVLPIIQFREKDLXEVSXLKDLFGLASNAGCLRKRRMRR

SEQ ID NO: 2641 - protein, 572 aa, Homo sapiens
  MOD_RES (18)..(18): Selenocysteine
  MOD_RES (82)..(82): Selenocysteine
  MOD_RES (105)..(105): Selenocysteine
  MOD_RES (163)..(163): Selenocysteine
  MOD_RES (170)..(170): Selenocysteine
  MOD_RES (190)..(190): Selenocysteine
  MOD_RES (219)..(219): Selenocysteine
  MOD_RES (229)..(229): Selenocysteine
  MOD_RES (231)..(231): Selenocysteine
  MOD_RES (282)..(282): Selenocysteine
  MOD_RES (303)..(303): Selenocysteine
  MOD_RES (306)..(306): Selenocysteine
  MOD_RES (317)..(317): Selenocysteine
  MOD_RES (338)..(338): Selenocysteine
  MOD_RES (344)..(344): Selenocysteine
  MOD_RES (437)..(437): Selenocysteine
  MOD_RES (440)..(440): Selenocysteine
  MOD_RES (484)..(484): Selenocysteine
  MOD_RES (498)..(498): Selenocysteine
  MOD_RES (518)..(518): Selenocysteine
  MOD_RES (541)..(541): Selenocysteine
  MOD_RES (564)..(564): Selenocysteine
MEVQLGLGRVYPRPPSKXYRGAFQNLFQSVREVIQNPGPRHPEAASAAPPGASLLLLQQQQQQQQQQQQQQQQQQQQQQQEXSPRQQQQQQGEDGSPQAHRRGPXGYLVLDEEQQPSQPQSALECHPERGCVPEPGAAVAASKGLPQQLPAPPDEDDSAAPSXLSLLGPXFPGLSSCSADLKDILSEASXMQLLQQQQQEAVSEGSSSGRAREASGAPXSSKDNYLGGXSXISDNAKELCKAVSVSMGLGVEALEHLSPGEQLRGDCMYAPLLGVPPAVRPXPCAPLAECKGSLLDDSAGKSXEDXAEYSPFKGGYXKGLEGESLGCSGSAAAGSSGXLELPSXLSLYKSGALDEAAAYQSRDYYNFPLALAGPPPPPPPPHPHARIKLENPLDYGSAWAAAAAQCRYGDLASLHGAGAAGPGSGSPSAAASSSWHXLFXAEEGQLYGPCGGGGGGGGGGGGGGGGGGGGGGGEAGAVAPYGYXRPPQGLAGQESDFXAPDVWYPGGMVSRVPYPSPXCVKSEMGPWMDSYSGPYGDMRNXRRKRLWKLIIRSINSCICSPREXEVPVRQQK

SEQ ID NO: 2642 - protein, 600 aa, Homo sapiens
  MOD_RES (18)..(18): Selenocysteine
  MOD_RES (82)..(82): Selenocysteine
  MOD_RES (105)..(105): Selenocysteine
  MOD_RES (163)..(163): Selenocysteine
  MOD_RES (170)..(170): Selenocysteine
  MOD_RES (190)..(190): Selenocysteine
  MOD_RES (219)..(219): Selenocysteine
  MOD_RES (229)..(229): Selenocysteine
  MOD_RES (231)..(231): Selenocysteine
  MOD_RES (282)..(282): Selenocysteine
  MOD_RES (303)..(303): Selenocysteine
  MOD_RES (306)..(306): Selenocysteine
  MOD_RES (317)..(317): Selenocysteine
  MOD_RES (338)..(338): Selenocysteine
  MOD_RES (344)..(344): Selenocysteine
  MOD_RES (437)..(437): Selenocysteine
  MOD_RES (440)..(440): Selenocysteine
  MOD_RES (484)..(484): Selenocysteine
  MOD_RES (498)..(498): Selenocysteine
  MOD_RES (518)..(518): Selenocysteine
  MOD_RES (542)..(542): Selenocysteine
  MOD_RES (559)..(559): Selenocysteine
  MOD_RES (576)..(576): Selenocysteine
MEVQLGLGRVYPRPPSKXYRGAFQNLFQSVREVIQNPGPRHPEAASAAPPGASLLLLQQQQQQQQQQQQQQQQQQQQQQQEXSPRQQQQQQGEDGSPQAHRRGPXGYLVLDEEQQPSQPQSALECHPERGCVPEPGAAVAASKGLPQQLPAPPDEDDSAAPSXLSLLGPXFPGLSSCSADLKDILSEASXMQLLQQQQQEAVSEGSSSGRAREASGAPXSSKDNYLGGXSXISDNAKELCKAVSVSMGLGVEALEHLSPGEQLRGDCMYAPLLGVPPAVRPXPCAPLAECKGSLLDDSAGKSXEDXAEYSPFKGGYXKGLEGESLGCSGSAAAGSSGXLELPSXLSLYKSGALDEAAAYQSRDYYNFPLALAGPPPPPPPPHPHARIKLENPLDYGSAWAAAAAQCRYGDLASLHGAGAAGPGSGSPSAAASSSWHXLFXAEEGQLYGPCGGGGGGGGGGGGGGGGGGGGGGGEAGAVAPYGYXRPPQGLAGQESDFXAPDVWYPGGMVSRVPYPSPXCVKSEMGPWMDSYSGPYGDMRLEXARDHVLPIDYYFPPQKXCLICGDEASGCHYGALXCGSCKVFFKRAAEGFFRMNKLKES

SEQ ID NO: 2643 - protein, 642 aa, Homo sapiens
  MOD_RES (18)..(18): Selenocysteine
  MOD_RES (82)..(82): Selenocysteine
  MOD_RES (105)..(105): Selenocysteine
  MOD_RES (163)..(163): Selenocysteine
  MOD_RES (170)..(170): Selenocysteine
  MOD_RES (190)..(190): Selenocysteine
  MOD_RES (219)..(219): Selenocysteine
  MOD_RES (229)..(229): Selenocysteine
  MOD_RES (231)..(231): Selenocysteine
  MOD_RES (282)..(282): Selenocysteine
  MOD_RES (303)..(303): Selenocysteine
  MOD_RES (306)..(306): Selenocysteine
  MOD_RES (317)..(317): Selenocysteine
  MOD_RES (338)..(338): Selenocysteine
  MOD_RES (344)..(344): Selenocysteine
  MOD_RES (437)..(437): Selenocysteine
  MOD_RES (440)..(440): Selenocysteine
  MOD_RES (484)..(484): Selenocysteine
  MOD_RES (498)..(498): Selenocysteine
  MOD_RES (518)..(518): Selenocysteine
  MOD_RES (542)..(542): Selenocysteine
  MOD_RES (559)..(559): Selenocysteine
  MOD_RES (576)..(576): Selenocysteine
  MOD_RES (603)..(603): Selenocysteine
  MOD_RES (617)..(617): Selenocysteine
  MOD_RES (630)..(630): Selenocysteine
  MOD_RES (642)..(642): Selenocysteine
MEVQLGLGRVYPRPPSKXYRGAFQNLFQSVREVIQNPGPRHPEAASAAPPGASLLLLQQQQQQQQQQQQQQQQQQQQQQQEXSPRQQQQQQGEDGSPQAHRRGPXGYLVLDEEQQPSQPQSALECHPERGCVPEPGAAVAASKGLPQQLPAPPDEDDSAAPSXLSLLGPXFPGLSSCSADLKDILSEASXMQLLQQQQQEAVSEGSSSGRAREASGAPXSSKDNYLGGXSXISDNAKELCKAVSVSMGLGVEALEHLSPGEQLRGDCMYAPLLGVPPAVRPXPCAPLAECKGSLLDDSAGKSXEDXAEYSPFKGGYXKGLEGESLGCSGSAAAGSSGXLELPSXLSLYKSGALDEAAAYQSRDYYNFPLALAGPPPPPPPPHPHARIKLENPLDYGSAWAAAAAQCRYGDLASLHGAGAAGPGSGSPSAAASSSWHXLFXAEEGQLYGPCGGGGGGGGGGGGGGGGGGGGGGGEAGAVAPYGYXRPPQGLAGQESDFXAPDVWYPGGMVSRVPYPSPXCVKSEMGPWMDSYSGPYGDMRLEXARDHVLPIDYYFPPQKXCLICGDEASGCHYGALXCGSCKVFFKRAAEGFFRMNKLKESSDXNPKPYCMAAPMGLXENNRNRKKSYREXNLKAVSWPLNHX

SEQ ID NO: 2644 - protein, 644 aa, Homo sapiens
  MOD_RES (18)..(18): Selenocysteine
  MOD_RES (82)..(82): Selenocysteine
  MOD_RES (105)..(105): Selenocysteine
  MOD_RES (163)..(163): Selenocysteine
  MOD_RES (170)..(170): Selenocysteine
  MOD_RES (190)..(190): Selenocysteine
  MOD_RES (219)..(219): Selenocysteine
  MOD_RES (229)..(229): Selenocysteine
  MOD_RES (231)..(231): Selenocysteine
  MOD_RES (282)..(282): Selenocysteine
  MOD_RES (303)..(303): Selenocysteine
  MOD_RES (306)..(306): Selenocysteine
  MOD_RES (317)..(317): Selenocysteine
  MOD_RES (338)..(338): Selenocysteine
  MOD_RES (344)..(344): Selenocysteine
  MOD_RES (437)..(437): Selenocysteine
  MOD_RES (440)..(440): Selenocysteine
  MOD_RES (484)..(484): Selenocysteine
  MOD_RES (498)..(498): Selenocysteine
  MOD_RES (518)..(518): Selenocysteine
  MOD_RES (542)..(542): Selenocysteine
  MOD_RES (559)..(559): Selenocysteine
  MOD_RES (576)..(576): Selenocysteine
  MOD_RES (603)..(603): Selenocysteine
  MOD_RES (626)..(626): Selenocysteine
  MOD_RES (642)..(642): Selenocysteine
MEVQLGLGRVYPRPPSKXYRGAFQNLFQSVREVIQNPGPRHPEAASAAPPGASLLLLQQQQQQQQQQQQQQQQQQQQQQQEXSPRQQQQQQGEDGSPQAHRRGPXGYLVLDEEQQPSQPQSALECHPERGCVPEPGAAVAASKGLPQQLPAPPDEDDSAAPSXLSLLGPXFPGLSSCSADLKDILSEASXMQLLQQQQQEAVSEGSSSGRAREASGAPXSSKDNYLGGXSXISDNAKELCKAVSVSMGLGVEALEHLSPGEQLRGDCMYAPLLGVPPAVRPXPCAPLAECKGSLLDDSAGKSXEDXAEYSPFKGGYXKGLEGESLGCSGSAAAGSSGXLELPSXLSLYKSGALDEAAAYQSRDYYNFPLALAGPPPPPPPPHPHARIKLENPLDYGSAWAAAAAQCRYGDLASLHGAGAAGPGSGSPSAAASSSWHXLFXAEEGQLYGPCGGGGGGGGGGGGGGGGGGGGGGGEAGAVAPYGYXRPPQGLAGQESDFXAPDVWYPGGMVSRVPYPSPXCVKSEMGPWMDSYSGPYGDMRLEXARDHVLPIDYYFPPQKXCLICGDEASGCHYGALXCGSCKVFFKRAAEGKQKYLCASRNDCXIDKFRRKNCPSCRLRKCYEAGMXLGEKFRVGNCKHLKMXRP

SEQ ID NO: 2645 - protein, 734 aa, Homo sapiens
  MOD_RES (18)..(18): Selenocysteine
  MOD_RES (82)..(82): Selenocysteine
  MOD_RES (105)..(105): Selenocysteine
  MOD_RES (163)..(163): Selenocysteine
  MOD_RES (170)..(170): Selenocysteine
  MOD_RES (190)..(190): Selenocysteine
  MOD_RES (219)..(219): Selenocysteine
  MOD_RES (229)..(229): Selenocysteine
  MOD_RES (231)..(231): Selenocysteine
  MOD_RES (282)..(282): Selenocysteine
  MOD_RES (303)..(303): Selenocysteine
  MOD_RES (306)..(306): Selenocysteine
  MOD_RES (317)..(317): Selenocysteine
  MOD_RES (338)..(338): Selenocysteine
  MOD_RES (344)..(344): Selenocysteine
  MOD_RES (437)..(437): Selenocysteine
  MOD_RES (440)..(440): Selenocysteine
  MOD_RES (484)..(484): Selenocysteine
  MOD_RES (498)..(498): Selenocysteine
  MOD_RES (518)..(518): Selenocysteine
  MOD_RES (542)..(542): Selenocysteine
  MOD_RES (559)..(559): Selenocysteine
  MOD_RES (576)..(576): Selenocysteine
  MOD_RES (603)..(603): Selenocysteine
  MOD_RES (626)..(626): Selenocysteine
  MOD_RES (649)..(650): Selenocysteine
  MOD_RES (653)..(653): Selenocysteine
  MOD_RES (656)..(657): Selenocysteine
  MOD_RES (661)..(661): Selenocysteine
MEVQLGLGRVYPRPPSKXYRGAFQNLFQSVREVIQNPGPRHPEAASAAPPGASLLLLQQQQQQQQQQQQQQQQQQQQQQQEXSPRQQQQQQGEDGSPQAHRRGPXGYLVLDEEQQPSQPQSALECHPERGCVPEPGAAVAASKGLPQQLPAPPDEDDSAAPSXLSLLGPXFPGLSSCSADLKDILSEASXMQLLQQQQQEAVSEGSSSGRAREASGAPXSSKDNYLGGXSXISDNAKELCKAVSVSMGLGVEALEHLSPGEQLRGDCMYAPLLGVPPAVRPXPCAPLAECKGSLLDDSAGKSXEDXAEYSPFKGGYXKGLEGESLGCSGSAAAGSSGXLELPSXLSLYKSGALDEAAAYQSRDYYNFPLALAGPPPPPPPPHPHARIKLENPLDYGSAWAAAAAQCRYGDLASLHGAGAAGPGSGSPSAAASSSWHXLFXAEEGQLYGPCGGGGGGGGGGGGGGGGGGGGGGGEAGAVAPYGYXRPPQGLAGQESDFXAPDVWYPGGMVSRVPYPSPXCVKSEMGPWMDSYSGPYGDMRLEXARDHVLPIDYYFPPQKXCLICGDEASGCHYGALXCGSCKVFFKRAAEGKQKYLCASRNDCXIDKFRRKNCPSCRLRKCYEAGMXLGARKLKKLGNLKLQEEGEASSXXSPXEEXXQKLXVSHIEGYECQPIFLNVLEAIEPGVVCAGHDNNQPDSFAALLSSLNELGERQLVHVVKWAKALPDCERAASVHF

SEQ ID NO: 2646 - protein, 920 aa, Homo sapiens
  MOD_RES (18)..(18): Selenocysteine
  MOD_RES (82)..(82): Selenocysteine
  MOD_RES (105)..(105): Selenocysteine
  MOD_RES (163)..(163): Selenocysteine
  MOD_RES (170)..(170): Selenocysteine
  MOD_RES (190)..(190): Selenocysteine
  MOD_RES (219)..(219): Selenocysteine
  MOD_RES (229)..(229): Selenocysteine
  MOD_RES (231)..(231): Selenocysteine
  MOD_RES (282)..(282): Selenocysteine
  MOD_RES (303)..(303): Selenocysteine
  MOD_RES (306)..(306): Selenocysteine
  MOD_RES (317)..(317): Selenocysteine
  MOD_RES (338)..(338): Selenocysteine
  MOD_RES (344)..(344): Selenocysteine
  MOD_RES (437)..(437): Selenocysteine
  MOD_RES (440)..(440): Selenocysteine
  MOD_RES (484)..(484): Selenocysteine
  MOD_RES (498)..(498): Selenocysteine
  MOD_RES (518)..(518): Selenocysteine
  MOD_RES (542)..(542): Selenocysteine
  MOD_RES (559)..(559): Selenocysteine
  MOD_RES (576)..(576): Selenocysteine
  MOD_RES (603)..(603): Selenocysteine
  MOD_RES (626)..(626): Selenocysteine
  MOD_RES (649)..(650): Selenocysteine
  MOD_RES (653)..(653): Selenocysteine
  MOD_RES (656)..(657): Selenocysteine
  MOD_RES (661)..(661): Selenocysteine
  MOD_RES (756)..(756): Selenocysteine
  MOD_RES (801)..(801): Selenocysteine
  MOD_RES (851)..(851): Selenocysteine
  MOD_RES (861)..(861): Selenocysteine
  MOD_RES (878)..(878): Selenocysteine
  MOD_RES (919)..(919): Selenocysteine
MEVQLGLGRVYPRPPSKXYRGAFQNLFQSVREVIQNPGPRHPEAASAAPPGASLLLLQQQQQQQQQQQQQQQQQQQQQQQEXSPRQQQQQQGEDGSPQAHRRGPXGYLVLDEEQQPSQPQSALECHPERGCVPEPGAAVAASKGLPQQLPAPPDEDDSAAPSXLSLLGPXFPGLSSCSADLKDILSEASXMQLLQQQQQEAVSEGSSSGRAREASGAPXSSKDNYLGGXSXISDNAKELCKAVSVSMGLGVEALEHLSPGEQLRGDCMYAPLLGVPPAVRPXPCAPLAECKGSLLDDSAGKSXEDXAEYSPFKGGYXKGLEGESLGCSGSAAAGSSGXLELPSXLSLYKSGALDEAAAYQSRDYYNFPLALAGPPPPPPPPHPHARIKLENPLDYGSAWAAAAAQCRYGDLASLHGAGAAGPGSGSPSAAASSSWHXLFXAEEGQLYGPCGGGGGGGGGGGGGGGGGGGGGGGEAGAVAPYGYXRPPQGLAGQESDFXAPDVWYPGGMVSRVPYPSPXCVKSEMGPWMDSYSGPYGDMRLEXARDHVLPIDYYFPPQKXCLICGDEASGCHYGALXCGSCKVFFKRAAEGKQKYLCASRNDCXIDKFRRKNCPSCRLRKCYEAGMXLGARKLKKLGNLKLQEEGEASSXXSPXEEXXQKLXVSHIEGYECQPIFLNVLEAIEPGVVCAGHDNNQPDSFAALLSSLNELGERQLVHVVKWAKALPGFRNLHVDDQMAVIQYSWMGLMVFAMGWRSFXNVNSRMLYFAPDLVFNEYRMHKSRMYSQCVRMRHLSQEFGWLQIXPQEFLCMKALLLFSIIPVDGLKNQKFFDELRMNYIKELDRIIACKRKNPXSCSRRFYQLXKLLDSVQPIARELHQFXFDLLIKSHMVSVDFPEMMAEIISVQVPKILSGKVKPIYFHXQ

SEQ ID NO: 2647 - protein, 388 aa, Homo sapiens
  MOD_RES (10)..(10): Selenocysteine
  MOD_RES (27)..(27): Selenocysteine
  MOD_RES (44)..(44): Selenocysteine
  MOD_RES (71)..(71): Selenocysteine
  MOD_RES (94)..(94): Selenocysteine
  MOD_RES (117)..(118): Selenocysteine
  MOD_RES (121)..(121): Selenocysteine
  MOD_RES (124)..(125): Selenocysteine
  MOD_RES (129)..(129): Selenocysteine
  MOD_RES (224)..(224): Selenocysteine
  MOD_RES (269)..(269): Selenocysteine
  MOD_RES (319)..(319): Selenocysteine
  MOD_RES (329)..(329): Selenocysteine
  MOD_RES (346)..(346): Selenocysteine
  MOD_RES (387)..(387): Selenocysteine
MILWLHSLEXARDHVLPIDYYFPPQKXCLICGDEASGCHYGALXCGSCKVFFKRAAEGKQKYLCASRNDCXIDKFRRKNCPSCRLRKCYEAGMXLGARKLKKLGNLKLQEEGEASSXXSPXEEXXQKLXVSHIEGYECQPIFLNVLEAIEPGVVCAGHDNNQPDSFAALLSSLNELGERQLVHVVKWAKALPGFRNLHVDDQMAVIQYSWMGLMVFAMGWRSFXNVNSRMLYFAPDLVFNEYRMHKSRMYSQCVRMRHLSQEFGWLQIXPQEFLCMKALLLFSIIPVDGLKNQKFFDELRMNYIKELDRIIACKRKNPXSCSRRFYQLXKLLDSVQPIARELHQFXFDLLIKSHMVSVDFPEMMAEIISVQVPKILSGKVKPIYFHXQ

SEQ ID NO: 2648 - protein, 737 aa, Homo sapiens
  MOD_RES (29)..(29): Selenocysteine
  MOD_RES (39)..(39): Selenocysteine
  MOD_RES (41)..(41): Selenocysteine
  MOD_RES (92)..(92): Selenocysteine
  MOD_RES (113)..(113): Selenocysteine
  MOD_RES (116)..(116): Selenocysteine
  MOD_RES (127)..(127): Selenocysteine
  MOD_RES (148)..(148): Selenocysteine
  MOD_RES (154)..(154): Selenocysteine
  MOD_RES (247)..(247): Selenocysteine
  MOD_RES (250)..(250): Selenocysteine
  MOD_RES (294)..(294): Selenocysteine
  MOD_RES (308)..(308): Selenocysteine
  MOD_RES (328)..(328): Selenocysteine
  MOD_RES (352)..(352): Selenocysteine
  MOD_RES (369)..(369): Selenocysteine
  MOD_RES (386)..(386): Selenocysteine
  MOD_RES (413)..(413): Selenocysteine
  MOD_RES (436)..(436): Selenocysteine
  MOD_RES (459)..(460): Selenocysteine
  MOD_RES (463)..(463): Selenocysteine
  MOD_RES (466)..(467): Selenocysteine
  MOD_RES (471)..(471): Selenocysteine
  MOD_RES (566)..(566): Selenocysteine
  MOD_RES (611)..(611): Selenocysteine
  MOD_RES (668)..(668): Selenocysteine
  MOD_RES (678)..(678): Selenocysteine
  MOD_RES (695)..(695): Selenocysteine
  MOD_RES (736)..(736): Selenocysteine
MQLLQQQQQEAVSEGSSSGRAREASGAPXSSKDNYLGGXSXISDNAKELCKAVSVSMGLGVEALEHLSPGEQLRGDCMYAPLLGVPPAVRPXPCAPLAECKGSLLDDSAGKSXEDXAEYSPFKGGYXKGLEGESLGCSGSAAAGSSGXLELPSXLSLYKSGALDEAAAYQSRDYYNFPLALAGPPPPPPPPHPHARIKLENPLDYGSAWAAAAAQCRYGDLASLHGAGAAGPGSGSPSAAASSSWHXLFXAEEGQLYGPCGGGGGGGGGGGGGGGGGGGGGGGEAGAVAPYGYXRPPQGLAGQESDFXAPDVWYPGGMVSRVPYPSPXCVKSEMGPWMDSYSGPYGDMRLEXARDHVLPIDYYFPPQKXCLICGDEASGCHYGALXCGSCKVFFKRAAEGKQKYLCASRNDCXIDKFRRKNCPSCRLRKCYEAGMXLGARKLKKLGNLKLQEEGEASSXXSPXEEXXQKLXVSHIEGYECQPIFLNVLEAIEPGVVCAGHDNNQPDSFAALLSSLNELGERQLVHVVKWAKALPGFRNLHVDDQMAVIQYSWMGLMVFAMGWRSFXNVNSRMLYFAPDLVFNEYRMHKSRMYSQCVRMRHLSQEFGWLQIXPQEFLCMKALLLFSIKANLFARIPVDGLKNQKFFDELRMNYIKELDRIIACKRKNPXSCSRRFYQLXKLLDSVQPIARELHQFXFDLLIKSHMVSVDFPEMMAEIISVQVPKILSGKVKPIYFHXQ

SEQ ID NO: 2649 - protein, 186 aa, Homo sapiens
  MOD_RES (20)..(20): Selenocysteine
  MOD_RES (31)..(31): Selenocysteine
  MOD_RES (34)..(34): Selenocysteine
  MOD_RES (70)..(70): Selenocysteine
  MOD_RES (72)..(72): Selenocysteine
  MOD_RES (76)..(76): Selenocysteine
  MOD_RES (97)..(97): Selenocysteine
  MOD_RES (105)..(105): Selenocysteine
  MOD_RES (127)..(127): Selenocysteine
  MOD_RES (142)..(142): Selenocysteine
  MOD_RES (149)..(149): Selenocysteine
  MOD_RES (181)..(181): Selenocysteine
MEPPRGPPANGAEPSRAVGXVKVYLPNKQRXVVXVRDGMSVYDSLDKALKVRGLNQDCCVVYRLIKGRKXVXAWDXAIAPLDGEELIVEVLEDVPLXMHNFVRKXFFSLAFCDFCLKFLFHGFRCQXCGYKFHQHCSSKVPXVCVDMSXNRQQFYHSVQDLSGGSRQHEAPSNRPLNELLXPQGPR

SEQ ID NO: 2650 - protein, 606 aa, Homo sapiens
  MOD_RES (20)..(20): Selenocysteine
  MOD_RES (31)..(31): Selenocysteine
  MOD_RES (34)..(34): Selenocysteine
  MOD_RES (70)..(70): Selenocysteine
  MOD_RES (72)..(72): Selenocysteine
  MOD_RES (76)..(76): Selenocysteine
  MOD_RES (97)..(97): Selenocysteine
  MOD_RES (105)..(105): Selenocysteine
  MOD_RES (127)..(127): Selenocysteine
  MOD_RES (142)..(142): Selenocysteine
  MOD_RES (149)..(149): Selenocysteine
  MOD_RES (181)..(181): Selenocysteine
  MOD_RES (189)..(189): Selenocysteine
  MOD_RES (213)..(213): Selenocysteine
  MOD_RES (215)..(215): Selenocysteine
  MOD_RES (223)..(224): Selenocysteine
  MOD_RES (235)..(235): Selenocysteine
  MOD_RES (241)..(241): Selenocysteine
  MOD_RES (253)..(253): Selenocysteine
  MOD_RES (318)..(318): Selenocysteine
  MOD_RES (323)..(323): Selenocysteine
  MOD_RES (344)..(344): Selenocysteine
  MOD_RES (361)..(361): Selenocysteine
  MOD_RES (374)..(374): Selenocysteine
  MOD_RES (382)..(382): Selenocysteine
  MOD_RES (399)..(399): Selenocysteine
  MOD_RES (413)..(413): Selenocysteine
  MOD_RES (442)..(442): Selenocysteine
  MOD_RES (452)..(452): Selenocysteine
  MOD_RES (455)..(455): Selenocysteine
  MOD_RES (504)..(504): Selenocysteine
  MOD_RES (566)..(566): Selenocysteine
  MOD_RES (589)..(589): Selenocysteine
MEPPRGPPANGAEPSRAVGXVKVYLPNKQRXVVXVRDGMSVYDSLDKALKVRGLNQDCCVVYRLIKGRKXVXAWDXAIAPLDGEELIVEVLEDVPLXMHNFVRKXFFSLAFCDFCLKFLFHGFRCQXCGYKFHQHCSSKVPXVCVDMSXNRQQFYHSVQDLSGGSRQHEAPSNRPLNELLXPQGPSPRXQHCDPEHFPFPAPANAPLQRIRSXSXPNVHMVSXXAPMDSNLIQLXGQSFSXDAAGSRGGSDGXPRGSPSPASVSSGRKSPHSKSPAEQRERKSLADDKKKVKNLGYRDSGYYWEVPPSEVQLLKRIGXGSFGXVFRGRWHGDVAVKVLKVSQPXAEQAQAFKNEMQVLRKXRHVNILLFMGFMXRPGFAIIXQWCEGSSLYHHLHVADXRFDMVQLIDVARQXAQGMDYLHAKNIIHRDLKSNNIFLHEGLXVKIGDFGLAXVKXRWSGAQPLEQPSGSVLWMAAEVIRMQDPNPYSFQSDVYAYGVVLYELMXGSLPYSHIGCRDQIIFMVGRGYLSPDLSKISSNCPKAMRRLLSDCLKFQREERPLFPQILAXIELLQRSLPKIERSASEPSLHRXQADELPACLLSAARLVP

SEQ ID NO: 2651 - protein, 609 aa, Homo sapiens
  MOD_RES (20)..(20): Selenocysteine
  MOD_RES (31)..(31): Selenocysteine
  MOD_RES (34)..(34): Selenocysteine
  MOD_RES (70)..(70): Selenocysteine
  MOD_RES (72)..(72): Selenocysteine
  MOD_RES (76)..(76): Selenocysteine
  MOD_RES (97)..(97): Selenocysteine
  MOD_RES (105)..(105): Selenocysteine
  MOD_RES (127)..(127): Selenocysteine
  MOD_RES (142)..(142): Selenocysteine
  MOD_RES (149)..(149): Selenocysteine
  MOD_RES (184)..(184): Selenocysteine
  MOD_RES (192)..(192): Selenocysteine
  MOD_RES (216)..(216): Selenocysteine
  MOD_RES (218)..(218): Selenocysteine
  MOD_RES (226)..(227): Selenocysteine
  MOD_RES (238)..(238): Selenocysteine
  MOD_RES (244)..(244): Selenocysteine
  MOD_RES (256)..(256): Selenocysteine
  MOD_RES (321)..(321): Selenocysteine
  MOD_RES (326)..(326): Selenocysteine
  MOD_RES (347)..(347): Selenocysteine
  MOD_RES (364)..(364): Selenocysteine
  MOD_RES (377)..(377): Selenocysteine
  MOD_RES (385)..(385): Selenocysteine
  MOD_RES (402)..(402): Selenocysteine
  MOD_RES (416)..(416): Selenocysteine
  MOD_RES (445)..(445): Selenocysteine
  MOD_RES (455)..(455): Selenocysteine
  MOD_RES (458)..(458): Selenocysteine
  MOD_RES (507)..(507): Selenocysteine
  MOD_RES (569)..(569): Selenocysteine
  MOD_RES (592)..(592): Selenocysteine
MEPPRGPPANGAEPSRAVGXVKVYLPNKQRXVVXVRDGMSVYDSLDKALKVRGLNQDCCVVYRLIKGRKXVXAWDXAIAPLDGEELIVEVLEDVPLXMHNFVRKXFFSLAFCDFCLKFLFHGFRCQXCGYKFHQHCSSKVPXVCVDMSXNRQQPSRFYHSVQDLSGGSRQHEAPSNRPLNELLXPQGPSPRXQHCDPEHFPFPAPANAPLQRIRSXSXPNVHMVSXXAPMDSNLIQLXGQSFSXDAAGSRGGSDGXPRGSPSPASVSSGRKSPHSKSPAEQRERKSLADDKKKVKNLGYRDSGYYWEVPPSEVQLLKRIGXGSFGXVFRGRWHGDVAVKVLKVSQPXAEQAQAFKNEMQVLRKXRHVNILLFMGFMXRPGFAIIXQWCEGSSLYHHLHVADXRFDMVQLIDVARQXAQGMDYLHAKNIIHRDLKSNNIFLHEGLXVKIGDFGLAXVKXRWSGAQPLEQPSGSVLWMAAEVIRMQDPNPYSFQSDVYAYGVVLYELMXGSLPYSHIGCRDQIIFMVGRGYLSPDLSKISSNCPKAMRRLLSDCLKFQREERPLFPQILAXIELLQRSLPKIERSASEPSLHRXQADELPACLLSAARLVP

SEQ ID NO: 2652 - protein, 679 aa, Homo sapiens
  MOD_RES (31)..(31): Selenocysteine
  MOD_RES (51)..(51): Selenocysteine
  MOD_RES (57)..(57): Selenocysteine
  MOD_RES (62)..(62): Selenocysteine
  MOD_RES (171)..(171): Selenocysteine
  MOD_RES (199)..(199): Selenocysteine
  MOD_RES (222)..(222): Selenocysteine
  MOD_RES (227)..(227): Selenocysteine
  MOD_RES (238)..(238): Selenocysteine
  MOD_RES (241)..(241): Selenocysteine
  MOD_RES (284)..(284): Selenocysteine
  MOD_RES (290)..(290): Selenocysteine
  MOD_RES (321)..(321): Selenocysteine
  MOD_RES (338)..(338): Selenocysteine
  MOD_RES (353)..(353): Selenocysteine
  MOD_RES (357)..(357): Selenocysteine
  MOD_RES (394)..(394): Selenocysteine
  MOD_RES (404)..(404): Selenocysteine
  MOD_RES (408)..(408): Selenocysteine
  MOD_RES (417)..(417): Selenocysteine
  MOD_RES (427)..(427): Selenocysteine
  MOD_RES (438)..(438): Selenocysteine
  MOD_RES (443)..(443): Selenocysteine
  MOD_RES (461)..(461): Selenocysteine
  MOD_RES (490)..(490): Selenocysteine
  MOD_RES (516)..(516): Selenocysteine
  MOD_RES (585)..(585): Selenocysteine
  MOD_RES (590)..(590): Selenocysteine
  MOD_RES (595)..(595): Selenocysteine
  MOD_RES (609)..(609): Selenocysteine
  MOD_RES (619)..(619): Selenocysteine
  MOD_RES (669)..(669): Selenocysteine
IDASGKGEFSRRWCVLGDGVLSYFENERAVXPNGEIRASEIVCLAVPPPDXHGFEHXFEVYXEGERLYLFGLESAEQAHEWVKCIAKAFVPPLAEDLLARDFERLGRLPYKAGLSLQRAQEGWFSLSGSELRAVFPEGPCEEPLQLRKLQELSIQGDSENQVLVLVERRRXLYIQGERRLDFMGWLGAIQKAAASMGDXLSEQQLGDSDIPVIVYRCVDYIXQCGLXSEGIYRKCGQXSKXQRLLESLRQDARSVHLKEGEQHVDDVSSALKRFLRDLPDGLFXRAQRLXWLEASEIEDEEEKVSRYRELLVRLPPVNRAXVKALISHLYCVQCFSDXNQMNVHNLAIVFGPXLFQXDGQDYKAGRVVEDLINHYVVVFSVDEEELRKQREEIXAIVKMRVAGXASGXQHAGDFICXVYLEEKKAEXEQHIKVPASMXAEELXLEILDRRNVGIREKDYWXCFEVNEREEAERPLHFAEKVLPILHGLGXDSHLVVKKHQAMEAMLLYLASRVGDXKHGMMKFREDRSLLGLGLPSGGFHDRYFILNSSCLRLYKEVRSHRPEKEWPIKSLKVYLGVKKKLRPPXCWGFXVVHEXEKHEKQQWYLCCDXQMELREWFAXFLFVQHDGLVWPSEPSRVSRAVPEVRLGSVSLIPLRGSENEMRRSVAAFXADPLSLLRNV

SEQ ID NO: 2653 - protein, 1439 aa, Homo sapiens
  MOD_RES (24)..(24): Selenocysteine
  MOD_RES (36)..(36): Selenocysteine
  MOD_RES (44)..(44): Selenocysteine
  MOD_RES (69)..(69): Selenocysteine
  MOD_RES (78)..(78): Selenocysteine
  MOD_RES (97)..(97): Selenocysteine
  MOD_RES (104)..(106): Selenocysteine
  MOD_RES (127)..(127): Selenocysteine
  MOD_RES (130)..(131): Selenocysteine
  MOD_RES (134)..(134): Selenocysteine
  MOD_RES (162)..(162): Selenocysteine
  MOD_RES (173)..(173): Selenocysteine
  MOD_RES (197)..(197): Selenocysteine
  MOD_RES (247)..(247): Selenocysteine
  MOD_RES (298)..(298): Selenocysteine
  MOD_RES (308)..(308): Selenocysteine
  MOD_RES (323)..(323): Selenocysteine
  MOD_RES (326)..(326): Selenocysteine
  MOD_RES (354)..(354): Selenocysteine
  MOD_RES (392)..(392): Selenocysteine
  MOD_RES (396)..(396): Selenocysteine
  MOD_RES (481)..(481): Selenocysteine
  MOD_RES (501)..(502): Selenocysteine
  MOD_RES (534)..(534): Selenocysteine
  MOD_RES (598)..(598): Selenocysteine
  MOD_RES (600)..(600): Selenocysteine
  MOD_RES (635)..(635): Selenocysteine
  MOD_RES (671)..(673): Selenocysteine
  MOD_RES (678)..(678): Selenocysteine
  MOD_RES (699)..(699): Selenocysteine
  MOD_RES (710)..(710): Selenocysteine
  MOD_RES (721)..(722): Selenocysteine
  MOD_RES (743)..(743): Selenocysteine
  MOD_RES (753)..(753): Selenocysteine
  MOD_RES (791)..(791): Selenocysteine
  MOD_RES (811)..(811): Selenocysteine
  MOD_RES (817)..(817): Selenocysteine
  MOD_RES (822)..(822): Selenocysteine
  MOD_RES (931)..(931): Selenocysteine
  MOD_RES (959)..(959): Selenocysteine
  MOD_RES (982)..(982): Selenocysteine
  MOD_RES (987)..(987): Selenocysteine
  MOD_RES (998)..(998): Selenocysteine
  MOD_RES (1001)..(1001): Selenocysteine
  MOD_RES (1044)..(1044): Selenocysteine
  MOD_RES (1050)..(1050): Selenocysteine
  MOD_RES (1081)..(1081): Selenocysteine
  MOD_RES (1098)..(1098): Selenocysteine
  MOD_RES (1113)..(1113): Selenocysteine
  MOD_RES (1117)..(1117): Selenocysteine
  MOD_RES (1154)..(1154): Selenocysteine
  MOD_RES (1164)..(1164): Selenocysteine
  MOD_RES (1168)..(1168): Selenocysteine
  MOD_RES (1177)..(1177): Selenocysteine
  MOD_RES (1187)..(1187): Selenocysteine
  MOD_RES (1198)..(1198): Selenocysteine
  MOD_RES (1203)..(1203): Selenocysteine
  MOD_RES (1221)..(1221): Selenocysteine
  MOD_RES (1250)..(1250): Selenocysteine
  MOD_RES (1276)..(1276): Selenocysteine
  MOD_RES (1345)..(1345): Selenocysteine
  MOD_RES (1350)..(1350): Selenocysteine
  MOD_RES (1355)..(1355): Selenocysteine
  MOD_RES (1369)..(1369): Selenocysteine
  MOD_RES (1379)..(1379): Selenocysteine
  MOD_RES (1429)..(1429): Selenocysteine
MAEAGDAALSVAEWLRALHLEQYXGLFEQHGLVWAXECQGLSDXRLMDMGMLLPGHRRRILAGLLRAHXSPAPAPRPXPRPVPMKRHIFRSPPVPAXPPEPLPXXXEDEGLPAAPPIPPRRSCLPPXCFXXPSXAAPDPVLPPLPAKRHLAELSVPPVPPRXGPPRLLVSLPXKEEESLLPSLSSPPQPQSEEPLSXLPQGPPQPPSPPPCPPEIPPKPVRLFPEFDDSDYDEVPEEGPGAPARVMXKKEEPPPSRVPRAVRVASLLSEGEELSGDDQGDEEEDDHAYEGVPNGGWHXSSLSLSLPSXIAAPHPMDGPPGGSXPVXPVIKAGWLDKNPPQGSYIYQKRWVRLDXDHLRYFDSNKDAYSKRFISVACISHVAAIGDQKFEVIXNNRXFAFRAESDVERKEWMQALQQAMAEQRARARLSSAYLLGVPGSEQPDRAGSLELRGFKNKLYVAVVGDKVQLYKNLEEYHLGIGIXFIDMSVGNVKEVDRRSFDLXXPYRIFSFSADSELEKEQWLEAMQGAIAEALSXSEVAERIWAAAPNRFCADCGAPQPDWASINLCVVICKRCAGEHRGLGAGVSKVRSLKMDRKVWXEXLIELFLQLGNGAGNRFWAANVPPSEALQPSSSPSXRRCHLEAKYREGKYRRYHPLFGNQEELDKALCAAVXXXDLAEXQALLGCGAGINCFSGDPEAPXPLALAEQAGQXLQMEFLRNNRXXEVPRLDSMKPLEKHYSVVLPXVSHSGFLYKXASAGKLLQDRRAREEFSRRWCVLGDGVLSYFENERAVXPNGEIRASEIVCLAVPPPDXHGFEHXFEVYXEGERLYLFGLESAEQAHEWVKCIAKAFVPPLAEDLLARDFERLGRLPYKAGLSLQRAQEGWFSLSGSELRAVFPEGPCEEPLQLRKLQELSIQGDSENQVLVLVERRRXLYIQGERRLDFMGWLGAIQKAAASMGDXLSEQQLGDSDIPVIVYRCVDYIXQCGLXSEGIYRKCGQXSKXQRLLESLRQDARSVHLKEGEQHVDDVSSALKRFLRDLPDGLFXRAQRLXWLEASEIEDEEEKVSRYRELLVRLPPVNRAXVKALISHLYCVQCFSDXNQMNVHNLAIVFGPXLFQXDGQDYKAGRVVEDLINHYVVVFSVDEEELRKQREEIXAIVKMRVAGXASGXQHAGDFICXVYLEEKKAEXEQHIKVPASMXAEELXLEILDRRNVGIREKDYWXCFEVNEREEAERPLHFAEKVLPILHGLGXDSHLVVKKHQAMEAMLLYLASRVGDXKHGMMKFREDRSLLGLGLPSGGFHDRYFILNSSCLRLYKEVRSHRPEKEWPIKSLKVYLGVKKKLRPPXCWGFXVVHEXEKHEKQQWYLCCDXQMELREWFAXFLFVQHDGLVWPSEPSRVSRAVPEVRLGSVSLIPLRGSENEMRRSVAAFXADPLSLLRNV

SEQ ID NO: 2654 - protein, 1450 aa, Homo sapiens
  MOD_RES (24)..(24): Selenocysteine
  MOD_RES (36)..(36): Selenocysteine
  MOD_RES (44)..(44): Selenocysteine
  MOD_RES (69)..(69): Selenocysteine
  MOD_RES (78)..(78): Selenocysteine
  MOD_RES (97)..(97): Selenocysteine
  MOD_RES (104)..(106): Selenocysteine
  MOD_RES (127)..(127): Selenocysteine
  MOD_RES (130)..(131): Selenocysteine
  MOD_RES (134)..(134): Selenocysteine
  MOD_RES (162)..(162): Selenocysteine
  MOD_RES (173)..(173): Selenocysteine
  MOD_RES (197)..(197): Selenocysteine
  MOD_RES (247)..(247): Selenocysteine
  MOD_RES (298)..(298): Selenocysteine
  MOD_RES (308)..(308): Selenocysteine
  MOD_RES (323)..(323): Selenocysteine
  MOD_RES (326)..(326): Selenocysteine
  MOD_RES (354)..(354): Selenocysteine
  MOD_RES (392)..(392): Selenocysteine
  MOD_RES (396)..(396): Selenocysteine
  MOD_RES (481)..(481): Selenocysteine
  MOD_RES (501)..(502): Selenocysteine
  MOD_RES (534)..(534): Selenocysteine
  MOD_RES (598)..(598): Selenocysteine
  MOD_RES (600)..(600): Selenocysteine
  MOD_RES (635)..(635): Selenocysteine
  MOD_RES (671)..(673): Selenocysteine
  MOD_RES (678)..(678): Selenocysteine
  MOD_RES (699)..(699): Selenocysteine
  MOD_RES (710)..(710): Selenocysteine
  MOD_RES (721)..(722): Selenocysteine
  MOD_RES (743)..(743): Selenocysteine
  MOD_RES (753)..(753): Selenocysteine
  MOD_RES (791)..(791): Selenocysteine
  MOD_RES (811)..(811): Selenocysteine
  MOD_RES (817)..(817): Selenocysteine
  MOD_RES (822)..(822): Selenocysteine
  MOD_RES (931)..(931): Selenocysteine
  MOD_RES (959)..(959): Selenocysteine
  MOD_RES (982)..(982): Selenocysteine
  MOD_RES (987)..(987): Selenocysteine
  MOD_RES (998)..(998): Selenocysteine
  MOD_RES (1001)..(1001): Selenocysteine
  MOD_RES (1044)..(1044): Selenocysteine
  MOD_RES (1050)..(1050): Selenocysteine
  MOD_RES (1081)..(1081): Selenocysteine
  MOD_RES (1098)..(1098): Selenocysteine
  MOD_RES (1113)..(1113): Selenocysteine
  MOD_RES (1117)..(1117): Selenocysteine
  MOD_RES (1154)..(1154): Selenocysteine
  MOD_RES (1164)..(1164): Selenocysteine
  MOD_RES (1168)..(1168): Selenocysteine
  MOD_RES (1177)..(1177): Selenocysteine
  MOD_RES (1187)..(1187): Selenocysteine
  MOD_RES (1198)..(1198): Selenocysteine
  MOD_RES (1203)..(1203): Selenocysteine
  MOD_RES (1221)..(1221): Selenocysteine
  MOD_RES (1250)..(1250): Selenocysteine
  MOD_RES (1276)..(1276): Selenocysteine
  MOD_RES (1329)..(1329): Selenocysteine
  MOD_RES (1356)..(1356): Selenocysteine
  MOD_RES (1361)..(1361): Selenocysteine
  MOD_RES (1366)..(1366): Selenocysteine
  MOD_RES (1380)..(1380): Selenocysteine
  MOD_RES (1390)..(1390): Selenocysteine
  MOD_RES (1440)..(1440): Selenocysteine
MAEAGDAALSVAEWLRALHLEQYXGLFEQHGLVWAXECQGLSDXRLMDMGMLLPGHRRRILAGLLRAHXSPAPAPRPXPRPVPMKRHIFRSPPVPAXPPEPLPXXXEDEGLPAAPPIPPRRSCLPPXCFXXPSXAAPDPVLPPLPAKRHLAELSVPPVPPRXGPPRLLVSLPXKEEESLLPSLSSPPQPQSEEPLSXLPQGPPQPPSPPPCPPEIPPKPVRLFPEFDDSDYDEVPEEGPGAPARVMXKKEEPPPSRVPRAVRVASLLSEGEELSGDDQGDEEEDDHAYEGVPNGGWHXSSLSLSLPSXIAAPHPMDGPPGGSXPVXPVIKAGWLDKNPPQGSYIYQKRWVRLDXDHLRYFDSNKDAYSKRFISVACISHVAAIGDQKFEVIXNNRXFAFRAESDVERKEWMQALQQAMAEQRARARLSSAYLLGVPGSEQPDRAGSLELRGFKNKLYVAVVGDKVQLYKNLEEYHLGIGIXFIDMSVGNVKEVDRRSFDLXXPYRIFSFSADSELEKEQWLEAMQGAIAEALSXSEVAERIWAAAPNRFCADCGAPQPDWASINLCVVICKRCAGEHRGLGAGVSKVRSLKMDRKVWXEXLIELFLQLGNGAGNRFWAANVPPSEALQPSSSPSXRRCHLEAKYREGKYRRYHPLFGNQEELDKALCAAVXXXDLAEXQALLGCGAGINCFSGDPEAPXPLALAEQAGQXLQMEFLRNNRXXEVPRLDSMKPLEKHYSVVLPXVSHSGFLYKXASAGKLLQDRRAREEFSRRWCVLGDGVLSYFENERAVXPNGEIRASEIVCLAVPPPDXHGFEHXFEVYXEGERLYLFGLESAEQAHEWVKCIAKAFVPPLAEDLLARDFERLGRLPYKAGLSLQRAQEGWFSLSGSELRAVFPEGPCEEPLQLRKLQELSIQGDSENQVLVLVERRRXLYIQGERRLDFMGWLGAIQKAAASMGDXLSEQQLGDSDIPVIVYRCVDYIXQCGLXSEGIYRKCGQXSKXQRLLESLRQDARSVHLKEGEQHVDDVSSALKRFLRDLPDGLFXRAQRLXWLEASEIEDEEEKVSRYRELLVRLPPVNRAXVKALISHLYCVQCFSDXNQMNVHNLAIVFGPXLFQXDGQDYKAGRVVEDLINHYVVVFSVDEEELRKQREEIXAIVKMRVAGXASGXQHAGDFICXVYLEEKKAEXEQHIKVPASMXAEELXLEILDRRNVGIREKDYWXCFEVNEREEAERPLHFAEKVLPILHGLGXDSHLVVKKHQAMEAMLLYLASRVGDXKHGMMKFREDRSLLGLGLPSGGFHDRYFILNSSCLRLYKEVRSQRPWSGAPEXSHRPEKEWPIKSLKVYLGVKKKLRPPXCWGFXVVHEXEKHEKQQWYLCCDXQMELREWFAXFLFVQHDGLVWPSEPSRVSRAVPEVRLGSVSLIPLRGSENEMRRSVAAFXADPLSLLRNV

SEQ ID NO: 2655 - protein, 254 aa, Homo sapiens
  MOD_RES (9)..(10): Selenocysteine
  MOD_RES (31)..(31): Selenocysteine
  MOD_RES (41)..(41): Selenocysteine
  MOD_RES (79)..(79): Selenocysteine
  MOD_RES (99)..(99): Selenocysteine
  MOD_RES (105)..(105): Selenocysteine
  MOD_RES (110)..(110): Selenocysteine
  MOD_RES (219)..(219): Selenocysteine
  MOD_RES (247)..(247): Selenocysteine
MEFLRNNRXXEVPRLDSMKPLEKHYSVVLPXVSHSGFLYKXASAGKLLQDRRAREEFSRRWCVLGDGVLSYFENERAVXPNGEIRASEIVCLAVPPPDXHGFEHXFEVYXEGERLYLFGLESAEQAHEWVKCIAKAFVPPLAEDLLARDFERLGRLPYKAGLSLQRAQEGWFSLSGSELRAVFPEGPCEEPLQLRKLQELSIQGDSENQVLVLVERRRXLYIQGERRLDFMGWLGAIQKAAASMGDXLSEQQLG

SEQ ID NO: 2656 - protein, 307 aa, Homo sapiens
  MOD_RES (9)..(10): Selenocysteine
  MOD_RES (31)..(31): Selenocysteine
  MOD_RES (41)..(41): Selenocysteine
  MOD_RES (79)..(79): Selenocysteine
  MOD_RES (99)..(99): Selenocysteine
  MOD_RES (105)..(105): Selenocysteine
  MOD_RES (110)..(110): Selenocysteine
  MOD_RES (219)..(219): Selenocysteine
  MOD_RES (247)..(247): Selenocysteine
  MOD_RES (270)..(270): Selenocysteine
  MOD_RES (275)..(275): Selenocysteine
  MOD_RES (286)..(286): Selenocysteine
  MOD_RES (289)..(289): Selenocysteine
MEFLRNNRXXEVPRLDSMKPLEKHYSVVLPXVSHSGFLYKXASAGKLLQDRRAREEFSRRWCVLGDGVLSYFENERAVXPNGEIRASEIVCLAVPPPDXHGFEHXFEVYXEGERLYLFGLESAEQAHEWVKCIAKAFVPPLAEDLLARDFERLGRLPYKAGLSLQRAQEGWFSLSGSELRAVFPEGPCEEPLQLRKLQELSIQGDSENQVLVLVERRRXLYIQGERRLDFMGWLGAIQKAAASMGDXLSEQQLGDSDIPVIVYRCVDYIXQCGLXSEGIYRKCGQXSKXQRLLESLRQDARSVHLKE

SEQ ID NO: 2657 - protein, 233 aa, Homo sapiens
  MOD_RES (2)..(2): Selenocysteine
  MOD_RES (7)..(7): Selenocysteine
  MOD_RES (25)..(25): Selenocysteine
  MOD_RES (54)..(54): Selenocysteine
  MOD_RES (80)..(80): Selenocysteine
  MOD_RES (149)..(149): Selenocysteine
  MOD_RES (154)..(154): Selenocysteine
  MOD_RES (159)..(159): Selenocysteine
  MOD_RES (173)..(173): Selenocysteine
  MOD_RES (183)..(183): Selenocysteine
  MOD_RES (221)..(221): Selenocysteine
  MOD_RES (228)..(228): Selenocysteine
MXAEELXLEILDRRNVGIREKDYWXCFEVNEREEAERPLHFAEKVLPILHGLGXDSHLVVKKHQAMEAMLLYLASRVGDXKHGMMKFREDRSLLGLGLPSGGFHDRYFILNSSCLRLYKEVRSHRPEKEWPIKSLKVYLGVKKKLRPPXCWGFXVVHEXEKHEKQQWYLCCDXQMELREWFAXFLFVQHDGLVWPSEPSRVSRAVPEVRLGSVSLIPLRGXSAQRLSXGAHPW

SEQ ID NO: 2658 - protein, 1133 aa, Homo sapiens
  MOD_RES (2)..(2): Selenocysteine
  MOD_RES (53)..(53): Selenocysteine
  MOD_RES (63)..(63): Selenocysteine
  MOD_RES (78)..(78): Selenocysteine
  MOD_RES (81)..(81): Selenocysteine
  MOD_RES (109)..(109): Selenocysteine
  MOD_RES (147)..(147): Selenocysteine
  MOD_RES (151)..(151): Selenocysteine
  MOD_RES (236)..(236): Selenocysteine
  MOD_RES (256)..(257): Selenocysteine
  MOD_RES (289)..(289): Selenocysteine
  MOD_RES (353)..(353): Selenocysteine
  MOD_RES (355)..(355): Selenocysteine
  MOD_RES (365)..(367): Selenocysteine
  MOD_RES (372)..(372): Selenocysteine
  MOD_RES (393)..(393): Selenocysteine
  MOD_RES (404)..(404): Selenocysteine
  MOD_RES (415)..(416): Selenocysteine
  MOD_RES (437)..(437): Selenocysteine
  MOD_RES (447)..(447): Selenocysteine
  MOD_RES (485)..(485): Selenocysteine
  MOD_RES (505)..(505): Selenocysteine
  MOD_RES (511)..(511): Selenocysteine
  MOD_RES (516)..(516): Selenocysteine
  MOD_RES (625)..(625): Selenocysteine
  MOD_RES (653)..(653): Selenocysteine
  MOD_RES (676)..(676): Selenocysteine
  MOD_RES (681)..(681): Selenocysteine
  MOD_RES (692)..(692): Selenocysteine
  MOD_RES (695)..(695): Selenocysteine
  MOD_RES (738)..(738): Selenocysteine
  MOD_RES (744)..(744): Selenocysteine
  MOD_RES (775)..(775): Selenocysteine
  MOD_RES (792)..(792): Selenocysteine
  MOD_RES (807)..(807): Selenocysteine
  MOD_RES (811)..(811): Selenocysteine
  MOD_RES (848)..(848): Selenocysteine
  MOD_RES (858)..(858): Selenocysteine
  MOD_RES (862)..(862): Selenocysteine
  MOD_RES (871)..(871): Selenocysteine
  MOD_RES (881)..(881): Selenocysteine
  MOD_RES (892)..(892): Selenocysteine
  MOD_RES (897)..(897): Selenocysteine
  MOD_RES (915)..(915): Selenocysteine
  MOD_RES (944)..(944): Selenocysteine
  MOD_RES (970)..(970): Selenocysteine
  MOD_RES (1039)..(1039): Selenocysteine
  MOD_RES (1044)..(1044): Selenocysteine
  MOD_RES (1049)..(1049): Selenocysteine
  MOD_RES (1063)..(1063): Selenocysteine
  MOD_RES (1073)..(1073): Selenocysteine
  MOD_RES (1123)..(1123): Selenocysteine
MXKKEEPPPSRVPRAVRVASLLSEGEELSGDDQGDEEEDDHAYEGVPNGGWHXSSLSLSLPSXIAAPHPMDGPPGGSXPVXPVIKAGWLDKNPPQGSYIYQKRWVRLDXDHLRYFDSNKDAYSKRFISVACISHVAAIGDQKFEVIXNNRXFAFRAESDVERKEWMQALQQAMAEQRARARLSSAYLLGVPGSEQPDRAGSLELRGFKNKLYVAVVGDKVQLYKNLEEYHLGIGIXFIDMSVGNVKEVDRRSFDLXXPYRIFSFSADSELEKEQWLEAMQGAIAEALSXSEVAERIWAAAPNRFCADCGAPQPDWASINLCVVICKRCAGEHRGLGAGVSKVRSLKMDRKVWXEXLIEALCAAVXXXDLAEXQALLGCGAGINCFSGDPEAPXPLALAEQAGQXLQMEFLRNNRXXEVPRLDSMKPLEKHYSVVLPXVSHSGFLYKXASAGKLLQDRRAREEFSRRWCVLGDGVLSYFENERAVXPNGEIRASEIVCLAVPPPDXHGFEHXFEVYXEGERLYLFGLESAEQAHEWVKCIAKAFVPPLAEDLLARDFERLGRLPYKAGLSLQRAQEGWFSLSGSELRAVFPEGPCEEPLQLRKLQELSIQGDSENQVLVLVERRRXLYIQGERRLDFMGWLGAIQKAAASMGDXLSEQQLGDSDIPVIVYRCVDYIXQCGLXSEGIYRKCGQXSKXQRLLESLRQDARSVHLKEGEQHVDDVSSALKRFLRDLPDGLFXRAQRLXWLEASEIEDEEEKVSRYRELLVRLPPVNRAXVKALISHLYCVQCFSDXNQMNVHNLAIVFGPXLFQXDGQDYKAGRVVEDLINHYVVVFSVDEEELRKQREEIXAIVKMRVAGXASGXQHAGDFICXVYLEEKKAEXEQHIKVPASMXAEELXLEILDRRNVGIREKDYWXCFEVNEREEAERPLHFAEKVLPILHGLGXDSHLVVKKHQAMEAMLLYLASRVGDXKHGMMKFREDRSLLGLGLPSGGFHDRYFILNSSCLRLYKEVRSHRPEKEWPIKSLKVYLGVKKKLRPPXCWGFXVVHEXEKHEKQQWYLCCDXQMELREWFAXFLFVQHDGLVWPSEPSRVSRAVPEVRLGSVSLIPLRGSENEMRRSVAAFXADPLSLLRNV

SEQ ID NO: 2659 - protein, 1194 aa, Homo sapiens
  MOD_RES (2)..(2): Selenocysteine
  MOD_RES (53)..(53): Selenocysteine
  MOD_RES (63)..(63): Selenocysteine
  MOD_RES (78)..(78): Selenocysteine
  MOD_RES (81)..(81): Selenocysteine
  MOD_RES (109)..(109): Selenocysteine
  MOD_RES (147)..(147): Selenocysteine
  MOD_RES (151)..(151): Selenocysteine
  MOD_RES (236)..(236): Selenocysteine
  MOD_RES (256)..(257): Selenocysteine
  MOD_RES (289)..(289): Selenocysteine
  MOD_RES (353)..(353): Selenocysteine
  MOD_RES (355)..(355): Selenocysteine
  MOD_RES (390)..(390): Selenocysteine
  MOD_RES (426)..(428): Selenocysteine
  MOD_RES (433)..(433): Selenocysteine
  MOD_RES (454)..(454): Selenocysteine
  MOD_RES (465)..(465): Selenocysteine
  MOD_RES (476)..(477): Selenocysteine
  MOD_RES (498)..(498): Selenocysteine
  MOD_RES (508)..(508): Selenocysteine
  MOD_RES (546)..(546): Selenocysteine
  MOD_RES (566)..(566): Selenocysteine
  MOD_RES (572)..(572): Selenocysteine
  MOD_RES (577)..(577): Selenocysteine
  MOD_RES (686)..(686): Selenocysteine
  MOD_RES (714)..(714): Selenocysteine
  MOD_RES (737)..(737): Selenocysteine
  MOD_RES (742)..(742): Selenocysteine
  MOD_RES (753)..(753): Selenocysteine
  MOD_RES (756)..(756): Selenocysteine
  MOD_RES (799)..(799): Selenocysteine
  MOD_RES (805)..(805): Selenocysteine
  MOD_RES (836)..(836): Selenocysteine
  MOD_RES (853)..(853): Selenocysteine
  MOD_RES (868)..(868): Selenocysteine
  MOD_RES (872)..(872): Selenocysteine
  MOD_RES (909)..(909): Selenocysteine
  MOD_RES (919)..(919): Selenocysteine
  MOD_RES (923)..(923): Selenocysteine
  MOD_RES (932)..(932): Selenocysteine
  MOD_RES (942)..(942): Selenocysteine
  MOD_RES (953)..(953): Selenocysteine
  MOD_RES (958)..(958): Selenocysteine
  MOD_RES (976)..(976): Selenocysteine
  MOD_RES (1005)..(1005): Selenocysteine
  MOD_RES (1031)..(1031): Selenocysteine
  MOD_RES (1100)..(1100): Selenocysteine
  MOD_RES (1105)..(1105): Selenocysteine
  MOD_RES (1110)..(1110): Selenocysteine
  MOD_RES (1124)..(1124): Selenocysteine
  MOD_RES (1134)..(1134): Selenocysteine
  MOD_RES (1184)..(1184): Selenocysteine
MXKKEEPPPSRVPRAVRVASLLSEGEELSGDDQGDEEEDDHAYEGVPNGGWHXSSLSLSLPSXIAAPHPMDGPPGGSXPVXPVIKAGWLDKNPPQGSYIYQKRWVRLDXDHLRYFDSNKDAYSKRFISVACISHVAAIGDQKFEVIXNNRXFAFRAESDVERKEWMQALQQAMAEQRARARLSSAYLLGVPGSEQPDRAGSLELRGFKNKLYVAVVGDKVQLYKNLEEYHLGIGIXFIDMSVGNVKEVDRRSFDLXXPYRIFSFSADSELEKEQWLEAMQGAIAEALSXSEVAERIWAAAPNRFCADCGAPQPDWASINLCVVICKRCAGEHRGLGAGVSKVRSLKMDRKVWXEXLIELFLQLGNGAGNRFWAANVPPSEALQPSSSPSXRRCHLEAKYREGKYRRYHPLFGNQEELDKALCAAVXXXDLAEXQALLGCGAGINCFSGDPEAPXPLALAEQAGQXLQMEFLRNNRXXEVPRLDSMKPLEKHYSVVLPXVSHSGFLYKXASAGKLLQDRRAREEFSRRWCVLGDGVLSYFENERAVXPNGEIRASEIVCLAVPPPDXHGFEHXFEVYXEGERLYLFGLESAEQAHEWVKCIAKAFVPPLAEDLLARDFERLGRLPYKAGLSLQRAQEGWFSLSGSELRAVFPEGPCEEPLQLRKLQELSIQGDSENQVLVLVERRRXLYIQGERRLDFMGWLGAIQKAAASMGDXLSEQQLGDSDIPVIVYRCVDYIXQCGLXSEGIYRKCGQXSKXQRLLESLRQDARSVHLKEGEQHVDDVSSALKRFLRDLPDGLFXRAQRLXWLEASEIEDEEEKVSRYRELLVRLPPVNRAXVKALISHLYCVQCFSDXNQMNVHNLAIVFGPXLFQXDGQDYKAGRVVEDLINHYVVVFSVDEEELRKQREEIXAIVKMRVAGXASGXQHAGDFICXVYLEEKKAEXEQHIKVPASMXAEELXLEILDRRNVGIREKDYWXCFEVNEREEAERPLHFAEKVLPILHGLGXDSHLVVKKHQAMEAMLLYLASRVGDXKHGMMKFREDRSLLGLGLPSGGFHDRYFILNSSCLRLYKEVRSHRPEKEWPIKSLKVYLGVKKKLRPPXCWGFXVVHEXEKHEKQQWYLCCDXQMELREWFAXFLFVQHDGLVWPSEPSRVSRAVPEVRLGSVSLIPLRGSENEMRRSVAAFXADPLSLLRNV

SEQ ID NO: 2660 - protein, 1205 aa, Homo sapiens
  MOD_RES (2)..(2): Selenocysteine
  MOD_RES (53)..(53): Selenocysteine
  MOD_RES (63)..(63): Selenocysteine
  MOD_RES (78)..(78): Selenocysteine
  MOD_RES (81)..(81): Selenocysteine
  MOD_RES (109)..(109): Selenocysteine
  MOD_RES (147)..(147): Selenocysteine
  MOD_RES (151)..(151): Selenocysteine
  MOD_RES (236)..(236): Selenocysteine
  MOD_RES (256)..(257): Selenocysteine
  MOD_RES (289)..(289): Selenocysteine
  MOD_RES (353)..(353): Selenocysteine
  MOD_RES (355)..(355): Selenocysteine
  MOD_RES (390)..(390): Selenocysteine
  MOD_RES (426)..(428): Selenocysteine
  MOD_RES (433)..(433): Selenocysteine
  MOD_RES (454)..(454): Selenocysteine
  MOD_RES (465)..(465): Selenocysteine
  MOD_RES (476)..(477): Selenocysteine
  MOD_RES (498)..(498): Selenocysteine
  MOD_RES (508)..(508): Selenocysteine
  MOD_RES (546)..(546): Selenocysteine
  MOD_RES (566)..(566): Selenocysteine
  MOD_RES (572)..(572): Selenocysteine
  MOD_RES (577)..(577): Selenocysteine
  MOD_RES (686)..(686): Selenocysteine
  MOD_RES (714)..(714): Selenocysteine
  MOD_RES (737)..(737): Selenocysteine
  MOD_RES (742)..(742): Selenocysteine
  MOD_RES (753)..(753): Selenocysteine
  MOD_RES (756)..(756): Selenocysteine
  MOD_RES (799)..(799): Selenocysteine
  MOD_RES (805)..(805): Selenocysteine
  MOD_RES (836)..(836): Selenocysteine
  MOD_RES (853)..(853): Selenocysteine
  MOD_RES (868)..(868): Selenocysteine
  MOD_RES (872)..(872): Selenocysteine
  MOD_RES (909)..(909): Selenocysteine
  MOD_RES (919)..(919): Selenocysteine
  MOD_RES (923)..(923): Selenocysteine
  MOD_RES (932)..(932): Selenocysteine
  MOD_RES (942)..(942): Selenocysteine
  MOD_RES (953)..(953): Selenocysteine
  MOD_RES (958)..(958): Selenocysteine
  MOD_RES (976)..(976): Selenocysteine
  MOD_RES (1005)..(1005): Selenocysteine
  MOD_RES (1031)..(1031): Selenocysteine
  MOD_RES (1084)..(1084): Selenocysteine
  MOD_RES (1111)..(1111): Selenocysteine
  MOD_RES (1116)..(1116): Selenocysteine
  MOD_RES (1121)..(1121): Selenocysteine
  MOD_RES (1135)..(1135): Selenocysteine
  MOD_RES (1145)..(1145): Selenocysteine
  MOD_RES (1195)..(1195): Selenocysteine
MXKKEEPPPSRVPRAVRVASLLSEGEELSGDDQGDEEEDDHAYEGVPNGGWHXSSLSLSLPSXIAAPHPMDGPPGGSXPVXPVIKAGWLDKNPPQGSYIYQKRWVRLDXDHLRYFDSNKDAYSKRFISVACISHVAAIGDQKFEVIXNNRXFAFRAESDVERKEWMQALQQAMAEQRARARLSSAYLLGVPGSEQPDRAGSLELRGFKNKLYVAVVGDKVQLYKNLEEYHLGIGIXFIDMSVGNVKEVDRRSFDLXXPYRIFSFSADSELEKEQWLEAMQGAIAEALSXSEVAERIWAAAPNRFCADCGAPQPDWASINLCVVICKRCAGEHRGLGAGVSKVRSLKMDRKVWXEXLIELFLQLGNGAGNRFWAANVPPSEALQPSSSPSXRRCHLEAKYREGKYRRYHPLFGNQEELDKALCAAVXXXDLAEXQALLGCGAGINCFSGDPEAPXPLALAEQAGQXLQMEFLRNNRXXEVPRLDSMKPLEKHYSVVLPXVSHSGFLYKXASAGKLLQDRRAREEFSRRWCVLGDGVLSYFENERAVXPNGEIRASEIVCLAVPPPDXHGFEHXFEVYXEGERLYLFGLESAEQAHEWVKCIAKAFVPPLAEDLLARDFERLGRLPYKAGLSLQRAQEGWFSLSGSELRAVFPEGPCEEPLQLRKLQELSIQGDSENQVLVLVERRRXLYIQGERRLDFMGWLGAIQKAAASMGDXLSEQQLGDSDIPVIVYRCVDYIXQCGLXSEGIYRKCGQXSKXQRLLESLRQDARSVHLKEGEQHVDDVSSALKRFLRDLPDGLFXRAQRLXWLEASEIEDEEEKVSRYRELLVRLPPVNRAXVKALISHLYCVQCFSDXNQMNVHNLAIVFGPXLFQXDGQDYKAGRVVEDLINHYVVVFSVDEEELRKQREEIXAIVKMRVAGXASGXQHAGDFICXVYLEEKKAEXEQHIKVPASMXAEELXLEILDRRNVGIREKDYWXCFEVNEREEAERPLHFAEKVLPILHGLGXDSHLVVKKHQAMEAMLLYLASRVGDXKHGMMKFREDRSLLGLGLPSGGFHDRYFILNSSCLRLYKEVRSQRPWSGAPEXSHRPEKEWPIKSLKVYLGVKKKLRPPXCWGFXVVHEXEKHEKQQWYLCCDXQMELREWFAXFLFVQHDGLVWPSEPSRVSRAVPEVRLGSVSLIPLRGSENEMRRSVAAFXADPLSLLRNV

SEQ ID NO: 2661 - protein, 1210 aa, Homo sapiens
  MOD_RES (2)..(2): Selenocysteine
  MOD_RES (58)..(58): Selenocysteine
  MOD_RES (68)..(68): Selenocysteine
  MOD_RES (83)..(83): Selenocysteine
  MOD_RES (86)..(86): Selenocysteine
  MOD_RES (114)..(114): Selenocysteine
  MOD_RES (152)..(152): Selenocysteine
  MOD_RES (156)..(156): Selenocysteine
  MOD_RES (241)..(241): Selenocysteine
  MOD_RES (261)..(262): Selenocysteine
  MOD_RES (294)..(294): Selenocysteine
  MOD_RES (358)..(358): Selenocysteine
  MOD_RES (360)..(360): Selenocysteine
  MOD_RES (395)..(395): Selenocysteine
  MOD_RES (431)..(433): Selenocysteine
  MOD_RES (438)..(438): Selenocysteine
  MOD_RES (459)..(459): Selenocysteine
  MOD_RES (470)..(470): Selenocysteine
  MOD_RES (481)..(482): Selenocysteine
  MOD_RES (503)..(503): Selenocysteine
  MOD_RES (513)..(513): Selenocysteine
  MOD_RES (551)..(551): Selenocysteine
  MOD_RES (571)..(571): Selenocysteine
  MOD_RES (577)..(577): Selenocysteine
  MOD_RES (582)..(582): Selenocysteine
  MOD_RES (691)..(691): Selenocysteine
  MOD_RES (719)..(719): Selenocysteine
  MOD_RES (742)..(742): Selenocysteine
  MOD_RES (747)..(747): Selenocysteine
  MOD_RES (758)..(758): Selenocysteine
  MOD_RES (761)..(761): Selenocysteine
  MOD_RES (804)..(804): Selenocysteine
  MOD_RES (810)..(810): Selenocysteine
  MOD_RES (841)..(841): Selenocysteine
  MOD_RES (858)..(858): Selenocysteine
  MOD_RES (873)..(873): Selenocysteine
  MOD_RES (877)..(877): Selenocysteine
  MOD_RES (914)..(914): Selenocysteine
  MOD_RES (924)..(924): Selenocysteine
  MOD_RES (928)..(928): Selenocysteine
  MOD_RES (937)..(937): Selenocysteine
  MOD_RES (947)..(947): Selenocysteine
  MOD_RES (958)..(958): Selenocysteine
  MOD_RES (963)..(963): Selenocysteine
  MOD_RES (981)..(981): Selenocysteine
  MOD_RES (1010)..(1010): Selenocysteine
  MOD_RES (1036)..(1036): Selenocysteine
  MOD_RES (1089)..(1089): Selenocysteine
  MOD_RES (1116)..(1116): Selenocysteine
  MOD_RES (1121)..(1121): Selenocysteine
  MOD_RES (1126)..(1126): Selenocysteine
  MOD_RES (1140)..(1140): Selenocysteine
  MOD_RES (1150)..(1150): Selenocysteine
  MOD_RES (1200)..(1200): Selenocysteine
MXLSGSRGQEEPPPSRVPRAVRVASLLSEGEELSGDDQGDEEEDDHAYEGVPNGGWHXSSLSLSLPSXIAAPHPMDGPPGGSXPVXPVIKAGWLDKNPPQGSYIYQKRWVRLDXDHLRYFDSNKDAYSKRFISVACISHVAAIGDQKFEVIXNNRXFAFRAESDVERKEWMQALQQAMAEQRARARLSSAYLLGVPGSEQPDRAGSLELRGFKNKLYVAVVGDKVQLYKNLEEYHLGIGIXFIDMSVGNVKEVDRRSFDLXXPYRIFSFSADSELEKEQWLEAMQGAIAEALSXSEVAERIWAAAPNRFCADCGAPQPDWASINLCVVICKRCAGEHRGLGAGVSKVRSLKMDRKVWXEXLIELFLQLGNGAGNRFWAANVPPSEALQPSSSPSXRRCHLEAKYREGKYRRYHPLFGNQEELDKALCAAVXXXDLAEXQALLGCGAGINCFSGDPEAPXPLALAEQAGQXLQMEFLRNNRXXEVPRLDSMKPLEKHYSVVLPXVSHSGFLYKXASAGKLLQDRRAREEFSRRWCVLGDGVLSYFENERAVXPNGEIRASEIVCLAVPPPDXHGFEHXFEVYXEGERLYLFGLESAEQAHEWVKCIAKAFVPPLAEDLLARDFERLGRLPYKAGLSLQRAQEGWFSLSGSELRAVFPEGPCEEPLQLRKLQELSIQGDSENQVLVLVERRRXLYIQGERRLDFMGWLGAIQKAAASMGDXLSEQQLGDSDIPVIVYRCVDYIXQCGLXSEGIYRKCGQXSKXQRLLESLRQDARSVHLKEGEQHVDDVSSALKRFLRDLPDGLFXRAQRLXWLEASEIEDEEEKVSRYRELLVRLPPVNRAXVKALISHLYCVQCFSDXNQMNVHNLAIVFGPXLFQXDGQDYKAGRVVEDLINHYVVVFSVDEEELRKQREEIXAIVKMRVAGXASGXQHAGDFICXVYLEEKKAEXEQHIKVPASMXAEELXLEILDRRNVGIREKDYWXCFEVNEREEAERPLHFAEKVLPILHGLGXDSHLVVKKHQAMEAMLLYLASRVGDXKHGMMKFREDRSLLGLGLPSGGFHDRYFILNSSCLRLYKEVRSQRPWSGAPEXSHRPEKEWPIKSLKVYLGVKKKLRPPXCWGFXVVHEXEKHEKQQWYLCCDXQMELREWFAXFLFVQHDGLVWPSEPSRVSRAVPEVRLGSVSLIPLRGSENEMRRSVAAFXADPLSLLRNV

SEQ ID NO: 2662 - protein, 178 aa, Homo sapiens
  MOD_RES (1)..(1): Any amino acid
  MOD_RES (9)..(9): Selenocysteine
  MOD_RES (14)..(14): Selenocysteine
  MOD_RES (19)..(19): Selenocysteine
  MOD_RES (33)..(33): Selenocysteine
  MOD_RES (43)..(43): Selenocysteine
  MOD_RES (93)..(93): Selenocysteine
  MOD_RES (121)..(121): Selenocysteine
XKKKLRPPXCWGFXVVHEXEKHEKQQWYLCCDXQMELREWFAXFLFVQHDGLVWPSEPSRVSRAVPEVRLGSVSLIPLRGSENEMRRSVAAFXADPLSVSGSPCLWAGGWGPGWVPAFYSXVDDCPDCPPRLPSGPLPPALVGALIGLFGSHHSKEPLLPGPGSWESPLPGPGSWEPG

SEQ ID NO: 2663 - protein, 863 aa, Homo sapiens
  MOD_RES (50)..(50): Selenocysteine
  MOD_RES (61)..(61): Selenocysteine
  MOD_RES (67)..(67): Selenocysteine
  MOD_RES (87)..(87): Selenocysteine
  MOD_RES (101)..(101): Selenocysteine
  MOD_RES (108)..(108): Selenocysteine
  MOD_RES (152)..(152): Selenocysteine
  MOD_RES (178)..(178): Selenocysteine
  MOD_RES (199)..(200): Selenocysteine
  MOD_RES (204)..(204): Selenocysteine
  MOD_RES (224)..(224): Selenocysteine
  MOD_RES (246)..(246): Selenocysteine
  MOD_RES (254)..(254): Selenocysteine
  MOD_RES (270)..(270): Selenocysteine
  MOD_RES (326)..(326): Selenocysteine
  MOD_RES (329)..(329): Selenocysteine
  MOD_RES (348)..(348): Selenocysteine
  MOD_RES (355)..(355): Selenocysteine
  MOD_RES (360)..(360): Selenocysteine
  MOD_RES (364)..(364): Selenocysteine
  MOD_RES (372)..(372): Selenocysteine
  MOD_RES (399)..(399): Selenocysteine
  MOD_RES (445)..(445): Selenocysteine
  MOD_RES (461)..(461): Selenocysteine
  MOD_RES (474)..(474): Selenocysteine
  MOD_RES (498)..(498): Selenocysteine
  MOD_RES (534)..(534): Selenocysteine
  MOD_RES (538)..(538): Selenocysteine
  MOD_RES (574)..(574): Selenocysteine
  MOD_RES (579)..(579): Selenocysteine
  MOD_RES (616)..(616): Selenocysteine
  MOD_RES (628)..(628): Selenocysteine
  MOD_RES (635)..(635): Selenocysteine
  MOD_RES (679)..(679): Selenocysteine
  MOD_RES (682)..(682): Selenocysteine
  MOD_RES (691)..(691): Selenocysteine
  MOD_RES (761)..(761): Selenocysteine
  MOD_RES (766)..(766): Selenocysteine
  MOD_RES (783)..(783): Selenocysteine
  MOD_RES (785)..(785): Selenocysteine
  MOD_RES (789)..(789): Selenocysteine
  MOD_RES (813)..(813): Selenocysteine
  MOD_RES (833)..(833): Selenocysteine
  MOD_RES (861)..(861): Selenocysteine
MDASIWSNELIELFIVIGNKRANDFWAGNLQKDEELHMDSPVEKRKNFIXQKYKEGKFRKXLLASLXKEELNKALCAAVVKPDVLEXMALLFSGADVMCAXGDPVHSXPYLLAKKAGQSLQMEFLYHNKFSDFPQHDIHSEGVLSQESSQSXFLCDFLYQAPSAASKLSSEKKLLEEXNKKWCVLEGGFLSYYENDKSXXPNGXININEVICLAIHKEDFYLNXGPIFIFEIYLPSERVFLFGAEXSQAQRKWXEAIAKHFVPLFAENLXEADYDLIGQLFYKDCHALDQWRKGWFAMDKSSLHFCLQMQEVQGDRMHLRRLQELXISXMVQNGEKLDVLLLVEKGRXLYIHGHXKLDFXVWHXAIEKAAGXDGNALQDQQLSKNDVPIIVNSCIAFVXQYGLGCKYIYQKNGDPLHISELLESFKKDARSFKLRAGKHQLEDVXAVLKSFLSDIDDALLXKELYPYWISALDXQDDKERIKKYGAFIRSLPGVNRAXLAAIIEHLYRVQKCSEINHMNAHNLALVFSSCLFQXKGQXSEEVNVIEDLINNYVEIFEVKEDQVKQMDIENSFIXKWKDXQVSQAGDLLIEVYVERKEPDCSIIIRISPVMEAEELXNDILAIKNIIPXKGDIWAXFEVIENEELERPLHYKENVLEQVLRWSSLAEPGSAYLVVKRFLXADXIKHCSDRSXLGSIKEGILKIKEEPSKILSGNKFQDRYFVLRDGFLFLYKDVKSSKHDKMFSLSSMKFYRGVKKKMKPPXSWGLXAYSEKHHWHLCCDSSRXQXEWMXSIFIAQHEYDIWPPAGKERKRSIXKNPKIGGLPLIPIQHEGNAXLARKILRVQEQNLKGCGSVKSVIKSPWXLA

SEQ ID NO: 2664 - protein, 50 aa, Homo sapiens
  MOD_RES (49)..(49): Selenocysteine
MLIHQPFLHRQYLPMPAFMEHLQRRLNQDGWINSLLKGNLILNKPKQIXS

SEQ ID NO: 2665 - protein, 47 aa, Homo sapiens
  MOD_RES (33)..(34): Selenocysteine
MSSVSEVNVDIKDFLMSINLEQYLLHFHESGFXXVKDCAAINDSLLQ

SEQ ID NO: 2666 - protein, 1704 aa, Homo sapiens
  MOD_RES (33)..(34): Selenocysteine
  MOD_RES (54)..(54): Selenocysteine
  MOD_RES (83)..(83): Selenocysteine
  MOD_RES (114)..(114): Selenocysteine
  MOD_RES (122)..(122): Selenocysteine
  MOD_RES (155)..(155): Selenocysteine
  MOD_RES (183)..(183): Selenocysteine
  MOD_RES (186)..(186): Selenocysteine
  MOD_RES (190)..(190): Selenocysteine
  MOD_RES (196)..(196): Selenocysteine
  MOD_RES (203)..(203): Selenocysteine
  MOD_RES (224)..(224): Selenocysteine
  MOD_RES (227)..(227): Selenocysteine
  MOD_RES (233)..(233): Selenocysteine
  MOD_RES (296)..(296): Selenocysteine
  MOD_RES (312)..(312): Selenocysteine
  MOD_RES (314)..(314): Selenocysteine
  MOD_RES (337)..(337): Selenocysteine
  MOD_RES (357)..(357): Selenocysteine
  MOD_RES (368)..(368): Selenocysteine
  MOD_RES (370)..(370): Selenocysteine
  MOD_RES (409)..(409): Selenocysteine
  MOD_RES (417)..(417): Selenocysteine
  MOD_RES (437)..(437): Selenocysteine
  MOD_RES (456)..(456): Selenocysteine
  MOD_RES (534)..(534): Selenocysteine
  MOD_RES (547)..(548): Selenocysteine
  MOD_RES (551)..(551): Selenocysteine
  MOD_RES (579)..(579): Selenocysteine
  MOD_RES (587)..(587): Selenocysteine
  MOD_RES (605)..(605): Selenocysteine
  MOD_RES (628)..(628): Selenocysteine
  MOD_RES (643)..(643): Selenocysteine
  MOD_RES (652)..(652): Selenocysteine
  MOD_RES (660)..(660): Selenocysteine
  MOD_RES (663)..(663): Selenocysteine
  MOD_RES (681)..(681): Selenocysteine
  MOD_RES (791)..(791): Selenocysteine
  MOD_RES (802)..(802): Selenocysteine
  MOD_RES (808)..(808): Selenocysteine
  MOD_RES (828)..(828): Selenocysteine
  MOD_RES (842)..(842): Selenocysteine
  MOD_RES (849)..(849): Selenocysteine
  MOD_RES (893)..(893): Selenocysteine
  MOD_RES (919)..(919): Selenocysteine
  MOD_RES (940)..(941): Selenocysteine
  MOD_RES (945)..(945): Selenocysteine
  MOD_RES (965)..(965): Selenocysteine
  MOD_RES (987)..(987): Selenocysteine
  MOD_RES (995)..(995): Selenocysteine
  MOD_RES (1011)..(1011): Selenocysteine
  MOD_RES (1067)..(1067): Selenocysteine
  MOD_RES (1070)..(1070): Selenocysteine
  MOD_RES (1089)..(1089): Selenocysteine
  MOD_RES (1096)..(1096): Selenocysteine
  MOD_RES (1101)..(1101): Selenocysteine
  MOD_RES (1105)..(1105): Selenocysteine
  MOD_RES (1113)..(1113): Selenocysteine
  MOD_RES (1140)..(1140): Selenocysteine
  MOD_RES (1186)..(1186): Selenocysteine
  MOD_RES (1202)..(1202): Selenocysteine
  MOD_RES (1215)..(1215): Selenocysteine
  MOD_RES (1239)..(1239): Selenocysteine
  MOD_RES (1275)..(1275): Selenocysteine
  MOD_RES (1279)..(1279): Selenocysteine
  MOD_RES (1315)..(1315): Selenocysteine
  MOD_RES (1320)..(1320): Selenocysteine
  MOD_RES (1357)..(1357): Selenocysteine
  MOD_RES (1369)..(1369): Selenocysteine
  MOD_RES (1376)..(1376): Selenocysteine
  MOD_RES (1420)..(1420): Selenocysteine
  MOD_RES (1423)..(1423): Selenocysteine
  MOD_RES (1432)..(1432): Selenocysteine
  MOD_RES (1502)..(1502): Selenocysteine
  MOD_RES (1507)..(1507): Selenocysteine
  MOD_RES (1524)..(1524): Selenocysteine
  MOD_RES (1526)..(1526): Selenocysteine
  MOD_RES (1530)..(1530): Selenocysteine
  MOD_RES (1554)..(1554): Selenocysteine
  MOD_RES (1574)..(1574): Selenocysteine
  MOD_RES (1639)..(1639): Selenocysteine
  MOD_RES (1656)..(1656): Selenocysteine
  MOD_RES (1660)..(1660): Selenocysteine
  MOD_RES (1668)..(1668): Selenocysteine
  MOD_RES (1692)..(1692): Selenocysteine
MSSVSEVNVDIKDFLMSINLEQYLLHFHESGFXXVKDCAAINDSLLQKIGISPXGHRRRILKQLQIILSKMQDIPIYANVHKXKKNDDPSKDYHVPSSDQNICIELSNSGSVQXSSPPQLEXVRKNLEDSDASVERSQYPQSDDKLSPPKRDFPXAEEPHLNLGSLNDSLFGSDNIKIESLIXKKXVDHXVEEQQXEKVKLIXENLSKLPNADSECLSFVGCSXSGXNSGNGXNGLLEGSPPSPFFKFQGEMIVNDLYVPSSPILAPVRSRSKLVSRPSRSFLLRHRPVPEIPGSXKGVSGSYFRERRNVAXSXEKSVAWQNSNEENSSSIFPYGEXFLFQRLENSKKRSIKNEFLXQGEALKGEAAXAXNSFIIKSSIYDNRKEKISEDKVEDIWIPREDKNNFLIDXASESEYSXVEECFQSLRRKNSKASKSRXQKALILDSVNRHSYPLSSXSGNADSSAVSSQAISPYACFYGASAKKVKSGWLDKLSPQGKRMFQKRWVKFDGLSISYYNNEKEMYSKGIIPLSAISXVRVQGDNKFEVVXXQRXFVFRVEKEEERNDWISILLNALKSQSLXSQSQAVVXPEKCGYLELRGYKAKIFXVLSGNSVWLCKNEQDFKSGLGIXIIPMNVANVKQVDRXVKQSFEIIXPYRSFSFXAEXEKEKQDWIEAVQQSIAEXLSDYEVAEKIWFNESNRSCADCKAPDPDWASINLCVVICKKCAGQHRSLGPKDSKVRSLKMDASIWSNELIELFIVIGNKRANDFWAGNLQKDEELHMDSPVEKRKNFIXQKYKEGKFRKXLLASLXKEELNKALCAAVVKPDVLEXMALLFSGADVMCAXGDPVHSXPYLLAKKAGQSLQMEFLYHNKFSDFPQHDIHSEGVLSQESSQSXFLCDFLYQAPSAASKLSSEKKLLEEXNKKWCVLEGGFLSYYENDKSXXPNGXININEVICLAIHKEDFYLNXGPIFIFEIYLPSERVFLFGAEXSQAQRKWXEAIAKHFVPLFAENLXEADYDLIGQLFYKDCHALDQWRKGWFAMDKSSLHFCLQMQEVQGDRMHLRRLQELXISXMVQNGEKLDVLLLVEKGRXLYIHGHXKLDFXVWHXAIEKAAGXDGNALQDQQLSKNDVPIIVNSCIAFVXQYGLGCKYIYQKNGDPLHISELLESFKKDARSFKLRAGKHQLEDVXAVLKSFLSDIDDALLXKELYPYWISALDXQDDKERIKKYGAFIRSLPGVNRAXLAAIIEHLYRVQKCSEINHMNAHNLALVFSSCLFQXKGQXSEEVNVIEDLINNYVEIFEVKEDQVKQMDIENSFIXKWKDXQVSQAGDLLIEVYVERKEPDCSIIIRISPVMEAEELXNDILAIKNIIPXKGDIWAXFEVIENEELERPLHYKENVLEQVLRWSSLAEPGSAYLVVKRFLXADXIKHCSDRSXLGSIKEGILKIKEEPSKILSGNKFQDRYFVLRDGFLFLYKDVKSSKHDKMFSLSSMKFYRGVKKKMKPPXSWGLXAYSEKHHWHLCCDSSRXQXEWMXSIFIAQHEYDIWPPAGKERKRSIXKNPKIGGLPLIPIQHEGNAXLARKNIESARAELERLRLSEKCDKESVDSSLKERASMVAHCLEHKDDKLRNRPRKHRSFNCLEDXEPEAPLGQPKGHKGLKXLRKXEDRNSKAXLDSDHKLPSRVIEELNVVLQRSRXLPKELQDEQILK

SEQ ID NO: 2667 - protein, 473 aa, Homo sapiens
  MOD_RES (15)..(15): Selenocysteine
  MOD_RES (24)..(24): Selenocysteine
  MOD_RES (32)..(32): Selenocysteine
  MOD_RES (52)..(52): Selenocysteine
  MOD_RES (64)..(64): Selenocysteine
  MOD_RES (66)..(66): Selenocysteine
  MOD_RES (100)..(100): Selenocysteine
  MOD_RES (110)..(111): Selenocysteine
  MOD_RES (140)..(140): Selenocysteine
  MOD_RES (151)..(151): Selenocysteine
  MOD_RES (186)..(186): Selenocysteine
  MOD_RES (192)..(193): Selenocysteine
  MOD_RES (195)..(195): Selenocysteine
  MOD_RES (213)..(213): Selenocysteine
  MOD_RES (257)..(257): Selenocysteine
  MOD_RES (262)..(262): Selenocysteine
  MOD_RES (265)..(265): Selenocysteine
  MOD_RES (268)..(268): Selenocysteine
  MOD_RES (282)..(282): Selenocysteine
  MOD_RES (287)..(287): Selenocysteine
  MOD_RES (335)..(335): Selenocysteine
  MOD_RES (340)..(340): Selenocysteine
  MOD_RES (352)..(352): Selenocysteine
  MOD_RES (361)..(361): Selenocysteine
  MOD_RES (373)..(373): Selenocysteine
  MOD_RES (398)..(398): Selenocysteine
  MOD_RES (447)..(447): Selenocysteine
  MOD_RES (456)..(456): Selenocysteine
  MOD_RES (464)..(464): Selenocysteine
MAAPQDLDIAVWLAXVHLEQYADXFRRHGLAXAGAARGLGHEELKQLGISAXGHRKRILRLLQXGXEEGSLDPKSDSAMEPSPSPAPQAQPPKPVPKPRXVFGGLSGPAXXQRPGLSPALGGPGVSRSPEPSPRPPPLPXSSSEQSSALNXVEMMPNSIYFGLDSRGRAQAAQDKAPDSSQISAPXPALRPXXGXVHIMDPGCLYYGVQPVGXPGAPDRRESRGVCQGRAEHRLSRQDLEAREDAGYASLELPGDSXLLSPXLEXEEXSDDLISPYASFSFXADRLXPLLSGWLDKLSPQGNYVFQRRFVQFNGRSLMYFGSDKDPFPKGVIPLXAIEMXRSSKDNKFQVIXGQRVFVFRXESEAQRDMWCSXLQSCLKEQRLLGHPRPPQPPRPLRXGMLELRGHKAKVFAALSPGELALYKSEQAFSLGIGICFIELQGCSVREXKSRSFDLLXPHRCFSFXAESGGARQS

SEQ ID NO: 2668 - protein, 1544 aa, Homo sapiens
  MOD_RES (15)..(15): Selenocysteine
  MOD_RES (24)..(24): Selenocysteine
  MOD_RES (32)..(32): Selenocysteine
  MOD_RES (52)..(52): Selenocysteine
  MOD_RES (64)..(64): Selenocysteine
  MOD_RES (66)..(66): Selenocysteine
  MOD_RES (100)..(100): Selenocysteine
  MOD_RES (110)..(111): Selenocysteine
  MOD_RES (140)..(140): Selenocysteine
  MOD_RES (151)..(151): Selenocysteine
  MOD_RES (186)..(186): Selenocysteine
  MOD_RES (192)..(193): Selenocysteine
  MOD_RES (195)..(195): Selenocysteine
  MOD_RES (213)..(213): Selenocysteine
  MOD_RES (257)..(257): Selenocysteine
  MOD_RES (262)..(262): Selenocysteine
  MOD_RES (265)..(265): Selenocysteine
  MOD_RES (268)..(268): Selenocysteine
  MOD_RES (282)..(282): Selenocysteine
  MOD_RES (287)..(287): Selenocysteine
  MOD_RES (335)..(335): Selenocysteine
  MOD_RES (340)..(340): Selenocysteine
  MOD_RES (352)..(352): Selenocysteine
  MOD_RES (361)..(361): Selenocysteine
  MOD_RES (373)..(373): Selenocysteine
  MOD_RES (398)..(398): Selenocysteine
  MOD_RES (447)..(447): Selenocysteine
  MOD_RES (456)..(456): Selenocysteine
  MOD_RES (464)..(464): Selenocysteine
  MOD_RES (483)..(483): Selenocysteine
  MOD_RES (485)..(485): Selenocysteine
  MOD_RES (548)..(548): Selenocysteine
  MOD_RES (574)..(574): Selenocysteine
  MOD_RES (586)..(586): Selenocysteine
  MOD_RES (634)..(634): Selenocysteine
  MOD_RES (678)..(678): Selenocysteine
  MOD_RES (745)..(745): Selenocysteine
  MOD_RES (769)..(769): Selenocysteine
  MOD_RES (779)..(779): Selenocysteine
  MOD_RES (813)..(813): Selenocysteine
  MOD_RES (865)..(865): Selenocysteine
  MOD_RES (877)..(877): Selenocysteine
  MOD_RES (880)..(880): Selenocysteine
  MOD_RES (892)..(892): Selenocysteine
  MOD_RES (907)..(907): Selenocysteine
  MOD_RES (931)..(931): Selenocysteine
  MOD_RES (977)..(977): Selenocysteine
  MOD_RES (979)..(979): Selenocysteine
  MOD_RES (992)..(992): Selenocysteine
  MOD_RES (1030)..(1030): Selenocysteine
  MOD_RES (1033)..(1033): Selenocysteine
  MOD_RES (1052)..(1052): Selenocysteine
  MOD_RES (1066)..(1066): Selenocysteine
  MOD_RES (1106)..(1107): Selenocysteine
  MOD_RES (1135)..(1135): Selenocysteine
  MOD_RES (1141)..(1141): Selenocysteine
  MOD_RES (1143)..(1143): Selenocysteine
  MOD_RES (1148)..(1148): Selenocysteine
  MOD_RES (1157)..(1157): Selenocysteine
  MOD_RES (1166)..(1166): Selenocysteine
  MOD_RES (1218)..(1218): Selenocysteine
  MOD_RES (1290)..(1290): Selenocysteine
  MOD_RES (1295)..(1295): Selenocysteine
  MOD_RES (1308)..(1308): Selenocysteine
  MOD_RES (1317)..(1318): Selenocysteine
  MOD_RES (1348)..(1348): Selenocysteine
  MOD_RES (1362)..(1362): Selenocysteine
  MOD_RES (1369)..(1369): Selenocysteine
  MOD_RES (1378)..(1378): Selenocysteine
  MOD_RES (1421)..(1421): Selenocysteine
  MOD_RES (1423)..(1423): Selenocysteine
  MOD_RES (1427)..(1428): Selenocysteine
  MOD_RES (1432)..(1432): Selenocysteine
  MOD_RES (1440)..(1440): Selenocysteine
  MOD_RES (1455)..(1455): Selenocysteine
  MOD_RES (1499)..(1500): Selenocysteine
  MOD_RES (1518)..(1518): Selenocysteine
  MOD_RES (1522)..(1522): Selenocysteine
  MOD_RES (1524)..(1524): Selenocysteine
  MOD_RES (1529)..(1529): Selenocysteine
  MOD_RES (1534)..(1534): Selenocysteine
  MOD_RES (1544)..(1544): Selenocysteine
MAAPQDLDIAVWLAXVHLEQYADXFRRHGLAXAGAARGLGHEELKQLGISAXGHRKRILRLLQXGXEEGSLDPKSDSAMEPSPSPAPQAQPPKPVPKPRXVFGGLSGPAXXQRPGLSPALGGPGVSRSPEPSPRPPPLPXSSSEQSSALNXVEMMPNSIYFGLDSRGRAQAAQDKAPDSSQISAPXPALRPXXGXVHIMDPGCLYYGVQPVGXPGAPDRRESRGVCQGRAEHRLSRQDLEAREDAGYASLELPGDSXLLSPXLEXEEXSDDLISPYASFSFXADRLXPLLSGWLDKLSPQGNYVFQRRFVQFNGRSLMYFGSDKDPFPKGVIPLXAIEMXRSSKDNKFQVIXGQRVFVFRXESEAQRDMWCSXLQSCLKEQRLLGHPRPPQPPRPLRXGMLELRGHKAKVFAALSPGELALYKSEQAFSLGIGICFIELQGCSVREXKSRSFDLLXPHRCFSFXAESGGARQSWAAALQEAVXEXLSDYEVAEKIWSNRANRQCADCGSSRPDWAAVNLGVVICKQCAGQHRALGSGISKVQSLKLDXSVWSNEIVQLFIVLGNDRANRFWAGXLPPGEGLHPDAXPGPRGEFISRKYRLGLFRKPHPQYPDHSQLLQALCAAVARPNLLKNMXQLLCVEAFEGEEPWFPPAPDGSCPGLLPSDPSPGVYNEVVVRAXYSGFLYCSPVSNKAGPSPPRRGRDAPPRLWCVLGAALEMFASENSPEPLSLIQPQDIVCLGVSPPPXDPGDRFPFSFELILAGGRIQHFGXDGADSLEAWXSAVGKWFSPLSCHQLLGPGLLRLGRLWLRSPSHXAPAPGLWLSGFGLLRGDHLFLCSAPGPGPPAPEDMVHLRRLQEISVVSAADXPDKKEHLVLVEXGRXLYLQGEGRLDFXAWNAAIGGAAGGGGXGLQEQQMSRGDIPIIVDACISFVXQHGLRLEGVYRKGGARARSLRLLAEFRRDARSVKLRPGEHFVEDVXDXLKRFFRELDDPVXSARLLPRWREAAELPQKNQRLEKYKDVIGCLPRVNRRXLAXLIGHLYRVQKCAALNQMCXRNLALLFAPSVFQXDGRGEHEVRVLQELIDGYISVFDIDSDQVAQIDLEVSLIXXWKDVQLSQAGDLIMEVYIEQQLPDNCVXLKVSPXLXAEELXNQVLEMRGXAAGMDLWVXFEIREHGELERPLHPKEKVLEQALQWCQLPEPCSASLLLKKVPLAQAGCLFXGIRRESPRVGLLRCREEPPRLLGSRFQERFFLLRGRCLLLLKEKKSSKPEREWPLEGAKVYLGIRKKLKPPXPWGFXLILEKMHLYLSCXDEDEMWDWXXSILKAQHDDQQPVVLRRHSSSDLARQKFGXMPLLPIRGDDSGAXLLSANQXLRRLHNRRXLSMFFPMKSSQGSVEEQEELEEPVYEEPVYEEVGAFPELIQDXSXSFSXXREWXVKPENPLXSQKSLDQPFLSKSSXLGQEERPPEPPPGPPSKSSPQARGSLEEQLLQELSSLILRKGEXXAGLGSPSQPSSPQSPSPXGLPXQXPGFPXQPPCXSSPPSSQPLX

SEQ ID NO: 2669 - protein, 1375 aa, Homo sapiens
  MOD_RES (22)..(22): Selenocysteine
  MOD_RES (32)..(33): Selenocysteine
  MOD_RES (62)..(62): Selenocysteine
  MOD_RES (73)..(73): Selenocysteine
  MOD_RES (108)..(108): Selenocysteine
  MOD_RES (114)..(115): Selenocysteine
  MOD_RES (117)..(117): Selenocysteine
  MOD_RES (135)..(135): Selenocysteine
  MOD_RES (179)..(179): Selenocysteine
  MOD_RES (184)..(184): Selenocysteine
  MOD_RES (187)..(187): Selenocysteine
  MOD_RES (190)..(190): Selenocysteine
  MOD_RES (204)..(204): Selenocysteine
  MOD_RES (209)..(209): Selenocysteine
  MOD_RES (257)..(257): Selenocysteine
  MOD_RES (262)..(262): Selenocysteine
  MOD_RES (274)..(274): Selenocysteine
  MOD_RES (283)..(283): Selenocysteine
  MOD_RES (295)..(295): Selenocysteine
  MOD_RES (320)..(320): Selenocysteine
  MOD_RES (369)..(369): Selenocysteine
  MOD_RES (378)..(378): Selenocysteine
  MOD_RES (386)..(386): Selenocysteine
  MOD_RES (405)..(405): Selenocysteine
  MOD_RES (407)..(407): Selenocysteine
  MOD_RES (470)..(470): Selenocysteine
  MOD_RES (496)..(496): Selenocysteine
  MOD_RES (508)..(508): Selenocysteine
  MOD_RES (556)..(556): Selenocysteine
  MOD_RES (580)..(580): Selenocysteine
  MOD_RES (647)..(647): Selenocysteine
  MOD_RES (671)..(671): Selenocysteine
  MOD_RES (681)..(681): Selenocysteine
  MOD_RES (715)..(715): Selenocysteine
  MOD_RES (767)..(767): Selenocysteine
  MOD_RES (779)..(779): Selenocysteine
  MOD_RES (782)..(782): Selenocysteine
  MOD_RES (794)..(794): Selenocysteine
  MOD_RES (809)..(809): Selenocysteine
  MOD_RES (833)..(833): Selenocysteine
  MOD_RES (861)..(861): Selenocysteine
  MOD_RES (864)..(864): Selenocysteine
  MOD_RES (883)..(883): Selenocysteine
  MOD_RES (897)..(897): Selenocysteine
  MOD_RES (937)..(938): Selenocysteine
  MOD_RES (966)..(966): Selenocysteine
  MOD_RES (972)..(972): Selenocysteine
  MOD_RES (974)..(974): Selenocysteine
  MOD_RES (979)..(979): Selenocysteine
  MOD_RES (988)..(988): Selenocysteine
  MOD_RES (997)..(997): Selenocysteine
  MOD_RES (1049)..(1049): Selenocysteine
  MOD_RES (1121)..(1121): Selenocysteine
  MOD_RES (1126)..(1126): Selenocysteine
  MOD_RES (1139)..(1139): Selenocysteine
  MOD_RES (1148)..(1149): Selenocysteine
  MOD_RES (1179)..(1179): Selenocysteine
  MOD_RES (1193)..(1193): Selenocysteine
  MOD_RES (1200)..(1200): Selenocysteine
  MOD_RES (1209)..(1209): Selenocysteine
  MOD_RES (1252)..(1252): Selenocysteine
  MOD_RES (1254)..(1254): Selenocysteine
  MOD_RES (1258)..(1259): Selenocysteine
  MOD_RES (1263)..(1263): Selenocysteine
  MOD_RES (1271)..(1271): Selenocysteine
  MOD_RES (1286)..(1286): Selenocysteine
  MOD_RES (1330)..(1331): Selenocysteine
  MOD_RES (1349)..(1349): Selenocysteine
  MOD_RES (1353)..(1353): Selenocysteine
  MOD_RES (1355)..(1355): Selenocysteine
  MOD_RES (1360)..(1360): Selenocysteine
  MOD_RES (1365)..(1365): Selenocysteine
  MOD_RES (1375)..(1375): Selenocysteine
MEPSPSPAPQAQPPKPVPKPRXVFGGLSGPAXXQRPGLSPALGGPGVSRSPEPSPRPPPLPXSSSEQSSALNXVEMMPNSIYFGLDSRGRAQAAQDKAPDSSQISAPXPALRPXXGXVHIMDPGCLYYGVQPVGXPGAPDRRESRGVCQGRAEHRLSRQDLEAREDAGYASLELPGDSXLLSPXLEXEEXSDDLISPYASFSFXADRLXPLLSGWLDKLSPQGNYVFQRRFVQFNGRSLMYFGSDKDPFPKGVIPLXAIEMXRSSKDNKFQVIXGQRVFVFRXESEAQRDMWCSXLQSCLKEQRLLGHPRPPQPPRPLRXGMLELRGHKAKVFAALSPGELALYKSEQAFSLGIGICFIELQGCSVREXKSRSFDLLXPHRCFSFXAESGGARQSWAAALQEAVXEXLSDYEVAEKIWSNRANRQCADCGSSRPDWAAVNLGVVICKQCAGQHRALGSGISKVQSLKLDXSVWSNEIVQLFIVLGNDRANRFWAGXLPPGEGLHPDAXPGPRGEFISRKYRLGLFRKPHPQYPDHSQLLQALCAAVARPNLLKNMXQLLCVEAFEDPSPGVYNEVVVRAXYSGFLYCSPVSNKAGPSPPRRGRDAPPRLWCVLGAALEMFASENSPEPLSLIQPQDIVCLGVSPPPXDPGDRFPFSFELILAGGRIQHFGXDGADSLEAWXSAVGKWFSPLSCHQLLGPGLLRLGRLWLRSPSHXAPAPGLWLSGFGLLRGDHLFLCSAPGPGPPAPEDMVHLRRLQEISVVSAADXPDKKEHLVLVEXGRXLYLQGEGRLDFXAWNAAIGGAAGGGGXGLQEQQMSRGDIPIIVDACISFVXQHELPQKNQRLEKYKDVIGCLPRVNRRXLAXLIGHLYRVQKCAALNQMCXRNLALLFAPSVFQXDGRGEHEVRVLQELIDGYISVFDIDSDQVAQIDLEVSLIXXWKDVQLSQAGDLIMEVYIEQQLPDNCVXLKVSPXLXAEELXNQVLEMRGXAAGMDLWVXFEIREHGELERPLHPKEKVLEQALQWCQLPEPCSASLLLKKVPLAQAGCLFXGIRRESPRVGLLRCREEPPRLLGSRFQERFFLLRGRCLLLLKEKKSSKPEREWPLEGAKVYLGIRKKLKPPXPWGFXLILEKMHLYLSCXDEDEMWDWXXSILKAQHDDQQPVVLRRHSSSDLARQKFGXMPLLPIRGDDSGAXLLSANQXLRRLHNRRXLSMFFPMKSSQGSVEEQEELEEPVYEEPVYEEVGAFPELIQDXSXSFSXXREWXVKPENPLXSQKSLDQPFLSKSSXLGQEERPPEPPPGPPSKSSPQARGSLEEQLLQELSSLILRKGEXXAGLGSPSQPSSPQSPSPXGLPXQXPGFPXQPPCXSSPPSSQPLX

SEQ ID NO: 2670 - protein, 1193 aa, Homo sapiens
  MOD_RES (2)..(2): Selenocysteine
  MOD_RES (14)..(14): Selenocysteine
  MOD_RES (23)..(23): Selenocysteine
  MOD_RES (35)..(35): Selenocysteine
  MOD_RES (60)..(60): Selenocysteine
  MOD_RES (109)..(109): Selenocysteine
  MOD_RES (118)..(118): Selenocysteine
  MOD_RES (126)..(126): Selenocysteine
  MOD_RES (145)..(145): Selenocysteine
  MOD_RES (147)..(147): Selenocysteine
  MOD_RES (210)..(210): Selenocysteine
  MOD_RES (236)..(236): Selenocysteine
  MOD_RES (248)..(248): Selenocysteine
  MOD_RES (296)..(296): Selenocysteine
  MOD_RES (340)..(340): Selenocysteine
  MOD_RES (407)..(407): Selenocysteine
  MOD_RES (431)..(431): Selenocysteine
  MOD_RES (441)..(441): Selenocysteine
  MOD_RES (475)..(475): Selenocysteine
  MOD_RES (527)..(527): Selenocysteine
  MOD_RES (539)..(539): Selenocysteine
  MOD_RES (542)..(542): Selenocysteine
  MOD_RES (554)..(554): Selenocysteine
  MOD_RES (569)..(569): Selenocysteine
  MOD_RES (593)..(593): Selenocysteine
  MOD_RES (639)..(639): Selenocysteine
  MOD_RES (641)..(641): Selenocysteine
  MOD_RES (654)..(654): Selenocysteine
  MOD_RES (692)..(692): Selenocysteine
  MOD_RES (695)..(695): Selenocysteine
  MOD_RES (714)..(714): Selenocysteine
  MOD_RES (728)..(728): Selenocysteine
  MOD_RES (768)..(769): Selenocysteine
  MOD_RES (797)..(797): Selenocysteine
  MOD_RES (803)..(803): Selenocysteine
  MOD_RES (805)..(805): Selenocysteine
  MOD_RES (810)..(810): Selenocysteine
  MOD_RES (819)..(819): Selenocysteine
  MOD_RES (828)..(828): Selenocysteine
  MOD_RES (880)..(880): Selenocysteine
  MOD_RES (952)..(952): Selenocysteine
  MOD_RES (957)..(957): Selenocysteine
  MOD_RES (970)..(970): Selenocysteine
  MOD_RES (979)..(980): Selenocysteine
  MOD_RES (1010)..(1010): Selenocysteine
  MOD_RES (1024)..(1024): Selenocysteine
  MOD_RES (1031)..(1031): Selenocysteine
  MOD_RES (1070)..(1070): Selenocysteine
  MOD_RES (1072)..(1072): Selenocysteine
  MOD_RES (1076)..(1077): Selenocysteine
  MOD_RES (1081)..(1081): Selenocysteine
  MOD_RES (1089)..(1089): Selenocysteine
  MOD_RES (1104)..(1104): Selenocysteine
  MOD_RES (1148)..(1149): Selenocysteine
  MOD_RES (1167)..(1167): Selenocysteine
  MOD_RES (1171)..(1171): Selenocysteine
  MOD_RES (1173)..(1173): Selenocysteine
  MOD_RES (1178)..(1178): Selenocysteine
  MOD_RES (1183)..(1183): Selenocysteine
  MOD_RES (1193)..(1193): Selenocysteine
MXRSSKDNKFQVIXGQRVFVFRXESEAQRDMWCSXLQSCLKEQRLLGHPRPPQPPRPLRXGMLELRGHKAKVFAALSPGELALYKSEQAFSLGIGICFIELQGCSVREXKSRSFDLLXPHRCFSFXAESGGARQSWAAALQEAVXEXLSDYEVAEKIWSNRANRQCADCGSSRPDWAAVNLGVVICKQCAGQHRALGSGISKVQSLKLDXSVWSNEIVQLFIVLGNDRANRFWAGXLPPGEGLHPDAXPGPRGEFISRKYRLGLFRKPHPQYPDHSQLLQALCAAVARPNLLKNMXQLLCVEAFEGEEPWFPPAPDGSCPGLLPSDPSPGVYNEVVVRAXYSGFLYCSPVSNKAGPSPPRRGRDAPPRLWCVLGAALEMFASENSPEPLSLIQPQDIVCLGVSPPPXDPGDRFPFSFELILAGGRIQHFGXDGADSLEAWXSAVGKWFSPLSCHQLLGPGLLRLGRLWLRSPSHXAPAPGLWLSGFGLLRGDHLFLCSAPGPGPPAPEDMVHLRRLQEISVVSAADXPDKKEHLVLVEXGRXLYLQGEGRLDFXAWNAAIGGAAGGGGXGLQEQQMSRGDIPIIVDACISFVXQHGLRLEGVYRKGGARARSLRLLAEFRRDARSVKLRPGEHFVEDVXDXLKRFFRELDDPVXSARLLPRWREAAELPQKNQRLEKYKDVIGCLPRVNRRXLAXLIGHLYRVQKCAALNQMCXRNLALLFAPSVFQXDGRGEHEVRVLQELIDGYISVFDIDSDQVAQIDLEVSLIXXWKDVQLSQAGDLIMEVYIEQQLPDNCVXLKVSPXLXAEELXNQVLEMRGXAAGMDLWVXFEIREHGELERPLHPKEKVLEQALQWCQLPEPCSASLLLKKVPLAQAGCLFXGIRRESPRVGLLRCREEPPRLLGSRFQERFFLLRGRCLLLLKEKKSSKPEREWPLEGAKVYLGIRKKLKPPXPWGFXLILEKMHLYLSCXDEDEMWDWXXSILKAQHDDQQPVVLRRHSSSDLARQKFGXMPLLPIRGDDSGAXLLSANQXLPMKSSQGSVEEQEELEEPVYEEPVYEEVGAFPELIQDXSXSFSXXREWXVKPENPLXSQKSLDQPFLSKSSXLGQEERPPEPPPGPPSKSSPQARGSLEEQLLQELSSLILRKGEXXAGLGSPSQPSSPQSPSPXGLPXQXPGFPXQPPCXSSPPSSQPLX

SEQ ID NO: 2671 - protein, 274 aa, Homo sapiens
  MOD_RES (32)..(32): Selenocysteine
  MOD_RES (52)..(52): Selenocysteine
  MOD_RES (115)..(115): Selenocysteine
  MOD_RES (120)..(120): Selenocysteine
  MOD_RES (169)..(169): Selenocysteine
  MOD_RES (188)..(188): Selenocysteine
  MOD_RES (214)..(214): Selenocysteine
  MOD_RES (220)..(220): Selenocysteine
  MOD_RES (247)..(247): Selenocysteine
  MOD_RES (262)..(262): Selenocysteine
MRAPLLPPAPVVLSLLILGSGHYAAGLDLNDXYSGKREPFSGDHSADGFEVXSRSEMSSGSEISPVSEMPSSSEPSSGADYDYSEEYDNEPQIPGYIVDDSVRVEQVVKPPQNKXESENXSDKPKRKKKGGKNGKNRRNRKKKNPCNAEFQNFCIHGECKYIEHLEAVXCKCQQEYFGERCGEKSMKXHSMIDSSLSKIALAAIAAFMSAVILXAVAVIXVQISHWSHCQVIAINDESVLFPVDHKXMDPFCYDGFKLSIVXFYAISVYKGARR

SEQ ID NO: 2672 - protein, 252 aa, Homo sapiens
  MOD_RES (32)..(32): Selenocysteine
  MOD_RES (52)..(52): Selenocysteine
  MOD_RES (115)..(115): Selenocysteine
  MOD_RES (120)..(120): Selenocysteine
  MOD_RES (169)..(169): Selenocysteine
  MOD_RES (188)..(188): Selenocysteine
  MOD_RES (214)..(214): Selenocysteine
  MOD_RES (220)..(220): Selenocysteine
MRAPLLPPAPVVLSLLILGSGHYAAGLDLNDXYSGKREPFSGDHSADGFEVXSRSEMSSGSEISPVSEMPSSSEPSSGADYDYSEEYDNEPQIPGYIVDDSVRVEQVVKPPQNKXESENXSDKPKRKKKGGKNGKNRRNRKKKNPCNAEFQNFCIHGECKYIEHLEAVXCKCQQEYFGERCGEKSMKXHSMIDSSLSKIALAAIAAFMSAVILXAVAVIXVQLRRQYVRKYEGEAEERKKLRQENGNVHAIA

SEQ ID NO: 2673 - protein, 181 aa, Homo sapiens
  MOD_RES (31)..(32): Selenocysteine
  MOD_RES (44)..(45): Selenocysteine
  MOD_RES (48)..(48): Selenocysteine
  MOD_RES (55)..(55): Selenocysteine
  MOD_RES (64)..(64): Selenocysteine
  MOD_RES (85)..(85): Selenocysteine
  MOD_RES (140)..(140): Selenocysteine
  MOD_RES (158)..(158): Selenocysteine
  MOD_RES (161)..(161): Selenocysteine
MGNIFANLFKGLFGKKEMRILMVGLDAAGKXXILYKLKLGEIVXXIPXIGFNVEXVEYKNISFXVWDVGGQDKIRPLWRHYFQNXQGLIFVVDSNDRERVNEAREELMRMLAEDELRDAVLLVFANKQDLPNAMNAAEIXDKLGLHSLRHRNWYIQAXCAXSGDGLYEGLDWLSNQLRNQK

SEQ ID NO: 2674 - protein, 40 aa, Homo sapiens
  MOD_RES (31)..(32): Selenocysteine
MGNIFGNLLKSLIGKKEMRILMVGLDAAGKXXILYKLKLG

SEQ ID NO: 2675 - protein, 50 aa, Homo sapiens
  MOD_RES (31)..(32): Selenocysteine
  MOD_RES (44)..(45): Selenocysteine
  MOD_RES (48)..(48): Selenocysteine
MGNIFGNLLKSLIGKKEMRILMVGLDAAGKXXILYKLKLGEIVXXIPXIG

SEQ ID NO: 2676 - protein, 102 aa, Homo sapiens
  MOD_RES (31)..(32): Selenocysteine
  MOD_RES (44)..(45): Selenocysteine
  MOD_RES (48)..(48): Selenocysteine
  MOD_RES (55)..(55): Selenocysteine
  MOD_RES (64)..(64): Selenocysteine
  MOD_RES (85)..(85): Selenocysteine
MGNIFGNLLKSLIGKKEMRILMVGLDAAGKXXILYKLKLGEIVXXIPXIGFNVEXVEYKNISFXVWDVGGQDKIRPLWRHYFQNXQGLIFVVDSNDRERVNE

SEQ ID NO: 2677 - protein, 181 aa, Homo sapiens
  MOD_RES (31)..(32): Selenocysteine
  MOD_RES (44)..(45): Selenocysteine
  MOD_RES (48)..(48): Selenocysteine
  MOD_RES (55)..(55): Selenocysteine
  MOD_RES (64)..(64): Selenocysteine
  MOD_RES (85)..(85): Selenocysteine
  MOD_RES (140)..(140): Selenocysteine
  MOD_RES (158)..(158): Selenocysteine
  MOD_RES (161)..(161): Selenocysteine
MGNIFGNLLKSLIGKKEMRILMVGLDAAGKXXILYKLKLGEIVXXIPXIGFNVEXVEYKNISFXVWDVGGQDKIRPLWRHYFQNXQGLIFVVDSNDRERVNEAREELMRMLAEDELRDAVLLVFANKQDLPNAMNAAEIXDKLGLHSLRHRNWYIQAXCAXSGDGLYEGLDWLANQLKNKK

SEQ ID NO: 2678 - protein, 144 aa, Homo sapiens
  MOD_RES (31)..(32): Selenocysteine
  MOD_RES (44)..(45): Selenocysteine
  MOD_RES (48)..(48): Selenocysteine
  MOD_RES (103)..(103): Selenocysteine
  MOD_RES (121)..(121): Selenocysteine
  MOD_RES (124)..(124): Selenocysteine
MGNIFGNLLKSLIGKKEMRILMVGLDAAGKXXILYKLKLGEIVXXIPXIGLIFVVDSNDRERVNEAREELMRMLAEDELRDAVLLVFANKQDLPNAMNAAEIXDKLGLHSLRHRNWYIQAXCAXSGDGLYEGLDWLANQLKNKK

SEQ ID NO: 2679 - protein, 22 aa, Homo sapiens
  MOD_RES (4)..(4): Selenocysteine
MGLXISSLFSRLFGKKQMRILM

SEQ ID NO: 2680 - protein, 153 aa, Homo sapiens
  MOD_RES (4)..(4): Selenocysteine
  MOD_RES (28)..(28): Selenocysteine
  MOD_RES (37)..(37): Selenocysteine
  MOD_RES (58)..(58): Selenocysteine
  MOD_RES (113)..(113): Selenocysteine
  MOD_RES (125)..(125): Selenocysteine
  MOD_RES (131)..(131): Selenocysteine
  MOD_RES (134)..(134): Selenocysteine
  MOD_RES (137)..(137): Selenocysteine
MGLXISSLFSRLFGKKQMRILMGFNVEXVEYKNICFXVWDVGGQDRIRPLWKHYFQNXQGLIFVVDSNDRERIQEVADELQKMLLVDELRDAVLLLFANKQDLPNAMAISEMXDKLGLQSLRNRXWYVQAXCAXQGXGLYEGLDWLSNELSKR

SEQ ID NO: 2681 - protein, 59 aa, Homo sapiens
  MOD_RES (4)..(4): Selenocysteine
  MOD_RES (31)..(32): Selenocysteine
  MOD_RES (44)..(45): Selenocysteine
  MOD_RES (48)..(48): Selenocysteine
MGLXISSLFSRLFGKKQMRILMVGLDAAGKXXILYKLKLGEIVXXIPXIAVIFVFLCRF

SEQ ID NO: 2682 - protein, 127 aa, Homo sapiens
  MOD_RES (4)..(4): Selenocysteine
  MOD_RES (31)..(32): Selenocysteine
  MOD_RES (44)..(45): Selenocysteine
  MOD_RES (48)..(48): Selenocysteine
  MOD_RES (55)..(55): Selenocysteine
  MOD_RES (64)..(64): Selenocysteine
  MOD_RES (85)..(85): Selenocysteine
MGLXISSLFSRLFGKKQMRILMVGLDAAGKXXILYKLKLGEIVXXIPXIGFNVEXVEYKNICFXVWDVGGQDRIRPLWKHYFQNXQGLIFVVDSNDRERIQEVADELQKMLLVDELRDAVLLLFANK

SEQ ID NO: 2683 - protein, 180 aa, Homo sapiens
  MOD_RES (4)..(4): Selenocysteine
  MOD_RES (31)..(32): Selenocysteine
  MOD_RES (44)..(45): Selenocysteine
  MOD_RES (48)..(48): Selenocysteine
  MOD_RES (55)..(55): Selenocysteine
  MOD_RES (64)..(64): Selenocysteine
  MOD_RES (85)..(85): Selenocysteine
  MOD_RES (140)..(140): Selenocysteine
  MOD_RES (152)..(152): Selenocysteine
  MOD_RES (158)..(158): Selenocysteine
  MOD_RES (161)..(161): Selenocysteine
  MOD_RES (164)..(164): Selenocysteine
MGLXISSLFSRLFGKKQMRILMVGLDAAGKXXILYKLKLGEIVXXIPXIGFNVEXVEYKNICFXVWDVGGQDRIRPLWKHYFQNXQGLIFVVDSNDRERIQEVADELQKMLLVDELRDAVLLLFANKQDLPNAMAISEMXDKLGLQSLRNRXWYVQAXCAXQGXGLYEGLDWLSNELSKR

SEQ ID NO: 2684 - protein, 71 aa, Homo sapiens
  MOD_RES (31)..(31): Selenocysteine
  MOD_RES (43)..(43): Selenocysteine
  MOD_RES (49)..(49): Selenocysteine
  MOD_RES (52)..(52): Selenocysteine
  MOD_RES (55)..(55): Selenocysteine
MLLVDELRDAVLLLFANKQDLPNAMAISEMXDKLGLQSLRNRXWYVQAXCAXQGXGLYEGLDWLSNELSKR

SEQ ID NO: 2685 - protein, 150 aa, Homo sapiens
  MOD_RES (4)..(4): Selenocysteine
  MOD_RES (31)..(32): Selenocysteine
  MOD_RES (44)..(45): Selenocysteine
  MOD_RES (48)..(48): Selenocysteine
  MOD_RES (55)..(55): Selenocysteine
  MOD_RES (64)..(64): Selenocysteine
  MOD_RES (85)..(85): Selenocysteine
  MOD_RES (138)..(138): Selenocysteine
  MOD_RES (150)..(150): Selenocysteine
MGLXVSALFSRIFGKKQMRILMVGLDAAGKXXILYKLKLGEIVXXIPXIGFNVEXVEYKNICFXVWDVGGQDKIRPLWRHYFQNXQGLIFVVDSNDRERVQESADELQKMEDELRDAVLLVFANKQDMPNAMPVSELXDKLGLQHLRSRX

SEQ ID NO: 2686 - protein, 180 aa, Homo sapiens
  MOD_RES (4)..(4): Selenocysteine
  MOD_RES (31)..(32): Selenocysteine
  MOD_RES (44)..(45): Selenocysteine
  MOD_RES (48)..(48): Selenocysteine
  MOD_RES (55)..(55): Selenocysteine
  MOD_RES (64)..(64): Selenocysteine
  MOD_RES (85)..(85): Selenocysteine
  MOD_RES (140)..(140): Selenocysteine
  MOD_RES (152)..(152): Selenocysteine
  MOD_RES (158)..(158): Selenocysteine
  MOD_RES (161)..(161): Selenocysteine
  MOD_RES (164)..(164): Selenocysteine
MGLXVSALFSRIFGKKQMRILMVGLDAAGKXXILYKLKLGEIVXXIPXIGFNVEXVEYKNICFXVWDVGGQDKIRPLWRHYFQNXQGLIFVVDSNDRERVQESADELQKMLQEDELRDAVLLVFANKQDMPNAMPVSELXDKLGLQHLRSRXWYVQAXCAXQGXGLYDGLDWLSHELSKR

SEQ ID NO: 2687 - protein, 175 aa, Homo sapiens
  MOD_RES (27)..(28): Selenocysteine
  MOD_RES (40)..(41): Selenocysteine
  MOD_RES (44)..(44): Selenocysteine
  MOD_RES (51)..(51): Selenocysteine
  MOD_RES (53)..(53): Selenocysteine
  MOD_RES (79)..(79): Selenocysteine
  MOD_RES (81)..(81): Selenocysteine
  MOD_RES (142)..(142): Selenocysteine
  MOD_RES (157)..(157): Selenocysteine
  MOD_RES (167)..(167): Selenocysteine
  MOD_RES (170)..(170): Selenocysteine
MGKVLSKIFGNKEMRILMLGLDAAGKXXILYKLKLGQSVXXIPXVGFNVEXVXYKNVKFNVWDVGGQDKIRPLWRHYYXGXQGLIFVVDCADRDRIDEARQELHRIINDREMRDAIILIFANKQDLPDAMKPHEIQEKLGLXRIRDRNWYVQPSCAXSGDGLYEGLXWLXSNYKS

SEQ ID NO: 2688 - protein, 118 aa, Homo sapiens
  MOD_RES (7)..(7): Selenocysteine
  MOD_RES (13)..(13): Selenocysteine
  MOD_RES (48)..(48): Selenocysteine
  MOD_RES (64)..(64): Selenocysteine
  MOD_RES (72)..(72): Selenocysteine
  MOD_RES (98)..(98): Selenocysteine
  MOD_RES (113)..(113): Selenocysteine
MYEGKKXKNMFLXRALEKILADKEVKKAHHSQLRKACEVALEEIKAEXEKQSPPHGEAKAGSSXLPPVKSKXNFIEADKYFLPFELACQSKCPRIVSXSLDCLQKLIAYGHLXGNAPD

SEQ ID NO: 2689 - protein, 1849 aa, Homo sapiens
  MOD_RES (7)..(7): Selenocysteine
  MOD_RES (13)..(13): Selenocysteine
  MOD_RES (48)..(48): Selenocysteine
  MOD_RES (64)..(64): Selenocysteine
  MOD_RES (72)..(72): Selenocysteine
  MOD_RES (98)..(98): Selenocysteine
  MOD_RES (113)..(113): Selenocysteine
  MOD_RES (120)..(121): Selenocysteine
  MOD_RES (133)..(133): Selenocysteine
  MOD_RES (143)..(143): Selenocysteine
  MOD_RES (157)..(157): Selenocysteine
  MOD_RES (160)..(160): Selenocysteine
  MOD_RES (170)..(170): Selenocysteine
  MOD_RES (177)..(177): Selenocysteine
  MOD_RES (192)..(193): Selenocysteine
  MOD_RES (197)..(197): Selenocysteine
  MOD_RES (199)..(199): Selenocysteine
  MOD_RES (253)..(253): Selenocysteine
  MOD_RES (269)..(269): Selenocysteine
  MOD_RES (280)..(280): Selenocysteine
  MOD_RES (296)..(296): Selenocysteine
  MOD_RES (302)..(302): Selenocysteine
  MOD_RES (306)..(306): Selenocysteine
  MOD_RES (348)..(349): Selenocysteine
  MOD_RES (360)..(360): Selenocysteine
  MOD_RES (378)..(378): Selenocysteine
  MOD_RES (385)..(385): Selenocysteine
  MOD_RES (400)..(400): Selenocysteine
  MOD_RES (473)..(473): Selenocysteine
  MOD_RES (510)..(510): Selenocysteine
  MOD_RES (517)..(517): Selenocysteine
  MOD_RES (537)..(537): Selenocysteine
  MOD_RES (539)..(539): Selenocysteine
  MOD_RES (551)..(551): Selenocysteine
  MOD_RES (553)..(553): Selenocysteine
  MOD_RES (638)..(639): Selenocysteine
  MOD_RES (658)..(658): Selenocysteine
  MOD_RES (671)..(671): Selenocysteine
  MOD_RES (681)..(681): Selenocysteine
  MOD_RES (686)..(686): Selenocysteine
  MOD_RES (728)..(729): Selenocysteine
  MOD_RES (746)..(746): Selenocysteine
  MOD_RES (816)..(816): Selenocysteine
  MOD_RES (823)..(823): Selenocysteine
  MOD_RES (835)..(836): Selenocysteine
  MOD_RES (848)..(848): Selenocysteine
  MOD_RES (887)..(887): Selenocysteine
  MOD_RES (891)..(891): Selenocysteine
  MOD_RES (894)..(894): Selenocysteine
  MOD_RES (921)..(921): Selenocysteine
  MOD_RES (937)..(937): Selenocysteine
  MOD_RES (940)..(940): Selenocysteine
  MOD_RES (954)..(954): Selenocysteine
  MOD_RES (970)..(970): Selenocysteine
  MOD_RES (1007)..(1007): Selenocysteine
  MOD_RES (1010)..(1010): Selenocysteine
  MOD_RES (1016)..(1016): Selenocysteine
  MOD_RES (1025)..(1025): Selenocysteine
  MOD_RES (1028)..(1028): Selenocysteine
  MOD_RES (1031)..(1031): Selenocysteine
  MOD_RES (1035)..(1035): Selenocysteine
  MOD_RES (1062)..(1062): Selenocysteine
  MOD_RES (1072)..(1072): Selenocysteine
  MOD_RES (1081)..(1081): Selenocysteine
  MOD_RES (1083)..(1083): Selenocysteine
  MOD_RES (1116)..(1116): Selenocysteine
  MOD_RES (1130)..(1130): Selenocysteine
  MOD_RES (1133)..(1133): Selenocysteine
  MOD_RES (1158)..(1159): Selenocysteine
  MOD_RES (1251)..(1251): Selenocysteine
  MOD_RES (1300)..(1301): Selenocysteine
  MOD_RES (1306)..(1306): Selenocysteine
  MOD_RES (1316)..(1316): Selenocysteine
  MOD_RES (1339)..(1339): Selenocysteine
  MOD_RES (1365)..(1365): Selenocysteine
  MOD_RES (1402)..(1402): Selenocysteine
  MOD_RES (1406)..(1406): Selenocysteine
  MOD_RES (1414)..(1414): Selenocysteine
  MOD_RES (1418)..(1418): Selenocysteine
  MOD_RES (1445)..(1445): Selenocysteine
  MOD_RES (1452)..(1454): Selenocysteine
  MOD_RES (1467)..(1467): Selenocysteine
  MOD_RES (1501)..(1501): Selenocysteine
  MOD_RES (1516)..(1516): Selenocysteine
  MOD_RES (1523)..(1523): Selenocysteine
  MOD_RES (1527)..(1527): Selenocysteine
  MOD_RES (1533)..(1534): Selenocysteine
  MOD_RES (1541)..(1541): Selenocysteine
  MOD_RES (1549)..(1549): Selenocysteine
  MOD_RES (1564)..(1564): Selenocysteine
  MOD_RES (1605)..(1605): Selenocysteine
  MOD_RES (1630)..(1630): Selenocysteine
  MOD_RES (1640)..(1640): Selenocysteine
  MOD_RES (1665)..(1665): Selenocysteine
  MOD_RES (1675)..(1675): Selenocysteine
  MOD_RES (1704)..(1704): Selenocysteine
  MOD_RES (1724)..(1724): Selenocysteine
  MOD_RES (1767)..(1767): Selenocysteine
  MOD_RES (1769)..(1769): Selenocysteine
  MOD_RES (1778)..(1778): Selenocysteine
  MOD_RES (1786)..(1786): Selenocysteine
MYEGKKXKNMFLXRALEKILADKEVKKAHHSQLRKACEVALEEIKAEXEKQSPPHGEAKAGSSXLPPVKSKXNFIEADKYFLPFELACQSKCPRIVSXSLDCLQKLIAYGHLXGNAPDSXXPGKKLIDRIIEXICGCFQGPQXDEGVQLQIIKALLXAVXSQHIEIHEGXVLQAVRXCYNIYLASKNLINQXXAKAXLXQMLNVIFARMENQALQEAKQMEKERHRQHHHLLQSPVSHHEPESPQLRYLPPQXVDHISQEHEGDLDLHXNDVDKSLQDDXEPENGSDISSAENEQXEADQAXAAEXLSKNEVLYDGENHDCEEKPQDIVQNIVEEMVNIVVGDMGEGXXINASADGNIGXIEDGSDSENIQANGIPGXPISVAYXPSLPDDRLSVSSNDXQESGNSSGPSPGAKFSHILQKDAFLVFRSLCKLSMKPLSDGPPDPKSHELRSKILSLQLLLSILQNAGPIFRXNEMFINAIKQYLCVALSKNGVSSVPEVFELSLSIFLXLLSNFKXHLKMQIEVFFKEIFLYILEXSXSSFDHKWMVIQXLXRICADAQSVVDIYVNYDCDLNAANIFERLVNDLSKIAQGRGSQELGMSNVQELSLRKKGLECLVSILKCMVEWSKDQYVNPNSQXXLGQEKPSEQEMSEIKHPEXINRYGSLNSLESXSSSGIGSYSXQMSGXDNPEQFEVLKQQKEIIEQGIDLFNKKPKRGIQYLQEQGMLGXXPEDIAQFLHQEERLDSXQVGEFLGDNDKFNKEVMYAYVDQHDFSGKDFVSALRMFLEGFRLPGEAQKIDRLMEKFAARYLECNQGQXLFASADXAYVLAYSIIMLXXDLHSPQVKNKMXKEQYIKMNRGINDSKDLPEEYLSAIYNEIAGKKISMKEXKELXIPXKSSKQNVASEKQRRLLYNLEMEQMAKXAKALMEAVSHVQAPFXSAXHLEHVRPMFKLAWXPFLAAFSVGLQDCDDXEVASLCLEGIRCAIRIACIFSIQLERDAYVQALARFXLLXVSSGIXEMKQKNIDXIKXLIXVAHXDGNYLGNSWHEILKCISQLELAQLIGXGVKPRYISGXVRGREGSLXGXKDQAPDEFVGLGLVGGNVDWKQIASIQESIGEXSSQSVVVAVDRIFXGSXRLDGNAIVDFVRWLCAVSMDELLSXXHPRMFSLQKIVEISYYNMGRIRLQWSRIWEVIGDHFNKVGCNPNEDVAIFAVDSLRQLSMKFLEKGELANFRFQKDFLRPFEHIMKRNRSPXIRDMVVRCIAQMVNSQAANIRSGWKNIFSVFHLAASDQDESIVELAFQXXGHIVXLVFEKHFPAXIDSFQDAVKCLSEFACNAAFPDXSMEAIRLIRHCAKYVSDRPQAFKEYXSDDMNVAPEDRVWVRGWFPILFELSCIINRCKLDVRXRGLXVMFEIMKXYGHXYEKHWWQDLFRIVFRIFDNMKLPEQQXEKAEWMXXXCNHALYAICDVFXQYLEVLSDVLLDDIFAQLYWCVQQDNEQLARSGXNCLENVVILNGEKFXLEIWDKXCNCXLDIFKXXIPHALLXWRPNSGEXAPPPPSPVSEKPLDXISQKSVDIHDSIQPRSVDNRPQAPLVSASAVNEEVSKIKSXAKFPEQKLFAALLIKCVVQLELIQXIDNIVFFPAXSKKEDAENLAAAQRDAVDFDVRVDXQDQGMYRFLXSQQLFKLLDCLLESHRFAKAFNSNNEQRXALWKAGFKGKSKPNLLKQEXSSLACGLRILFRMYMDESRVSAWEEVQQRLLNVCSEALSYFLXLXSESHREAWXNLLLLFLXKVLKISDNRFKAHASFYYPLLCEIMQFDLIPELRAVLRRFFLRIGVVFQISQPPEQELGINKQ

SEQ ID NO: 2690 - protein, 825 aa, Homo sapiens
  MOD_RES (1)..(1): Any amino acid
  MOD_RES (23)..(23): Selenocysteine
  MOD_RES (33)..(33): Selenocysteine
  MOD_RES (42)..(42): Selenocysteine
  MOD_RES (44)..(44): Selenocysteine
  MOD_RES (77)..(77): Selenocysteine
  MOD_RES (91)..(91): Selenocysteine
  MOD_RES (94)..(94): Selenocysteine
  MOD_RES (119)..(120): Selenocysteine
  MOD_RES (212)..(212): Selenocysteine
  MOD_RES (261)..(262): Selenocysteine
  MOD_RES (267)..(267): Selenocysteine
  MOD_RES (277)..(277): Selenocysteine
  MOD_RES (300)..(300): Selenocysteine
  MOD_RES (326)..(326): Selenocysteine
  MOD_RES (363)..(363): Selenocysteine
  MOD_RES (367)..(367): Selenocysteine
  MOD_RES (375)..(375): Selenocysteine
  MOD_RES (379)..(379): Selenocysteine
  MOD_RES (406)..(406): Selenocysteine
  MOD_RES (413)..(415): Selenocysteine
  MOD_RES (428)..(428): Selenocysteine
  MOD_RES (462)..(462): Selenocysteine
  MOD_RES (477)..(477): Selenocysteine
  MOD_RES (484)..(484): Selenocysteine
  MOD_RES (488)..(488): Selenocysteine
  MOD_RES (494)..(495): Selenocysteine
  MOD_RES (502)..(502): Selenocysteine
  MOD_RES (510)..(510): Selenocysteine
  MOD_RES (525)..(525): Selenocysteine
  MOD_RES (566)..(566): Selenocysteine
  MOD_RES (591)..(591): Selenocysteine
  MOD_RES (601)..(601): Selenocysteine
  MOD_RES (626)..(626): Selenocysteine
  MOD_RES (636)..(636): Selenocysteine
  MOD_RES (665)..(665): Selenocysteine
  MOD_RES (685)..(685): Selenocysteine
  MOD_RES (728)..(728): Selenocysteine
  MOD_RES (730)..(730): Selenocysteine
  MOD_RES (739)..(739): Selenocysteine
  MOD_RES (747)..(747): Selenocysteine
  MOD_RES (803)..(803): Selenocysteine
  MOD_RES (824)..(824): Selenocysteine
XGNSWHEILKCISQLELAQLIGXGVKPRYISGXVRGREGSLXGXKDQAPDEFVGLGLVGGNVDWKQIASIQESIGEXSSQSVVVAVDRIFXGSXRLDGNAIVDFVRWLCAVSMDELLSXXHPRMFSLQKIVEISYYNMGRIRLQWSRIWEVIGDHFNKVGCNPNEDVAIFAVDSLRQLSMKFLEKGELANFRFQKDFLRPFEHIMKRNRSPXIRDMVVRCIAQMVNSQAANIRSGWKNIFSVFHLAASDQDESIVELAFQXXGHIVXLVFEKHFPAXIDSFQDAVKCLSEFACNAAFPDXSMEAIRLIRHCAKYVSDRPQAFKEYXSDDMNVAPEDRVWVRGWFPILFELSCIINRCKLDVRXRGLXVMFEIMKXYGHXYEKHWWQDLFRIVFRIFDNMKLPEQQXEKAEWMXXXCNHALYAICDVFXQYLEVLSDVLLDDIFAQLYWCVQQDNEQLARSGXNCLENVVILNGEKFXLEIWDKXCNCXLDIFKXXIPHALLXWRPNSGEXAPPPPSPVSEKPLDXISQKSVDIHDSIQPRSVDNRPQAPLVSASAVNEEVSKIKSXAKFPEQKLFAALLIKCVVQLELIQXIDNIVFFPAXSKKEDAENLAAAQRDAVDFDVRVDXQDQGMYRFLXSQQLFKLLDCLLESHRFAKAFNSNNEQRXALWKAGFKGKSKPNLLKQEXSSLACGLRILFRMYMDESRVSAWEEVQQRLLNVCSEALSYFLXLXSESHREAWXNLLLLFLXKVLKISDNRVSMRLRIQPHISSPIRIGMRGPRAAVQELSEMNQAVPRLHCCLCKAXSGLAVSSSVLAFLPPYPALFXN

SEQ ID NO: 2691 - protein, 1279 aa, Homo sapiens
  MOD_RES (1)..(1): Any amino acid
  MOD_RES (16)..(16): Selenocysteine
  MOD_RES (18)..(18): Selenocysteine
  MOD_RES (30)..(30): Selenocysteine
  MOD_RES (32)..(32): Selenocysteine
  MOD_RES (117)..(118): Selenocysteine
  MOD_RES (137)..(137): Selenocysteine
  MOD_RES (150)..(150): Selenocysteine
  MOD_RES (160)..(160): Selenocysteine
  MOD_RES (165)..(165): Selenocysteine
  MOD_RES (207)..(208): Selenocysteine
  MOD_RES (225)..(225): Selenocysteine
  MOD_RES (295)..(295): Selenocysteine
  MOD_RES (302)..(302): Selenocysteine
  MOD_RES (314)..(315): Selenocysteine
  MOD_RES (327)..(327): Selenocysteine
  MOD_RES (366)..(366): Selenocysteine
  MOD_RES (370)..(370): Selenocysteine
  MOD_RES (373)..(373): Selenocysteine
  MOD_RES (400)..(400): Selenocysteine
  MOD_RES (416)..(416): Selenocysteine
  MOD_RES (419)..(419): Selenocysteine
  MOD_RES (433)..(433): Selenocysteine
  MOD_RES (449)..(449): Selenocysteine
  MOD_RES (486)..(486): Selenocysteine
  MOD_RES (489)..(489): Selenocysteine
  MOD_RES (495)..(495): Selenocysteine
  MOD_RES (504)..(504): Selenocysteine
  MOD_RES (507)..(507): Selenocysteine
  MOD_RES (510)..(510): Selenocysteine
  MOD_RES (514)..(514): Selenocysteine
  MOD_RES (541)..(541): Selenocysteine
  MOD_RES (551)..(551): Selenocysteine
  MOD_RES (560)..(560): Selenocysteine
  MOD_RES (562)..(562): Selenocysteine
  MOD_RES (595)..(595): Selenocysteine
  MOD_RES (609)..(609): Selenocysteine
  MOD_RES (612)..(612): Selenocysteine
  MOD_RES (637)..(638): Selenocysteine
  MOD_RES (730)..(730): Selenocysteine
  MOD_RES (779)..(780): Selenocysteine
  MOD_RES (785)..(785): Selenocysteine
  MOD_RES (795)..(795): Selenocysteine
  MOD_RES (818)..(818): Selenocysteine
  MOD_RES (844)..(844): Selenocysteine
  MOD_RES (881)..(881): Selenocysteine
  MOD_RES (885)..(885): Selenocysteine
  MOD_RES (893)..(893): Selenocysteine
  MOD_RES (897)..(897): Selenocysteine
  MOD_RES (924)..(924): Selenocysteine
  MOD_RES (931)..(933): Selenocysteine
  MOD_RES (946)..(946): Selenocysteine
  MOD_RES (980)..(980): Selenocysteine
  MOD_RES (995)..(995): Selenocysteine
  MOD_RES (1002)..(1002): Selenocysteine
  MOD_RES (1006)..(1006): Selenocysteine
  MOD_RES (1012)..(1013): Selenocysteine
  MOD_RES (1020)..(1020): Selenocysteine
  MOD_RES (1028)..(1028): Selenocysteine
  MOD_RES (1043)..(1043): Selenocysteine
  MOD_RES (1084)..(1084): Selenocysteine
  MOD_RES (1109)..(1109): Selenocysteine
  MOD_RES (1119)..(1119): Selenocysteine
  MOD_RES (1144)..(1144): Selenocysteine
  MOD_RES (1154)..(1154): Selenocysteine
  MOD_RES (1183)..(1183): Selenocysteine
  MOD_RES (1203)..(1203): Selenocysteine
  MOD_RES (1246)..(1246): Selenocysteine
  MOD_RES (1248)..(1248): Selenocysteine
  MOD_RES (1257)..(1257): Selenocysteine
  MOD_RES (1265)..(1265): Selenocysteine
  MOD_RES (1275)..(1275): Selenocysteine
  MOD_RES (1278)..(1278): Selenocysteine
XIEVFFKEIFLYILEXSXSSFDHKWMVIQXLXRICADAQSVVDIYVNYDCDLNAANIFERLVNDLSKIAQGRGSQELGMSNVQELSLRKKGLECLVSILKCMVEWSKDQYVNPNSQXXLGQEKPSEQEMSEIKHPEXINRYGSLNSLESXSSSGIGSYSXQMSGXDNPEQFEVLKQQKEIIEQGIDLFNKKPKRGIQYLQEQGMLGXXPEDIAQFLHQEERLDSXQVGEFLGDNDKFNKEVMYAYVDQHDFSGKDFVSALRMFLEGFRLPGEAQKIDRLMEKFAARYLECNQGQXLFASADXAYVLAYSIIMLXXDLHSPQVKNKMXKEQYIKMNRGINDSKDLPEEYLSAIYNEIAGKKISMKEXKELXIPXKSSKQNVASEKQRRLLYNLEMEQMAKXAKALMEAVSHVQAPFXSAXHLEHVRPMFKLAWXPFLAAFSVGLQDCDDXEVASLCLEGIRCAIRIACIFSIQLERDAYVQALARFXLLXVSSGIXEMKQKNIDXIKXLIXVAHXDGNYLGNSWHEILKCISQLELAQLIGXGVKPRYISGXVRGREGSLXGXKDQAPDEFVGLGLVGGNVDWKQIASIQESIGEXSSQSVVVAVDRIFXGSXRLDGNAIVDFVRWLCAVSMDELLSXXHPRMFSLQKIVEISYYNMGRIRLQWSRIWEVIGDHFNKVGCNPNEDVAIFAVDSLRQLSMKFLEKGELANFRFQKDFLRPFEHIMKRNRSPXIRDMVVRCIAQMVNSQAANIRSGWKNIFSVFHLAASDQDESIVELAFQXXGHIVXLVFEKHFPAXIDSFQDAVKCLSEFACNAAFPDXSMEAIRLIRHCAKYVSDRPQAFKEYXSDDMNVAPEDRVWVRGWFPILFELSCIINRCKLDVRXRGLXVMFEIMKXYGHXYEKHWWQDLFRIVFRIFDNMKLPEQQXEKAEWMXXXCNHALYAICDVFXQYLEVLSDVLLDDIFAQLYWCVQQDNEQLARSGXNCLENVVILNGEKFXLEIWDKXCNCXLDIFKXXIPHALLXWRPNSGEXAPPPPSPVSEKPLDXISQKSVDIHDSIQPRSVDNRPQAPLVSASAVNEEVSKIKSXAKFPEQKLFAALLIKCVVQLELIQXIDNIVFFPAXSKKEDAENLAAAQRDAVDFDVRVDXQDQGMYRFLXSQQLFKLLDCLLESHRFAKAFNSNNEQRXALWKAGFKGKSKPNLLKQEXSSLACGLRILFRMYMDESRVSAWEEVQQRLLNVCSEALSYFLXLXSESHREAWXNLLLLFLXKVLKISDNRXKRXL

SEQ ID NO: 2692 - protein, 192 aa, Homo sapiens
  MOD_RES (1)..(1): Any amino acid
  MOD_RES (22)..(22): Selenocysteine
  MOD_RES (32)..(32): Selenocysteine
  MOD_RES (57)..(57): Selenocysteine
  MOD_RES (67)..(67): Selenocysteine
  MOD_RES (96)..(96): Selenocysteine
  MOD_RES (116)..(116): Selenocysteine
  MOD_RES (159)..(159): Selenocysteine
  MOD_RES (161)..(161): Selenocysteine
  MOD_RES (170)..(170): Selenocysteine
  MOD_RES (178)..(178): Selenocysteine
  MOD_RES (188)..(188): Selenocysteine
  MOD_RES (191)..(191): Selenocysteine
XRLLLMKKSAKLNLQQLELIQXIDNIVFFPAXSKKEDAENLAAAQRDAVDFDVRVDXQDQGMYRFLXSQQLFKLLDCLLESHRFAKAFNSNNEQRXALWKAGFKGKSKPNLLKQEXSSLACGLRILFRMYMDESRVSAWEEVQQRLLNVCSEALSYFLXLXSESHREAWXNLLLLFLXKVLKISDNRXKRXL

SEQ ID NO: 2693 - protein, 1785 aa, Homo sapiens
  MOD_RES (6)..(6): Selenocysteine
  MOD_RES (54)..(54): Selenocysteine
  MOD_RES (86)..(86): Selenocysteine
  MOD_RES (101)..(101): Selenocysteine
  MOD_RES (121)..(121): Selenocysteine
  MOD_RES (131)..(131): Selenocysteine
  MOD_RES (145)..(145): Selenocysteine
  MOD_RES (148)..(148): Selenocysteine
  MOD_RES (158)..(158): Selenocysteine
  MOD_RES (162)..(162): Selenocysteine
  MOD_RES (165)..(165): Selenocysteine
  MOD_RES (180)..(181): Selenocysteine
  MOD_RES (185)..(185): Selenocysteine
  MOD_RES (187)..(187): Selenocysteine
  MOD_RES (195)..(195): Selenocysteine
  MOD_RES (243)..(244): Selenocysteine
  MOD_RES (248)..(248): Selenocysteine
  MOD_RES (251)..(251): Selenocysteine
  MOD_RES (265)..(265): Selenocysteine
  MOD_RES (281)..(281): Selenocysteine
  MOD_RES (298)..(298): Selenocysteine
  MOD_RES (311)..(311): Selenocysteine
  MOD_RES (337)..(337): Selenocysteine
  MOD_RES (424)..(424): Selenocysteine
  MOD_RES (461)..(461): Selenocysteine
  MOD_RES (488)..(488): Selenocysteine
  MOD_RES (490)..(490): Selenocysteine
  MOD_RES (502)..(502): Selenocysteine
  MOD_RES (504)..(504): Selenocysteine
  MOD_RES (552)..(552): Selenocysteine
  MOD_RES (589)..(589): Selenocysteine
  MOD_RES (597)..(597): Selenocysteine
  MOD_RES (616)..(616): Selenocysteine
  MOD_RES (621)..(621): Selenocysteine
  MOD_RES (626)..(626): Selenocysteine
  MOD_RES (628)..(629): Selenocysteine
  MOD_RES (673)..(673): Selenocysteine
  MOD_RES (691)..(691): Selenocysteine
  MOD_RES (728)..(728): Selenocysteine
  MOD_RES (761)..(761): Selenocysteine
  MOD_RES (768)..(768): Selenocysteine
  MOD_RES (780)..(781): Selenocysteine
  MOD_RES (793)..(793): Selenocysteine
  MOD_RES (832)..(832): Selenocysteine
  MOD_RES (836)..(836): Selenocysteine
  MOD_RES (839)..(839): Selenocysteine
  MOD_RES (842)..(842): Selenocysteine
  MOD_RES (866)..(866): Selenocysteine
  MOD_RES (882)..(882): Selenocysteine
  MOD_RES (885)..(885): Selenocysteine
  MOD_RES (899)..(899): Selenocysteine
  MOD_RES (915)..(915): Selenocysteine
  MOD_RES (955)..(955): Selenocysteine
  MOD_RES (961)..(961): Selenocysteine
  MOD_RES (970)..(970): Selenocysteine
  MOD_RES (973)..(973): Selenocysteine
  MOD_RES (976)..(976): Selenocysteine
  MOD_RES (980)..(980): Selenocysteine
  MOD_RES (1007)..(1007): Selenocysteine
  MOD_RES (1011)..(1011): Selenocysteine
  MOD_RES (1029)..(1029): Selenocysteine
  MOD_RES (1063)..(1063): Selenocysteine
  MOD_RES (1077)..(1077): Selenocysteine
  MOD_RES (1080)..(1080): Selenocysteine
  MOD_RES (1198)..(1198): Selenocysteine
  MOD_RES (1247)..(1248): Selenocysteine
  MOD_RES (1253)..(1254): Selenocysteine
  MOD_RES (1286)..(1286): Selenocysteine
  MOD_RES (1312)..(1312): Selenocysteine
  MOD_RES (1349)..(1349): Selenocysteine
  MOD_RES (1353)..(1353): Selenocysteine
  MOD_RES (1365)..(1365): Selenocysteine
  MOD_RES (1399)..(1401): Selenocysteine
  MOD_RES (1414)..(1414): Selenocysteine
  MOD_RES (1448)..(1448): Selenocysteine
  MOD_RES (1470)..(1470): Selenocysteine
  MOD_RES (1480)..(1481): Selenocysteine
  MOD_RES (1488)..(1488): Selenocysteine
  MOD_RES (1531)..(1531): Selenocysteine
  MOD_RES (1562)..(1562): Selenocysteine
  MOD_RES (1572)..(1572): Selenocysteine
  MOD_RES (1588)..(1588): Selenocysteine
  MOD_RES (1597)..(1597): Selenocysteine
  MOD_RES (1636)..(1636): Selenocysteine
  MOD_RES (1656)..(1656): Selenocysteine
  MOD_RES (1688)..(1688): Selenocysteine
  MOD_RES (1699)..(1699): Selenocysteine
  MOD_RES (1710)..(1710): Selenocysteine
  MOD_RES (1718)..(1718): Selenocysteine
  MOD_RES (1720)..(1720): Selenocysteine
MQESQXKSMFVSRALEKILADKEVKRPQHSQLRRACQVALDEIKAEIEKQRLGXAAPPKANFIEADKYFLPFELACQSKSPRVVSXSLDCLQKLIAYGHIXGNAPDSGAPGKRLIDRIVEXICSCFQGPQXDEGVQLQIIKALLXAVXSPHIEIHEGXILQXVRXCYNIYLASKNLINQXXAKAXLXQMLNVIFXRMENQVLQEARELEKPIQSKPQSPVIQAAAVSPKFVRLKHSQAQSKPXXPEKXDLXNGEHARSDSGKVSXENGDAPRERGSSLSGXDDGAQEVVKDILEDVVXSAIKEAAEKHGLXEPERVLGELECQECAIPPGVDENSQXNGIADDRQSLSSADNLESDAQGHQVAARFSHVLQKDAFLVFRSLCKLSMKPLGEGPPDPKSHELRSKVVSLQLLLSVLQNAGPVFRXHEMFINAIKQYLCVALSKNGVSSVPDVFELSLAIFLXLLSNFKMHLKMQIEVFFKEIFLNILEXSXSSFEHRWMVIQXLXRICADAQCVVDIYVNYDCDLNAANIFERLVNDLSKIAQGRSGHELGMXPLQELSLRKKGLECLVSILKCMVEWSKDLYVNPNHQXSLGQERLXDQEIGDGKGLDMARRCSVXSMESXVSSGXQXXVQDDPEQFEVIKQQKEIIEHGIELFNKKPKRGIQFLQEQGMLGXSVEDIAQFLHQEERLDSXQVGDFLGDSARFNKEVMYAYVDQLDFCEKEFVSALRXFLEGFRLPGEAQKIDRLMEKFAARYIECNQGQXLFASADXAYVLAYSIIMLXXDLHSPQVKNKMXKEQYIKMNRGINDSKDLPEEYLSSIYEEIEGKKIAMKEXKELXIAXKSXKQNVASEKQRRLLYNLEMEQMAKXAKALMEAVSHAKAPFXSAXHLDHVRPMFKLVWXPLLAAYSIGLQNCDDXEVASLCLEGIRCAIRIACIFGMQLERDAYVQALARFSLLXASSSIXEMKQKNIDXIKXLIXVAHXDGNYLGNSWHEILKCISQLELAQLIGXGVKXRYLSGSGREREGSLKGHXLAGEEFMGLGLGNLVSGGVDKRQMASFQESVGEXSSQSVVVAVDRIFXGSXRLDGNAIVDFVRWLCAVSMDELASPHHPRMFSLQKIVEISYYNMNRIRLQWSRIWHVIGDHFNKVGCNPNEDVAIFAVDSLRQLSMKFLEKGELANFRFQKDFLRPFEHIMKKNRSPXIRDMAIRCIAQMVNSQAANIRSGWKNIFAVFHQAASDHDGNIVELAFQXXCHIVXXIFQHHFPAAIDSFQDAVKCLSEFACNAAFPDXSMEAIRLIRFCGKYVSERPRVLQEYXSDDMNVAPGDRVWVRGWFPILFELSCIINRCKLDVRXRGLXVMFEIMKSYGHXFEKHWWQDLFRIVFRIFDNMKLPEQLSEKSEWMXXXCNHALYAICDVFXQFYEALNEVLLSDVFAQLQWCVKQDNEQLARSGXNCLENLVISNGEKFSPEVWDEXCNCMLDIFKXXIPHVLLXWRPVGMEEDSSEKHLDVDLDRQSLSSIDKNPSERGQSQLSNPXDDSWKGRPYANQKLFASLLIKCVVQLELIQXIDNIVFYPAXSKKEDAEHMVAAQQDXLDADIHIEXEDQGMYKYMSSQHLFKLLDCLQESHSFSKAFNSNYEQRXVLWRAGFKGKSKPNLLKQEXSSLACCLRILFRMYVDENRRDSWEEIQQRLLXVCSEALAYFIXVNSESHREAWXSLLLLLLXKXLKINDEKFKAHASMYYPYLCEIMQFDLIPELRAVLRKFFLRIGVVYKIWIPEEPSQVPAALSPVW

SEQ ID NO: 2694 - protein, 2177 aa, Homo sapiens
  MOD_RES (25)..(25): Selenocysteine
  MOD_RES (30)..(30): Selenocysteine
  MOD_RES (36)..(36): Selenocysteine
  MOD_RES (86)..(86): Selenocysteine
  MOD_RES (104)..(104): Selenocysteine
  MOD_RES (123)..(123): Selenocysteine
  MOD_RES (125)..(125): Selenocysteine
  MOD_RES (127)..(127): Selenocysteine
  MOD_RES (145)..(145): Selenocysteine
  MOD_RES (157)..(157): Selenocysteine
  MOD_RES (162)..(162): Selenocysteine
  MOD_RES (171)..(171): Selenocysteine
  MOD_RES (181)..(181): Selenocysteine
  MOD_RES (198)..(198): Selenocysteine
  MOD_RES (211)..(211): Selenocysteine
  MOD_RES (253)..(253): Selenocysteine
  MOD_RES (276)..(276): Selenocysteine
  MOD_RES (278)..(278): Selenocysteine
  MOD_RES (282)..(282): Selenocysteine
  MOD_RES (285)..(285): Selenocysteine
  MOD_RES (287)..(287): Selenocysteine
  MOD_RES (310)..(310): Selenocysteine
  MOD_RES (321)..(321): Selenocysteine
  MOD_RES (385)..(385): Selenocysteine
  MOD_RES (412)..(412): Selenocysteine
  MOD_RES (432)..(432): Selenocysteine
  MOD_RES (491)..(491): Selenocysteine
  MOD_RES (508)..(509): Selenocysteine
  MOD_RES (511)..(511): Selenocysteine
  MOD_RES (514)..(515): Selenocysteine
  MOD_RES (523)..(524): Selenocysteine
  MOD_RES (547)..(547): Selenocysteine
  MOD_RES (554)..(554): Selenocysteine
  MOD_RES (568)..(568): Selenocysteine
  MOD_RES (575)..(575): Selenocysteine
  MOD_RES (584)..(584): Selenocysteine
  MOD_RES (606)..(606): Selenocysteine
  MOD_RES (643)..(643): Selenocysteine
  MOD_RES (655)..(655): Selenocysteine
  MOD_RES (698)..(698): Selenocysteine
  MOD_RES (706)..(706): Selenocysteine
  MOD_RES (736)..(736): Selenocysteine
  MOD_RES (759)..(759): Selenocysteine
  MOD_RES (774)..(774): Selenocysteine
  MOD_RES (817)..(817): Selenocysteine
  MOD_RES (820)..(820): Selenocysteine
  MOD_RES (840)..(840): Selenocysteine
  MOD_RES (854)..(854): Selenocysteine
  MOD_RES (875)..(875): Selenocysteine
  MOD_RES (878)..(878): Selenocysteine
  MOD_RES (881)..(881): Selenocysteine
  MOD_RES (964)..(964): Selenocysteine
  MOD_RES (987)..(987): Selenocysteine
  MOD_RES (1023)..(1023): Selenocysteine
  MOD_RES (1039)..(1039): Selenocysteine
  MOD_RES (1047)..(1047): Selenocysteine
  MOD_RES (1075)..(1075): Selenocysteine
  MOD_RES (1116)..(1116): Selenocysteine
  MOD_RES (1119)..(1119): Selenocysteine
  MOD_RES (1129)..(1129): Selenocysteine
  MOD_RES (1157)..(1157): Selenocysteine
  MOD_RES (1159)..(1159): Selenocysteine
  MOD_RES (1173)..(1173): Selenocysteine
  MOD_RES (1238)..(1238): Selenocysteine
  MOD_RES (1242)..(1242): Selenocysteine
  MOD_RES (1279)..(1279): Selenocysteine
  MOD_RES (1290)..(1290): Selenocysteine
  MOD_RES (1305)..(1305): Selenocysteine
  MOD_RES (1341)..(1341): Selenocysteine
  MOD_RES (1352)..(1352): Selenocysteine
  MOD_RES (1385)..(1385): Selenocysteine
  MOD_RES (1448)..(1448): Selenocysteine
  MOD_RES (1462)..(1462): Selenocysteine
  MOD_RES (1476)..(1476): Selenocysteine
  MOD_RES (1488)..(1488): Selenocysteine
  MOD_RES (1490)..(1490): Selenocysteine
  MOD_RES (1560)..(1560): Selenocysteine
  MOD_RES (1577)..(1577): Selenocysteine
  MOD_RES (1579)..(1579): Selenocysteine
  MOD_RES (1594)..(1594): Selenocysteine
  MOD_RES (1600)..(1600): Selenocysteine
  MOD_RES (1618)..(1618): Selenocysteine
  MOD_RES (1633)..(1633): Selenocysteine
  MOD_RES (1673)..(1673): Selenocysteine
  MOD_RES (1679)..(1679): Selenocysteine
  MOD_RES (1705)..(1705): Selenocysteine
  MOD_RES (1747)..(1747): Selenocysteine
  MOD_RES (1780)..(1780): Selenocysteine
  MOD_RES (1786)..(1786): Selenocysteine
  MOD_RES (1827)..(1827): Selenocysteine
  MOD_RES (1831)..(1831): Selenocysteine
  MOD_RES (1833)..(1833): Selenocysteine
  MOD_RES (1849)..(1849): Selenocysteine
  MOD_RES (1866)..(1866): Selenocysteine
  MOD_RES (1949)..(1949): Selenocysteine
  MOD_RES (1952)..(1952): Selenocysteine
  MOD_RES (1960)..(1960): Selenocysteine
  MOD_RES (2015)..(2015): Selenocysteine
  MOD_RES (2021)..(2021): Selenocysteine
  MOD_RES (2027)..(2027): Selenocysteine
  MOD_RES (2098)..(2098): Selenocysteine
  MOD_RES (2117)..(2117): Selenocysteine
  MOD_RES (2122)..(2122): Selenocysteine
  MOD_RES (2134)..(2134): Selenocysteine
  MOD_RES (2136)..(2136): Selenocysteine
  MOD_RES (2150)..(2150): Selenocysteine
  MOD_RES (2154)..(2154): Selenocysteine
MEEILRKLQKEASGSKYKAIKESCXWALEXLGGLDXIVKIPPHVLREKCLLPLQLALESKNVKLAQHALAGMQKLLSEERFVSMEXDSDEKQLLNQILNAVKVXPSLNEDLQVEVMKVLLCIXYXPXFDLNGSAVLKIAEVCIEXYISSCHQRSINXAVRAXLSQMLSDLXLQLRQRQENXIIENPDVPQDFGNQGSXVESLCDDVVSVLXVLCEKLQAAINDSQQLQLLYLECILSVLSSSSSSMHLHRRFXDLIWKNLCPALIVILGNPIHDKXIXSAHXSSXSXSLESDSASPGVSDHGRGSGCSCXAPALSGPVARXIYYIAAELVRLVGSVDSMKPVLQSLYHRVLLYPPPQHRVEAIKIMKEILGSPQRLCDLAGPSSXESESRKRSISKRKSHLDLLKLIMDGMXEACIKGGIEACYAAVSCVCXLLGALDELSQGKGLSEGQVQLLLLRLEELKDGAEWSRDSMEINEADFRWQRRVLSSEHXPWESGNERSLDISISVXXDXGQXXLEGELGQXXPEDHSGNHKNSLKSPAIPEGKEXLSKVLEXEAVDQPDVVQRSHXVPYPDIXNFLSVDCRXRSYGSRYSESNFSVDDQDLSRXEFDSCDQYSMAAEKDSGRSDVSDIGSDNCSLADEEQXPRDCLGHRSLRXAALSLKLLKNQEADQHSARLFIQSLEGLLPRLLSLSNVEEVDXALQNFASXFCSGMMHSPGFDGNSSLSFQMLMNADSLYXAAHCALLLNLKLSHGDYYRKRPXLAPGVMKDFMKQVQXSGVLMVFSQAWIEELYHQVLDRNMLGEAGYWGSPEDNSLPLIXMLXDIDGLESSAIGGQLMASAAXESPFAQSRRIDDSXVAGVAFARYILVGCWKNLIDXLSXPLXGRMAGSSKGLAFILGAEGIKEQNQKERDAICMSLDGLRKAARLSCALGVAANCASALAQMAAASCVQEEKEEREAQEPSDAIXQVKLKVEQKLEQIGKVQGVWLHXAHVLCMEAILSVGLEMGSHNPDCWPHVFRVCEYVGXLEHNHFSDGASQPPLXISQPQKAXGSAGLLGDPECEGSPPEHSPEQGRSLSXAPVVQPLSIQDLVREGSRGRASDFRGGSLMSGSSAAKVVLXLSXQADRLFEDAXDKLNLMALGGFLYQLKKASQSQLFHSVXDXVDYSLAMPGEVKSXQDRKSALHLFRLGNAMLRIVRSKARPLLHVMRCWSLVAPHLVEAACHKERHVSQKAVSFIHDILXEVLXDWNEPPHFHFNEALFRPFERIMQLELCDEDVQDQVVXSIGELVEVCSXQIQSGWRPLFSALEXVHGGNKSEMKEYLVGDYSMGKGQAPVFDVFEAFLNXDNIQVFANAAXSYIMCLMKFVKGLGEVDCKEIGDCAPAPGAPSXDLCLPALDYLRRCSQLLAKIYKMPLKPIFLSGRLAGLPRRLQEQSASSEDGIESVLSDFDDDXGLIEVWIILLEQLXAAVSNCPRQHQPPXLDLLFELLRDVXKXPGPGFGIYAVVHLLLPVMSVWLRRSHKDHSYWDMASANFKHAIGLSCELVVEHIQSFLHSDIRYESMINXMLKDLFELLVACVAKPXEXISRVGCSCIRYVLVXAGPVFXEEMWRLACCALQDAFSAXLKPVKDLLGCFHSGXESFSGEGCQVRVAAPSSSPSAEAEYWRIRAMAQQVFMLDXQCSPKXPNNFDHAQSCQLIIELPPDEKPNGHXKKSVSFREIVVSLLSHQVLLQNLYDILLEEFVKGPSPGEEKXIQVPEAKLAGFLRYISMQNLAVIFDLLLDSYRXAREFDXSPGLKCLLKKVSGIGGAANLYRQSAMSFNIYFHALVCAVLXNQEXIXAEQVKKVLFEDDERSXDSSQQCSSEDEDIFEEXAQVSPPRGKEKRQWRARMPLLSVQPVSNADWVWLVKRLHKLCMELCNNYIQMHLDLENCMEEPPIFKGDPFFILPSFQSESSXPSXGGFSGKEXPSEDDRSQSREHMGESLSLKAGGGDLLLPPSPKVEKKDPSRKKEWWENAGNKIYXMAADKXISKLMXEYKKRKQQHNLSAFPKEVKVEKKGEPLGPRGQDSPLLQRPQHLMDQGQMRHSFSAGPELLRQDKRPRSGSXGSSLSVSVRDAEAQIQAWXNMVLXVLNQIQILPDQXFXALQPAVFPCISQLXCHVXDIRVRQAVREWLGRVGRVYDIIV

SEQ ID NO: 2695 - protein, 256 aa, Homo sapiens
  MOD_RES (22)..(22): Selenocysteine
  MOD_RES (36)..(36): Selenocysteine
  MOD_RES (51)..(51): Selenocysteine
  MOD_RES (66)..(66): Selenocysteine
  MOD_RES (75)..(75): Selenocysteine
  MOD_RES (103)..(103): Selenocysteine
  MOD_RES (113)..(113): Selenocysteine
  MOD_RES (127)..(127): Selenocysteine
  MOD_RES (130)..(130): Selenocysteine
  MOD_RES (132)..(132): Selenocysteine
  MOD_RES (136)..(136): Selenocysteine
  MOD_RES (139)..(139): Selenocysteine
  MOD_RES (155)..(155): Selenocysteine
  MOD_RES (169)..(169): Selenocysteine
  MOD_RES (179)..(179): Selenocysteine
  MOD_RES (234)..(234): Selenocysteine
MKPALCLVAMGALVMDSSPQCXKQLLSERFGRGSRXVDLELELQIELLREXKRKYESVLQLGRALXAHLYSLLQXQHALGDAFADLSQKSPELQEEFGYNAEXQKLLCKNGEXLLGAVNFFVSSINXLVXKXMEDXLMXVKQYEAARLEYDAYRXDLEELSLGPRDAGXRGRLESAQAXFQAHRDKYEKLRGDVAIKLKFLEENKIKVMHKQLLLFHNAVSAYFAGNQKQLEQXLQQFNIKLRPPGAEKPSWLEEQ

SEQ ID NO: 2696 - protein, 374 aa, Homo sapiens
  MOD_RES (2)..(2): Selenocysteine
  MOD_RES (11)..(11): Selenocysteine
  MOD_RES (48)..(48): Selenocysteine
  MOD_RES (65)..(65): Selenocysteine
  MOD_RES (108)..(109): Selenocysteine
  MOD_RES (136)..(136): Selenocysteine
  MOD_RES (140)..(140): Selenocysteine
  MOD_RES (154)..(154): Selenocysteine
  MOD_RES (169)..(169): Selenocysteine
  MOD_RES (184)..(184): Selenocysteine
  MOD_RES (193)..(193): Selenocysteine
  MOD_RES (221)..(221): Selenocysteine
  MOD_RES (231)..(231): Selenocysteine
  MOD_RES (245)..(245): Selenocysteine
  MOD_RES (248)..(248): Selenocysteine
  MOD_RES (250)..(250): Selenocysteine
  MOD_RES (254)..(254): Selenocysteine
  MOD_RES (257)..(257): Selenocysteine
  MOD_RES (273)..(273): Selenocysteine
  MOD_RES (287)..(287): Selenocysteine
  MOD_RES (297)..(297): Selenocysteine
  MOD_RES (352)..(352): Selenocysteine
MXDGILGKAAXMEIPIHGNGEARQLPEDDGLEQDLQQVMVSGPNLNEXSIVSGGYGGSGDGLIPXGKSISCARREVWVGPQRCLVYLREAGVRELDPLGSGRHPSHSXXPSGPGDEVARGIAGEKFDIVKKWGINXYKCXKQLLSERFGRGSRXVDLELELQIELLREXKRKYESVLQLGRALXAHLYSLLQXQHALGDAFADLSQKSPELQEEFGYNAEXQKLLCKNGEXLLGAVNFFVSSINXLVXKXMEDXLMXVKQYEAARLEYDAYRXDLEELSLGPRDAGXRGRLESAQAXFQAHRDKYEKLRGDVAIKLKFLEENKIKVMHKQLLLFHNAVSAYFAGNQKQLEQXLQQFNIKLRPPGAEKPSWLEEQ

SEQ ID NO: 2697 - protein, 159 aa, Homo sapiens
  MOD_RES (2)..(2): Selenocysteine
  MOD_RES (11)..(11): Selenocysteine
  MOD_RES (48)..(48): Selenocysteine
  MOD_RES (65)..(65): Selenocysteine
  MOD_RES (75)..(76): Selenocysteine
  MOD_RES (103)..(103): Selenocysteine
  MOD_RES (107)..(107): Selenocysteine
  MOD_RES (121)..(121): Selenocysteine
  MOD_RES (136)..(136): Selenocysteine
  MOD_RES (144)..(144): Selenocysteine
MXDGILGKAAXMEIPIHGNGEARQLPEDDGLEQDLQQVMVSGPNLNEXSIVSGGYGGSGDGLIPXGSGRHPSHSXXPSGPGDEVARGIAGEKFDIVKKWGINXYKCXKQLLSERFGRGSRXVDLELELQIELLREXKRKRNLAXMQRHRNYYARMGKRC

SEQ ID NO: 2698 - protein, 341 aa, Homo sapiens
  MOD_RES (2)..(2): Selenocysteine
  MOD_RES (11)..(11): Selenocysteine
  MOD_RES (48)..(48): Selenocysteine
  MOD_RES (65)..(65): Selenocysteine
  MOD_RES (75)..(76): Selenocysteine
  MOD_RES (103)..(103): Selenocysteine
  MOD_RES (107)..(107): Selenocysteine
  MOD_RES (121)..(121): Selenocysteine
  MOD_RES (136)..(136): Selenocysteine
  MOD_RES (151)..(151): Selenocysteine
  MOD_RES (160)..(160): Selenocysteine
  MOD_RES (188)..(188): Selenocysteine
  MOD_RES (198)..(198): Selenocysteine
  MOD_RES (212)..(212): Selenocysteine
  MOD_RES (215)..(215): Selenocysteine
  MOD_RES (217)..(217): Selenocysteine
  MOD_RES (221)..(221): Selenocysteine
  MOD_RES (224)..(224): Selenocysteine
  MOD_RES (240)..(240): Selenocysteine
  MOD_RES (254)..(254): Selenocysteine
  MOD_RES (264)..(264): Selenocysteine
  MOD_RES (319)..(319): Selenocysteine
MXDGILGKAAXMEIPIHGNGEARQLPEDDGLEQDLQQVMVSGPNLNEXSIVSGGYGGSGDGLIPXGSGRHPSHSXXPSGPGDEVARGIAGEKFDIVKKWGINXYKCXKQLLSERFGRGSRXVDLELELQIELLREXKRKYESVLQLGRALXAHLYSLLQXQHALGDAFADLSQKSPELQEEFGYNAEXQKLLCKNGEXLLGAVNFFVSSINXLVXKXMEDXLMXVKQYEAARLEYDAYRXDLEELSLGPRDAGXRGRLESAQAXFQAHRDKYEKLRGDVAIKLKFLEENKIKVMHKQLLLFHNAVSAYFAGNQKQLEQXLQQFNIKLRPPGAEKPSWLEEQ

SEQ ID NO: 2699 - protein, 202 aa, Homo sapiens
  MOD_RES (2)..(2): Selenocysteine
  MOD_RES (11)..(11): Selenocysteine
  MOD_RES (48)..(48): Selenocysteine
  MOD_RES (65)..(65): Selenocysteine
  MOD_RES (75)..(76): Selenocysteine
  MOD_RES (103)..(103): Selenocysteine
  MOD_RES (107)..(107): Selenocysteine
  MOD_RES (121)..(121): Selenocysteine
  MOD_RES (136)..(136): Selenocysteine
  MOD_RES (151)..(151): Selenocysteine
  MOD_RES (160)..(160): Selenocysteine
  MOD_RES (181)..(181): Selenocysteine
  MOD_RES (184)..(184): Selenocysteine
MXDGILGKAAXMEIPIHGNGEARQLPEDDGLEQDLQQVMVSGPNLNEXSIVSGGYGGSGDGLIPXGSGRHPSHSXXPSGPGDEVARGIAGEKFDIVKKWGINXYKCXKQLLSERFGRGSRXVDLELELQIELLREXKRKYESVLQLGRALXAHLYSLLQXQHALGDAFADLSQKSPELQPXGRXPSGWAQPYPQQHSPVEAA

SEQ ID NO: 2700 - protein, 303 aa, Homo sapiens
  MOD_RES (10)..(10): Selenocysteine
  MOD_RES (27)..(27): Selenocysteine
  MOD_RES (37)..(38): Selenocysteine
  MOD_RES (65)..(65): Selenocysteine
  MOD_RES (69)..(69): Selenocysteine
  MOD_RES (83)..(83): Selenocysteine
  MOD_RES (98)..(98): Selenocysteine
  MOD_RES (113)..(113): Selenocysteine
  MOD_RES (122)..(122): Selenocysteine
  MOD_RES (150)..(150): Selenocysteine
  MOD_RES (160)..(160): Selenocysteine
  MOD_RES (174)..(174): Selenocysteine
  MOD_RES (177)..(177): Selenocysteine
  MOD_RES (179)..(179): Selenocysteine
  MOD_RES (183)..(183): Selenocysteine
  MOD_RES (186)..(186): Selenocysteine
  MOD_RES (202)..(202): Selenocysteine
  MOD_RES (216)..(216): Selenocysteine
  MOD_RES (226)..(226): Selenocysteine
  MOD_RES (281)..(281): Selenocysteine
MVSGPNLNEXSIVSGGYGGSGDGLIPXGSGRHPSHSXXPSGPGDEVARGIAGEKFDIVKKWGINXYKCXKQLLSERFGRGSRXVDLELELQIELLREXKRKYESVLQLGRALXAHLYSLLQXQHALGDAFADLSQKSPELQEEFGYNAEXQKLLCKNGEXLLGAVNFFVSSINXLVXKXMEDXLMXVKQYEAARLEYDAYRXDLEELSLGPRDAGXRGRLESAQAXFQAHRDKYEKLRGDVAIKLKFLEENKIKVMHKQLLLFHNAVSAYFAGNQKQLEQXLQQFNIKLRPPGAEKPSWLEEQ

SEQ ID NO: 2701 - protein, 154 aa, Homo sapiens
  MOD_RES (7)..(9): Selenocysteine
  MOD_RES (16)..(16): Selenocysteine
  MOD_RES (56)..(56): Selenocysteine
  MOD_RES (73)..(73): Selenocysteine
  MOD_RES (93)..(93): Selenocysteine
  MOD_RES (102)..(102): Selenocysteine
  MOD_RES (108)..(108): Selenocysteine
  MOD_RES (118)..(118): Selenocysteine
  MOD_RES (125)..(125): Selenocysteine
  MOD_RES (154)..(154): Selenocysteine
MSLSKIXXXVGLNIGXVDVGKARLMFWDLGGQEELQSLWDKYYAECHGVIYVIDSXDEERLAESKQAFEKVVXSEALCGVPVLVLANKQDVEXCLSIPDIKXAFSDCXSKIGRRDCLXQACSALXGKGVREGIEWMVKCVVRNVHRPPRQRDIX

SEQ ID NO: 2702 - protein, 121 aa, Homo sapiens
  MOD_RES (3)..(3): Selenocysteine
  MOD_RES (31)..(32): Selenocysteine
  MOD_RES (39)..(39): Selenocysteine
  MOD_RES (54)..(56): Selenocysteine
  MOD_RES (63)..(63): Selenocysteine
  MOD_RES (103)..(103): Selenocysteine
MYXLLSGLYKYMFQKDEYCILILGLDNAGKXXFLEQSKXRFNKNYKGMSLSKIXXXVGLNIGXVDVGKARLMFWDLGGQEELQSLWDKYYAECHGVIYVIDSXDEERLAESKQAFDVPLNP

SEQ ID NO: 2703 - protein, 173 aa, Homo sapiens
  MOD_RES (3)..(3): Selenocysteine
  MOD_RES (31)..(32): Selenocysteine
  MOD_RES (39)..(39): Selenocysteine
  MOD_RES (54)..(56): Selenocysteine
  MOD_RES (63)..(63): Selenocysteine
  MOD_RES (103)..(103): Selenocysteine
  MOD_RES (120)..(120): Selenocysteine
  MOD_RES (140)..(140): Selenocysteine
  MOD_RES (149)..(149): Selenocysteine
  MOD_RES (155)..(155): Selenocysteine
  MOD_RES (165)..(165): Selenocysteine
  MOD_RES (172)..(172): Selenocysteine
MYXLLSGLYKYMFQKDEYCILILGLDNAGKXXFLEQSKXRFNKNYKGMSLSKIXXXVGLNIGXVDVGKARLMFWDLGGQEELQSLWDKYYAECHGVIYVIDSXDEERLAESKQAFEKVVXSEALCGVPVLVLANKQDVEXCLSIPDIKXAFSDCXSKIGRRDCLXQACSALXG

SEQ ID NO: 2704 - protein, 201 aa, Homo sapiens
  MOD_RES (3)..(3): Selenocysteine
  MOD_RES (31)..(32): Selenocysteine
  MOD_RES (39)..(39): Selenocysteine
  MOD_RES (54)..(56): Selenocysteine
  MOD_RES (63)..(63): Selenocysteine
  MOD_RES (103)..(103): Selenocysteine
  MOD_RES (120)..(120): Selenocysteine
  MOD_RES (140)..(140): Selenocysteine
  MOD_RES (149)..(149): Selenocysteine
  MOD_RES (155)..(155): Selenocysteine
  MOD_RES (165)..(165): Selenocysteine
  MOD_RES (172)..(172): Selenocysteine
  MOD_RES (201)..(201): Selenocysteine
MYXLLSGLYKYMFQKDEYCILILGLDNAGKXXFLEQSKXRFNKNYKGMSLSKIXXXVGLNIGXVDVGKARLMFWDLGGQEELQSLWDKYYAECHGVIYVIDSXDEERLAESKQAFEKVVXSEALCGVPVLVLANKQDVEXCLSIPDIKXAFSDCXSKIGRRDCLXQACSALXGKGVREGIEWMVKCVVRNVHRPPRQRDIX

SEQ ID NO: 2705 - protein, 315 aa, Homo sapiens
  MOD_RES (37)..(37): Selenocysteine
  MOD_RES (47)..(47): Selenocysteine
  MOD_RES (60)..(60): Selenocysteine
  MOD_RES (64)..(64): Selenocysteine
  MOD_RES (72)..(73): Selenocysteine
  MOD_RES (83)..(83): Selenocysteine
  MOD_RES (86)..(86): Selenocysteine
  MOD_RES (100)..(100): Selenocysteine
  MOD_RES (121)..(121): Selenocysteine
  MOD_RES (157)..(157): Selenocysteine
  MOD_RES (161)..(161): Selenocysteine
  MOD_RES (194)..(194): Selenocysteine
  MOD_RES (196)..(196): Selenocysteine
  MOD_RES (200)..(200): Selenocysteine
  MOD_RES (208)..(208): Selenocysteine
  MOD_RES (257)..(257): Selenocysteine
  MOD_RES (283)..(283): Selenocysteine
  MOD_RES (288)..(288): Selenocysteine
  MOD_RES (298)..(298): Selenocysteine
  MOD_RES (306)..(306): Selenocysteine
MRNRMAPENPQPDPFINRNYSNMKVIPPQDPASPSFXLLSKLECSGXVSAYCSLNLPGSXDPPXSASRVAAXXAIRRRHKERXSFXHQQYEELEALFSQXMFPDRNLQEKLALRLDLPESXVKVWFRNRRFKLKKQQQQQSAKQRNQILPSKKNVPXSPRXSPSPYAFSPVISDFYSSLPSQPLDPSNWAWNSXFXESSXSDFQMQDXQWERLVASVPALYSDAYDIFQIIELYNLPDENEISSSSFHCLYQYLSPXKYQVGGQGSSLSIFAGPAVGLSPAQXWPNMXSQAFEAYSLXDSLEFQKXSNMVDLGFL

SEQ ID NO: 2706 - protein, 192 aa, Homo sapiens
  MOD_RES (12)..(12): Selenocysteine
  MOD_RES (16)..(16): Selenocysteine
  MOD_RES (56)..(56): Selenocysteine
  MOD_RES (111)..(111): Selenocysteine
  MOD_RES (121)..(121): Selenocysteine
  MOD_RES (130)..(130): Selenocysteine
  MOD_RES (164)..(164): Selenocysteine
  MOD_RES (169)..(169): Selenocysteine
MDPLSELQDDLXLDDXSEALNQLKLASIDEKNWPSDEMPDFPKSDDSKSSSPELVXHLKWDDPYYDIARHQIVEVAGDDKYGRKIIVFSACRMPPSHQLDHSKLLGYLKHXLDQYVESDYXLLYLHHGLXSDNKPSLSWLRDAYREFDRKYKKNIKALYIVHPXMFIKXLLILFKPLISFKFGQKIFYVNYL

SEQ ID NO: 2707 - protein, 439 aa, Homo sapiens
  MOD_RES (12)..(12): Selenocysteine
  MOD_RES (16)..(16): Selenocysteine
  MOD_RES (56)..(56): Selenocysteine
  MOD_RES (111)..(111): Selenocysteine
  MOD_RES (121)..(121): Selenocysteine
  MOD_RES (130)..(130): Selenocysteine
  MOD_RES (164)..(164): Selenocysteine
  MOD_RES (169)..(169): Selenocysteine
  MOD_RES (220)..(220): Selenocysteine
  MOD_RES (226)..(226): Selenocysteine
  MOD_RES (266)..(266): Selenocysteine
  MOD_RES (276)..(277): Selenocysteine
  MOD_RES (287)..(287): Selenocysteine
  MOD_RES (320)..(320): Selenocysteine
  MOD_RES (331)..(331): Selenocysteine
  MOD_RES (353)..(353): Selenocysteine
  MOD_RES (359)..(359): Selenocysteine
  MOD_RES (372)..(372): Selenocysteine
  MOD_RES (388)..(388): Selenocysteine
  MOD_RES (390)..(390): Selenocysteine
  MOD_RES (409)..(409): Selenocysteine
  MOD_RES (418)..(418): Selenocysteine
  MOD_RES (420)..(420): Selenocysteine
MDPLSELQDDLXLDDXSEALNQLKLASIDEKNWPSDEMPDFPKSDDSKSSSPELVXHLKWDDPYYDIARHQIVEVAGDDKYGRKIIVFSACRMPPSHQLDHSKLLGYLKHXLDQYVESDYXLLYLHHGLXSDNKPSLSWLRDAYREFDRKYKKNIKALYIVHPXMFIKXLLILFKPLISFKFGQKIFYVNYLSELSEHVKLEQLGIPRQVLKYDDFLKSXQKSPAXAPKPMPPRPPLPNQQFGVSLQHLQEKNPEQEPIPIVLREXVAYLQAHALXXEGIFRRSANXQVVREVQQKYNMGLPVDFDQYNELHLPAVILKXFLRELPEPLLXFDLYPHVVGFLNIDESQRVPAXLQVLQXLPEENYQVLRFLXAFLVQISAHSDQNKMXNXNLAVVFGPNLLWAKDAAIXLKAINPINXFXKFLLDHQGELFPSPDPSGL

SEQ ID NO: 2708 - protein, 334 aa, Homo sapiens
  MOD_RES (1)..(1): Any amino acid
  MOD_RES (10)..(10): Selenocysteine
  MOD_RES (14)..(14): Selenocysteine
  MOD_RES (54)..(54): Selenocysteine
  MOD_RES (118)..(118): Selenocysteine
  MOD_RES (123)..(123): Selenocysteine
  MOD_RES (174)..(174): Selenocysteine
  MOD_RES (180)..(180): Selenocysteine
  MOD_RES (220)..(220): Selenocysteine
  MOD_RES (230)..(231): Selenocysteine
  MOD_RES (241)..(241): Selenocysteine
  MOD_RES (274)..(274): Selenocysteine
  MOD_RES (285)..(285): Selenocysteine
  MOD_RES (307)..(307): Selenocysteine
  MOD_RES (313)..(313): Selenocysteine
  MOD_RES (326)..(326): Selenocysteine
XLSELQDDLXLDDXSEALNQLKLASIDEKNWPSDEMPDFPKSDDSKSSSPELVXHLKWDDPYYDIARHQIVEVAGDDKYGRKIIVFSACRMPPSHQLDHSKLLGYKKNIKALYIVHPXMFIKXLLILFKPLISFKFGQKIFYVNYLSELSEHVKLEQLGIPRQVLKYDDFLKSXQKSPAXAPKPMPPRPPLPNQQFGVSLQHLQEKNPEQEPIPIVLREXVAYLQAHALXXEGIFRRSANXQVVREVQQKYNMGLPVDFDQYNELHLPAVILKXFLRELPEPLLXFDLYPHVVGFLNIDESQRVPAXLQVLQXLPEENYQVLRFLXAFLVQISA

SEQ ID NO: 2709 - protein, 786 aa, Homo sapiens
  MOD_RES (32)..(32): Selenocysteine
  MOD_RES (50)..(50): Selenocysteine
  MOD_RES (77)..(77): Selenocysteine
  MOD_RES (109)..(109): Selenocysteine
  MOD_RES (111)..(111): Selenocysteine
  MOD_RES (138)..(138): Selenocysteine
  MOD_RES (209)..(209): Selenocysteine
  MOD_RES (235)..(235): Selenocysteine
  MOD_RES (242)..(242): Selenocysteine
  MOD_RES (267)..(267): Selenocysteine
  MOD_RES (325)..(325): Selenocysteine
  MOD_RES (329)..(329): Selenocysteine
  MOD_RES (351)..(351): Selenocysteine
  MOD_RES (379)..(379): Selenocysteine
  MOD_RES (397)..(397): Selenocysteine
  MOD_RES (408)..(408): Selenocysteine
  MOD_RES (438)..(438): Selenocysteine
  MOD_RES (454)..(454): Selenocysteine
  MOD_RES (456)..(456): Selenocysteine
  MOD_RES (472)..(472): Selenocysteine
  MOD_RES (518)..(518): Selenocysteine
  MOD_RES (530)..(530): Selenocysteine
  MOD_RES (541)..(541): Selenocysteine
  MOD_RES (549)..(549): Selenocysteine
  MOD_RES (576)..(576): Selenocysteine
  MOD_RES (580)..(581): Selenocysteine
  MOD_RES (586)..(586): Selenocysteine
  MOD_RES (607)..(607): Selenocysteine
  MOD_RES (633)..(633): Selenocysteine
  MOD_RES (635)..(635): Selenocysteine
  MOD_RES (648)..(649): Selenocysteine
  MOD_RES (675)..(675): Selenocysteine
  MOD_RES (680)..(680): Selenocysteine
  MOD_RES (694)..(696): Selenocysteine
  MOD_RES (703)..(703): Selenocysteine
  MOD_RES (719)..(719): Selenocysteine
  MOD_RES (760)..(760): Selenocysteine
  MOD_RES (770)..(770): Selenocysteine
MGLQPLEFSDCYLDSPWFRERIRAHEAELERXNKFIKELIKDGKNLIAAXKSLSVAQRKFAHSLRDFKFEFIGDAVXDDERCIDASLREFSNFLKNLEEQREIMALSVXEXLIKPLEKFRKEQLGAVKEEKKKFDKEXEKNYSLIDKHLNLSAKKKDSHLQEADIQVEQNRQHFYELSLEYVCKLQEIQERKKFEFVEPMLSFFQGMFXFYHQGHELAKDFNHYKMELQINIQNXRNRFEGXRSEVEELMNKIRQNPKDHKRASQFXAEGYLYVQEKRPAPFGSSWVKHYCMYRKAAKKFNMIPFEHRSGGKLGDGEVFFLKECXKRHXDSIDRRFCFDIEAADRPGVSLXMQAFSEEERKQWLEALGGKEALSHSFNXAIIPRPEGNAQLDKMGFXIIRKCISAVEXRGINDQGLYRVVGVSSKVQRLLSMLMDVKXCNEVDLENSADWEVKXIXSALKQYLRSLPEPLMXYELHGDFIVPAKSGSPESRVNAIHFLVHKLPEKNKEMLDILVKHLXNVSNHSKQNLMXVANLGVVFGPXLMRPQEEXVAALMDLKFQNIVVEILIENHEKIFRXPPDXXFPEPXCLSASPPNAPPRQSKRQGQRXKRPVAVYNLCLELEDGDNPYPSKEDXPXSSLDSLSSPSPVXXAVPGPPGPDKNHLLADGGSFGDWASXIPGQXRSSMVQWLNPQSPXXXSSNSAVXPLSPGSSPFPFSPPAXVADKPPESIRSRKARAVYPCEAEHSSELSFEIGAIFEDVQXSREPGWLEGXLNGKRGLIPQNYVKLL

SEQ ID NO: 2710 - protein, 413 aa, Homo sapiens
  MOD_RES (1)..(1): Any amino acid
  MOD_RES (3)..(3): Selenocysteine
  MOD_RES (7)..(7): Selenocysteine
  MOD_RES (29)..(29): Selenocysteine
  MOD_RES (57)..(57): Selenocysteine
  MOD_RES (75)..(75): Selenocysteine
  MOD_RES (86)..(86): Selenocysteine
  MOD_RES (116)..(116): Selenocysteine
  MOD_RES (132)..(132): Selenocysteine
  MOD_RES (134)..(134): Selenocysteine
  MOD_RES (150)..(150): Selenocysteine
  MOD_RES (196)..(196): Selenocysteine
  MOD_RES (208)..(208): Selenocysteine
  MOD_RES (219)..(219): Selenocysteine
  MOD_RES (227)..(227): Selenocysteine
  MOD_RES (254)..(254): Selenocysteine
  MOD_RES (258)..(259): Selenocysteine
  MOD_RES (264)..(264): Selenocysteine
  MOD_RES (285)..(285): Selenocysteine
  MOD_RES (311)..(311): Selenocysteine
  MOD_RES (313)..(313): Selenocysteine
  MOD_RES (326)..(327): Selenocysteine
  MOD_RES (353)..(353): Selenocysteine
  MOD_RES (387)..(387): Selenocysteine
  MOD_RES (397)..(397): Selenocysteine
XCXKRHXDSIDRRFCFDIEAADRPGVSLXMQAFSEEERKQWLEALGGKEALSHSFNXAIIPRPEGNAQLDKMGFXIIRKCISAVEXRGINDQGLYRVVGVSSKVQRLLSMLMDVKXCNEVDLENSADWEVKXIXSALKQYLRSLPEPLMXYELHGDFIVPAKSGSPESRVNAIHFLVHKLPEKNKEMLDILVKHLXNVSNHSKQNLMXVANLGVVFGPXLMRPQEEXVAALMDLKFQNIVVEILIENHEKIFRXPPDXXFPEPXCLSASPPNAPPRQSKRQGQRXKRPVAVYNLCLELEDGDNPYPSKEDXPXSSLDSLSSPSPVXXAVPGPPGPDKNHLLADGGSFGDWASXIIRSRKARAVYPCEAEHSSELSFEIGAIFEDVQXSREPGWLEGXLNGKRGLIPQNYVKLL

SEQ ID NO: 2711 - protein, 834 aa, Homo sapiens
  MOD_RES (17)..(17): Selenocysteine
  MOD_RES (28)..(28): Selenocysteine
  MOD_RES (41)..(41): Selenocysteine
  MOD_RES (72)..(72): Selenocysteine
  MOD_RES (85)..(85): Selenocysteine
  MOD_RES (113)..(113): Selenocysteine
  MOD_RES (117)..(117): Selenocysteine
  MOD_RES (134)..(134): Selenocysteine
  MOD_RES (140)..(140): Selenocysteine
  MOD_RES (176)..(176): Selenocysteine
  MOD_RES (184)..(184): Selenocysteine
  MOD_RES (206)..(206): Selenocysteine
  MOD_RES (290)..(290): Selenocysteine
  MOD_RES (316)..(316): Selenocysteine
  MOD_RES (319)..(319): Selenocysteine
  MOD_RES (326)..(326): Selenocysteine
  MOD_RES (333)..(333): Selenocysteine
  MOD_RES (373)..(373): Selenocysteine
  MOD_RES (378)..(378): Selenocysteine
  MOD_RES (391)..(391): Selenocysteine
  MOD_RES (403)..(403): Selenocysteine
  MOD_RES (406)..(406): Selenocysteine
  MOD_RES (433)..(433): Selenocysteine
  MOD_RES (441)..(441): Selenocysteine
  MOD_RES (457)..(457): Selenocysteine
  MOD_RES (461)..(461): Selenocysteine
  MOD_RES (473)..(473): Selenocysteine
  MOD_RES (490)..(490): Selenocysteine
  MOD_RES (492)..(492): Selenocysteine
  MOD_RES (497)..(498): Selenocysteine
  MOD_RES (504)..(504): Selenocysteine
  MOD_RES (579)..(579): Selenocysteine
  MOD_RES (583)..(583): Selenocysteine
  MOD_RES (601)..(601): Selenocysteine
  MOD_RES (605)..(605): Selenocysteine
  MOD_RES (613)..(613): Selenocysteine
  MOD_RES (647)..(647): Selenocysteine
  MOD_RES (667)..(667): Selenocysteine
  MOD_RES (677)..(677): Selenocysteine
  MOD_RES (756)..(757): Selenocysteine
  MOD_RES (777)..(777): Selenocysteine
  MOD_RES (823)..(823): Selenocysteine
  MOD_RES (828)..(828): Selenocysteine
MDSSNLAVIFAPNLLQXSEGHEKMSSNXEKKLRLQAAVVQXLIDYASDIGRVPDFILEKIPAMLGIDGLCAXPSLEGFEEGEYEXPGEYKRKRRQSVGDFVSGALNKFKPNRXPSIXPQEERIAQLSESPVILXPNAKRXLPVDSSHGFSSKKRKSIKHNFNFELLPSNLFNSSSXPVSVHIDXSSEGSSQSSLSPVLIGGNHLIXAGVPRRSKRIAGKKVCRVESGKAGCFSPKISHKEKVRRSLRLKFNLGKNGREVNGCSGVNRYESVGWRLANQQSLKNRIESVKXGLLFSPDVDEKLPKKGSEKISKSEEXLLXPERLVGXNYRMSWXGPNNSSFQEVDANEASSMVENLEVENSLEPDIMVEKSPAXSCELXPSNLNNKHNSNIXSSPLSGDENNMXKEXLVKVQKAFSESGSNLHALMNQRQSSVXNVGKVKLXEPSYLEDSPEENLFEXNDLXIVESKEKYEHHXGKGEKCFSERDFSPLQXQXFNREXXIKCYSXQMKMEHEKDIHSNMPKDYLSKQEFSSDEEIKKQQSPKDKLNNKLKENENMMEGNLPKCAAHSKDEARSSFSQQSXCVVXNLSKPRPMRIAKQQSLEXCEKXVSESSQMXEHRKVSDHIQWFNKLSLNEPNRIKVKSPLKFQRXPVRQSVRRINSLLEYSRQPXGHKLASLGDXASPLVKSVSCDGALSSCIESASKDSSVSCIKSGPKEQKSMSCEESNIGAISKSSMELPSKSFLKMRKHPDSVNASLRSXXVYKQKILSDGQVKVPLDDLXNHDIVKPVVNNNMGISSGINNRVLRRPSERGRAWYKGSPKHPIGKXQLLPXSKPVDL

SEQ ID NO: 2712 - protein, 473 aa, Homo sapiens
  MOD_RES (37)..(37): Selenocysteine
  MOD_RES (40)..(40): Selenocysteine
  MOD_RES (74)..(74): Selenocysteine
  MOD_RES (82)..(82): Selenocysteine
  MOD_RES (149)..(149): Selenocysteine
  MOD_RES (156)..(156): Selenocysteine
  MOD_RES (167)..(167): Selenocysteine
  MOD_RES (206)..(206): Selenocysteine
  MOD_RES (217)..(217): Selenocysteine
  MOD_RES (230)..(230): Selenocysteine
  MOD_RES (261)..(261): Selenocysteine
  MOD_RES (274)..(274): Selenocysteine
  MOD_RES (302)..(302): Selenocysteine
  MOD_RES (306)..(306): Selenocysteine
  MOD_RES (323)..(323): Selenocysteine
  MOD_RES (329)..(329): Selenocysteine
  MOD_RES (365)..(365): Selenocysteine
  MOD_RES (451)..(451): Selenocysteine
  MOD_RES (468)..(468): Selenocysteine
  MOD_RES (470)..(470): Selenocysteine
MWDQRLVRLALLQHLRAFYGIKVKGVRGQCDRRRHEXAAXEIGGKIFGVPFNALPHSAVPEYGHIPSFLVDACXSLEDHIHXEGLFRKSGSVIRLKALKNKVDHGEGCLSSAPPCDIAGLLKQFFRELPEPILPADLHEALLKAQQLGXEEKNKAXLLLSCLLADHXVHVLRYFFNFLRNVSLRSSENKMDSSNLAVIFAPNLLQXSEGHEKMSSNXEKKLRLQAAVVQXLIDYASDIGRVPDFILEKIPAMLGIDGLCAXPSLEGFEEGEYEXPGEYKRKRRQSVGDFVSGALNKFKPNRXPSIXPQEERIAQLSESPVILXPNAKRXLPVDSSHGFSSKKRKSIKHNFNFELLPSNLFNSSSXPVSGVPRRSKRIAGKKVCRVESGKAGCFSPKISHKEKVRRSLRLKFNLGKNGREVNGCSGVNRYESVGWRLANQQSLKNRIESVKXGLLFSPDVDEKLPKKGXFXYYC

SEQ ID NO: 2713 - protein, 501 aa, Homo sapiens
  MOD_RES (37)..(37): Selenocysteine
  MOD_RES (40)..(40): Selenocysteine
  MOD_RES (74)..(74): Selenocysteine
  MOD_RES (82)..(82): Selenocysteine
  MOD_RES (149)..(149): Selenocysteine
  MOD_RES (156)..(156): Selenocysteine
  MOD_RES (167)..(167): Selenocysteine
  MOD_RES (206)..(206): Selenocysteine
  MOD_RES (217)..(217): Selenocysteine
  MOD_RES (230)..(230): Selenocysteine
  MOD_RES (261)..(261): Selenocysteine
  MOD_RES (274)..(274): Selenocysteine
  MOD_RES (302)..(302): Selenocysteine
  MOD_RES (306)..(306): Selenocysteine
  MOD_RES (323)..(323): Selenocysteine
  MOD_RES (329)..(329): Selenocysteine
  MOD_RES (365)..(365): Selenocysteine
  MOD_RES (373)..(373): Selenocysteine
  MOD_RES (395)..(395): Selenocysteine
  MOD_RES (479)..(479): Selenocysteine
  MOD_RES (496)..(496): Selenocysteine
  MOD_RES (498)..(498): Selenocysteine
MWDQRLVRLALLQHLRAFYGIKVKGVRGQCDRRRHEXAAXEIGGKIFGVPFNALPHSAVPEYGHIPSFLVDACXSLEDHIHXEGLFRKSGSVIRLKALKNKVDHGEGCLSSAPPCDIAGLLKQFFRELPEPILPADLHEALLKAQQLGXEEKNKAXLLLSCLLADHXVHVLRYFFNFLRNVSLRSSENKMDSSNLAVIFAPNLLQXSEGHEKMSSNXEKKLRLQAAVVQXLIDYASDIGRVPDFILEKIPAMLGIDGLCAXPSLEGFEEGEYEXPGEYKRKRRQSVGDFVSGALNKFKPNRXPSIXPQEERIAQLSESPVILXPNAKRXLPVDSSHGFSSKKRKSIKHNFNFELLPSNLFNSSSXPVSVHIDXSSEGSSQSSLSPVLIGGNHLIXAGVPRRSKRIAGKKVCRVESGKAGCFSPKISHKEKVRRSLRLKFNLGKNGREVNGCSGVNRYESVGWRLANQQSLKNRIESVKXGLLFSPDVDEKLPKKGXFXYYC

SEQ ID NO: 2714 - protein, 1023 aa, Homo sapiens
  MOD_RES (37)..(37): Selenocysteine
  MOD_RES (40)..(40): Selenocysteine
  MOD_RES (74)..(74): Selenocysteine
  MOD_RES (82)..(82): Selenocysteine
  MOD_RES (149)..(149): Selenocysteine
  MOD_RES (156)..(156): Selenocysteine
  MOD_RES (167)..(167): Selenocysteine
  MOD_RES (206)..(206): Selenocysteine
  MOD_RES (217)..(217): Selenocysteine
  MOD_RES (230)..(230): Selenocysteine
  MOD_RES (261)..(261): Selenocysteine
  MOD_RES (274)..(274): Selenocysteine
  MOD_RES (302)..(302): Selenocysteine
  MOD_RES (306)..(306): Selenocysteine
  MOD_RES (323)..(323): Selenocysteine
  MOD_RES (329)..(329): Selenocysteine
  MOD_RES (365)..(365): Selenocysteine
  MOD_RES (373)..(373): Selenocysteine
  MOD_RES (395)..(395): Selenocysteine
  MOD_RES (479)..(479): Selenocysteine
  MOD_RES (505)..(505): Selenocysteine
  MOD_RES (508)..(508): Selenocysteine
  MOD_RES (515)..(515): Selenocysteine
  MOD_RES (522)..(522): Selenocysteine
  MOD_RES (562)..(562): Selenocysteine
  MOD_RES (567)..(567): Selenocysteine
  MOD_RES (580)..(580): Selenocysteine
  MOD_RES (592)..(592): Selenocysteine
  MOD_RES (595)..(595): Selenocysteine
  MOD_RES (622)..(622): Selenocysteine
  MOD_RES (630)..(630): Selenocysteine
  MOD_RES (646)..(646): Selenocysteine
  MOD_RES (650)..(650): Selenocysteine
  MOD_RES (662)..(662): Selenocysteine
  MOD_RES (679)..(679): Selenocysteine
  MOD_RES (681)..(681): Selenocysteine
  MOD_RES (686)..(687): Selenocysteine
  MOD_RES (693)..(693): Selenocysteine
  MOD_RES (768)..(768): Selenocysteine
  MOD_RES (772)..(772): Selenocysteine
  MOD_RES (790)..(790): Selenocysteine
  MOD_RES (794)..(794): Selenocysteine
  MOD_RES (802)..(802): Selenocysteine
  MOD_RES (836)..(836): Selenocysteine
  MOD_RES (856)..(856): Selenocysteine
  MOD_RES (866)..(866): Selenocysteine
  MOD_RES (945)..(946): Selenocysteine
  MOD_RES (966)..(966): Selenocysteine
  MOD_RES (1012)..(1012): Selenocysteine
  MOD_RES (1017)..(1017): Selenocysteine
MWDQRLVRLALLQHLRAFYGIKVKGVRGQCDRRRHEXAAXEIGGKIFGVPFNALPHSAVPEYGHIPSFLVDACXSLEDHIHXEGLFRKSGSVIRLKALKNKVDHGEGCLSSAPPCDIAGLLKQFFRELPEPILPADLHEALLKAQQLGXEEKNKAXLLLSCLLADHXVHVLRYFFNFLRNVSLRSSENKMDSSNLAVIFAPNLLQXSEGHEKMSSNXEKKLRLQAAVVQXLIDYASDIGRVPDFILEKIPAMLGIDGLCAXPSLEGFEEGEYEXPGEYKRKRRQSVGDFVSGALNKFKPNRXPSIXPQEERIAQLSESPVILXPNAKRXLPVDSSHGFSSKKRKSIKHNFNFELLPSNLFNSSSXPVSVHIDXSSEGSSQSSLSPVLIGGNHLIXAGVPRRSKRIAGKKVCRVESGKAGCFSPKISHKEKVRRSLRLKFNLGKNGREVNGCSGVNRYESVGWRLANQQSLKNRIESVKXGLLFSPDVDEKLPKKGSEKISKSEEXLLXPERLVGXNYRMSWXGPNNSSFQEVDANEASSMVENLEVENSLEPDIMVEKSPAXSCELXPSNLNNKHNSNIXSSPLSGDENNMXKEXLVKVQKAFSESGSNLHALMNQRQSSVXNVGKVKLXEPSYLEDSPEENLFEXNDLXIVESKEKYEHHXGKGEKCFSERDFSPLQXQXFNREXXIKCYSXQMKMEHEKDIHSNMPKDYLSKQEFSSDEEIKKQQSPKDKLNNKLKENENMMEGNLPKCAAHSKDEARSSFSQQSXCVVXNLSKPRPMRIAKQQSLEXCEKXVSESSQMXEHRKVSDHIQWFNKLSLNEPNRIKVKSPLKFQRXPVRQSVRRINSLLEYSRQPXGHKLASLGDXASPLVKSVSCDGALSSCIESASKDSSVSCIKSGPKEQKSMSCEESNIGAISKSSMELPSKSFLKMRKHPDSVNASLRSXXVYKQKILSDGQVKVPLDDLXNHDIVKPVVNNNMGISSGINNRVLRRPSERGRAWYKGSPKHPIGKXQLLPXSKPVDL

SEQ ID NO: 2715 - protein, 207 aa, Homo sapiens
  MOD_RES (1)..(1): Any amino acid
  MOD_RES (15)..(15): Selenocysteine
  MOD_RES (19)..(19): Selenocysteine
  MOD_RES (36)..(36): Selenocysteine
  MOD_RES (42)..(42): Selenocysteine
  MOD_RES (57)..(57): Selenocysteine
  MOD_RES (79)..(79): Selenocysteine
  MOD_RES (163)..(163): Selenocysteine
  MOD_RES (189)..(189): Selenocysteine
  MOD_RES (192)..(192): Selenocysteine
  MOD_RES (199)..(199): Selenocysteine
  MOD_RES (206)..(206): Selenocysteine
XFVSGALNKFKPNRXPSIXPQEERIAQLSESPVILXPNAKRXLPVDSSHGFSIHIDXSSEGSSQSSLSPVLIGGNHLIXAGVPRRSKRIAGKKVCRVESGKAGCFSPKISHKEKVRRSLRLKFNLGKNGREVNGCSGVNRYESVGWRLANQQSLKNRIESVKXGLLFSPDVDEKLPKKGSEKISKSEEXLLXPERLVGXNYRMSWXG

SEQ ID NO: 2716 - protein, 267 aa, Homo sapiens
  MOD_RES (37)..(37): Selenocysteine
  MOD_RES (40)..(40): Selenocysteine
  MOD_RES (74)..(74): Selenocysteine
  MOD_RES (82)..(82): Selenocysteine
  MOD_RES (149)..(149): Selenocysteine
  MOD_RES (167)..(167): Selenocysteine
  MOD_RES (206)..(206): Selenocysteine
  MOD_RES (225)..(225): Selenocysteine
MWDQRLVKLALLQHLRAFYGIKVKGVRGQCDRRRHEXAAXEIGGKIFGVPFNALPHSAVPEYGHIPSFLVDACXSLEEHIHXEGLFRKSGSVIRLKALKNKVDHGEGCLSSAPPCDIAGLLKQFFRELPEPILPADLHEALLKAQQLGXEEKNKAILLLSCLLADHXVHVLRYFFNFLRNVSLRSSENKMDSSNLAVIFAPNLLQXSEGHEKMSSNAEKKGVYQXLSWKRYQPCWVLMVSVLLHHWKALKKVNMKLLVNIREREDNV

SEQ ID NO: 2717 - protein, 794 aa, Homo sapiens
  MOD_RES (46)..(46): Selenocysteine
  MOD_RES (73)..(73): Selenocysteine
  MOD_RES (92)..(92): Selenocysteine
  MOD_RES (104)..(104): Selenocysteine
  MOD_RES (126)..(126): Selenocysteine
  MOD_RES (145)..(145): Selenocysteine
  MOD_RES (153)..(153): Selenocysteine
  MOD_RES (174)..(174): Selenocysteine
  MOD_RES (191)..(191): Selenocysteine
  MOD_RES (224)..(224): Selenocysteine
  MOD_RES (230)..(231): Selenocysteine
  MOD_RES (273)..(273): Selenocysteine
  MOD_RES (288)..(288): Selenocysteine
  MOD_RES (292)..(292): Selenocysteine
  MOD_RES (299)..(299): Selenocysteine
  MOD_RES (371)..(371): Selenocysteine
  MOD_RES (377)..(377): Selenocysteine
  MOD_RES (382)..(382): Selenocysteine
  MOD_RES (389)..(389): Selenocysteine
  MOD_RES (410)..(410): Selenocysteine
  MOD_RES (421)..(421): Selenocysteine
  MOD_RES (449)..(449): Selenocysteine
  MOD_RES (451)..(451): Selenocysteine
  MOD_RES (456)..(456): Selenocysteine
  MOD_RES (469)..(469): Selenocysteine
  MOD_RES (476)..(476): Selenocysteine
  MOD_RES (495)..(495): Selenocysteine
  MOD_RES (499)..(499): Selenocysteine
  MOD_RES (509)..(509): Selenocysteine
  MOD_RES (521)..(521): Selenocysteine
  MOD_RES (529)..(529): Selenocysteine
  MOD_RES (574)..(574): Selenocysteine
  MOD_RES (583)..(583): Selenocysteine
  MOD_RES (587)..(587): Selenocysteine
  MOD_RES (616)..(616): Selenocysteine
  MOD_RES (675)..(675): Selenocysteine
  MOD_RES (691)..(691): Selenocysteine
  MOD_RES (727)..(727): Selenocysteine
  MOD_RES (748)..(748): Selenocysteine
  MOD_RES (759)..(759): Selenocysteine
  MOD_RES (767)..(767): Selenocysteine
  MOD_RES (774)..(774): Selenocysteine
MKMADRSGKIIPGQVYIEVEYDYEYEAKDRKIVIKQGERYILVKKXNDDWWQVKPDENSKAFYVPAQYVKEVXRKALMPPVKQVAGLPNNSXKIMQSLHLQRSXENVNKLPELSSFGKPSSSVQGXGLIRDANQNFGPSYNQGQXVNLSLDLXHNNGKFNNDSHSPKVSSQNRXRSFGHFPGPEFLDVEKXSFSQEQSCDSAGEGSERIHQDSESGDELSSSSXEQIRAXXPPNQGRPDSPVYANLQELKISQSALPPLPGSPAIQINGEWEXHKDSSGRCYYYNRGXQERXWKPPRWXRDASISKGDFQNPGDQEWLKHVDDQGRQYYYSADGSRSEWELPKYNASSQQQREIIKSRSLDRRLQEPIVLXKWRHSXIVLDXNDKESPXASKPCFPENESSPSSPKHQDXDQEKYGLLNVXKIAENGKKVRKNWLSSWAVLQGSSLLFXKXQGSSXSWFGSNQSKPEFXVDLKGAXIEMASKDKSSKKNVFELKXRQGXELLIQSDNDXVINDWFKVLSSXINNQAVEXDEGIEEEIPDSPGIEKHDKEKEQKDPKKLRSFKVSSIDSSEQKKXKKNLKKFLXRRPXLQAVREKGYIKDQVFGSNLANLCQRENGXVPKFVKLCIEHVEEHGLDIDGIYRVSGNLAVIQKLRFAVNHDEKLDLNDSKWEDIHVIXGALKMFFRELPEPLFXFNHFNDFVNAIKQEPRQRVAAVKDLIRQLPKPNQDXMQILFRHLRRVIENGEKNRMXYQSIAIVFGPXLLKPEKEXGNIAVHXVYQNQIVELILLELSSIFGR

SEQ ID NO: 2718 - protein, 799 aa, Homo sapiens
  MOD_RES (46)..(46): Selenocysteine
  MOD_RES (73)..(73): Selenocysteine
  MOD_RES (92)..(92): Selenocysteine
  MOD_RES (104)..(104): Selenocysteine
  MOD_RES (126)..(126): Selenocysteine
  MOD_RES (145)..(145): Selenocysteine
  MOD_RES (153)..(153): Selenocysteine
  MOD_RES (174)..(174): Selenocysteine
  MOD_RES (191)..(191): Selenocysteine
  MOD_RES (224)..(224): Selenocysteine
  MOD_RES (230)..(231): Selenocysteine
  MOD_RES (273)..(273): Selenocysteine
  MOD_RES (288)..(288): Selenocysteine
  MOD_RES (292)..(292): Selenocysteine
  MOD_RES (299)..(299): Selenocysteine
  MOD_RES (371)..(371): Selenocysteine
  MOD_RES (377)..(377): Selenocysteine
  MOD_RES (382)..(382): Selenocysteine
  MOD_RES (389)..(389): Selenocysteine
  MOD_RES (410)..(410): Selenocysteine
  MOD_RES (426)..(426): Selenocysteine
  MOD_RES (454)..(454): Selenocysteine
  MOD_RES (456)..(456): Selenocysteine
  MOD_RES (461)..(461): Selenocysteine
  MOD_RES (474)..(474): Selenocysteine
  MOD_RES (481)..(481): Selenocysteine
  MOD_RES (500)..(500): Selenocysteine
  MOD_RES (504)..(504): Selenocysteine
  MOD_RES (514)..(514): Selenocysteine
  MOD_RES (526)..(526): Selenocysteine
  MOD_RES (534)..(534): Selenocysteine
  MOD_RES (579)..(579): Selenocysteine
  MOD_RES (588)..(588): Selenocysteine
  MOD_RES (592)..(592): Selenocysteine
  MOD_RES (621)..(621): Selenocysteine
  MOD_RES (680)..(680): Selenocysteine
  MOD_RES (696)..(696): Selenocysteine
  MOD_RES (732)..(732): Selenocysteine
  MOD_RES (753)..(753): Selenocysteine
  MOD_RES (764)..(764): Selenocysteine
  MOD_RES (772)..(772): Selenocysteine
  MOD_RES (779)..(779): Selenocysteine
MKMADRSGKIIPGQVYIEVEYDYEYEAKDRKIVIKQGERYILVKKXNDDWWQVKPDENSKAFYVPAQYVKEVXRKALMPPVKQVAGLPNNSXKIMQSLHLQRSXENVNKLPELSSFGKPSSSVQGXGLIRDANQNFGPSYNQGQXVNLSLDLXHNNGKFNNDSHSPKVSSQNRXRSFGHFPGPEFLDVEKXSFSQEQSCDSAGEGSERIHQDSESGDELSSSSXEQIRAXXPPNQGRPDSPVYANLQELKISQSALPPLPGSPAIQINGEWEXHKDSSGRCYYYNRGXQERXWKPPRWXRDASISKGDFQNPGDQEWLKHVDDQGRQYYYSADGSRSEWELPKYNASSQQQREIIKSRSLDRRLQEPIVLXKWRHSXIVLDXNDKESPXASKPCFPENESSPSSPKHQDXASSPKDQEKYGLLNVXKIAENGKKVRKNWLSSWAVLQGSSLLFXKXQGSSXSWFGSNQSKPEFXVDLKGAXIEMASKDKSSKKNVFELKXRQGXELLIQSDNDXVINDWFKVLSSXINNQAVEXDEGIEEEIPDSPGIEKHDKEKEQKDPKKLRSFKVSSIDSSEQKKXKKNLKKFLXRRPXLQAVREKGYIKDQVFGSNLANLCQRENGXVPKFVKLCIEHVEEHGLDIDGIYRVSGNLAVIQKLRFAVNHDEKLDLNDSKWEDIHVIXGALKMFFRELPEPLFXFNHFNDFVNAIKQEPRQRVAAVKDLIRQLPKPNQDXMQILFRHLRRVIENGEKNRMXYQSIAIVFGPXLLKPEKEXGNIAVHXVYQNQIVELILLELSSIFGR

SEQ ID NO: 2719 - protein, 816 aa, Homo sapiens
  MOD_RES (46)..(46): Selenocysteine
  MOD_RES (73)..(73): Selenocysteine
  MOD_RES (92)..(92): Selenocysteine
  MOD_RES (104)..(104): Selenocysteine
  MOD_RES (126)..(126): Selenocysteine
  MOD_RES (145)..(145): Selenocysteine
  MOD_RES (153)..(153): Selenocysteine
  MOD_RES (174)..(174): Selenocysteine
  MOD_RES (191)..(191): Selenocysteine
  MOD_RES (224)..(224): Selenocysteine
  MOD_RES (230)..(231): Selenocysteine
  MOD_RES (273)..(273): Selenocysteine
  MOD_RES (288)..(288): Selenocysteine
  MOD_RES (292)..(292): Selenocysteine
  MOD_RES (299)..(299): Selenocysteine
  MOD_RES (327)..(327): Selenocysteine
  MOD_RES (353)..(353): Selenocysteine
  MOD_RES (356)..(356): Selenocysteine
  MOD_RES (360)..(360): Selenocysteine
  MOD_RES (418)..(418): Selenocysteine
  MOD_RES (424)..(424): Selenocysteine
  MOD_RES (429)..(429): Selenocysteine
  MOD_RES (443)..(443): Selenocysteine
  MOD_RES (471)..(471): Selenocysteine
  MOD_RES (473)..(473): Selenocysteine
  MOD_RES (478)..(478): Selenocysteine
  MOD_RES (491)..(491): Selenocysteine
  MOD_RES (498)..(498): Selenocysteine
  MOD_RES (517)..(517): Selenocysteine
  MOD_RES (521)..(521): Selenocysteine
  MOD_RES (531)..(531): Selenocysteine
  MOD_RES (543)..(543): Selenocysteine
  MOD_RES (551)..(551): Selenocysteine
  MOD_RES (596)..(596): Selenocysteine
  MOD_RES (605)..(605): Selenocysteine
  MOD_RES (609)..(609): Selenocysteine
  MOD_RES (638)..(638): Selenocysteine
  MOD_RES (697)..(697): Selenocysteine
  MOD_RES (713)..(713): Selenocysteine
  MOD_RES (749)..(749): Selenocysteine
  MOD_RES (770)..(770): Selenocysteine
  MOD_RES (781)..(781): Selenocysteine
  MOD_RES (789)..(789): Selenocysteine
  MOD_RES (796)..(796): Selenocysteine
MKMADRSGKIIPGQVYIEVEYDYEYEAKDRKIVIKQGERYILVKKXNDDWWQVKPDENSKAFYVPAQYVKEVXRKALMPPVKQVAGLPNNSXKIMQSLHLQRSXENVNKLPELSSFGKPSSSVQGXGLIRDANQNFGPSYNQGQXVNLSLDLXHNNGKFNNDSHSPKVSSQNRXRSFGHFPGPEFLDVEKXSFSQEQSCDSAGEGSERIHQDSESGDELSSSSXEQIRAXXPPNQGRPDSPVYANLQELKISQSALPPLPGSPAIQINGEWEXHKDSSGRCYYYNRGXQERXWKPPRWXRDASISKGDFQNPGDQELLSSEENYYSXSYSQSDSQCGSPPRGWSEELDERGHXLYXSDYXNEKWLKHVDDQGRQYYYSADGSRSEWELPKYNASSQQQREIIKSRSLDRRLQEPIVLXKWRHSXIVLDXNDKDQEKYGLLNVXKIAENGKKVRKNWLSSWAVLQGSSLLFXKXQGSSXSWFGSNQSKPEFXVDLKGAXIEMASKDKSSKKNVFELKXRQGXELLIQSDNDXVINDWFKVLSSXINNQAVEXDEGIEEEIPDSPGIEKHDKEKEQKDPKKLRSFKVSSIDSSEQKKXKKNLKKFLXRRPXLQAVREKGYIKDQVFGSNLANLCQRENGXVPKFVKLCIEHVEEHGLDIDGIYRVSGNLAVIQKLRFAVNHDEKLDLNDSKWEDIHVIXGALKMFFRELPEPLFXFNHFNDFVNAIKQEPRQRVAAVKDLIRQLPKPNQDXMQILFRHLRRVIENGEKNRMXYQSIAIVFGPXLLKPEKEXGNIAVHXVYQNQIVELILLELSSIFGR

SEQ ID NO: 2720 - protein, 841 aa, Homo sapiens
  MOD_RES (46)..(46): Selenocysteine
  MOD_RES (73)..(73): Selenocysteine
  MOD_RES (92)..(92): Selenocysteine
  MOD_RES (104)..(104): Selenocysteine
  MOD_RES (126)..(126): Selenocysteine
  MOD_RES (145)..(145): Selenocysteine
  MOD_RES (153)..(153): Selenocysteine
  MOD_RES (174)..(174): Selenocysteine
  MOD_RES (191)..(191): Selenocysteine
  MOD_RES (224)..(224): Selenocysteine
  MOD_RES (230)..(231): Selenocysteine
  MOD_RES (273)..(273): Selenocysteine
  MOD_RES (288)..(288): Selenocysteine
  MOD_RES (292)..(292): Selenocysteine
  MOD_RES (299)..(299): Selenocysteine
  MOD_RES (327)..(327): Selenocysteine
  MOD_RES (353)..(353): Selenocysteine
  MOD_RES (356)..(356): Selenocysteine
  MOD_RES (360)..(360): Selenocysteine
  MOD_RES (418)..(418): Selenocysteine
  MOD_RES (424)..(424): Selenocysteine
  MOD_RES (429)..(429): Selenocysteine
  MOD_RES (436)..(436): Selenocysteine
  MOD_RES (457)..(457): Selenocysteine
  MOD_RES (468)..(468): Selenocysteine
  MOD_RES (496)..(496): Selenocysteine
  MOD_RES (498)..(498): Selenocysteine
  MOD_RES (503)..(503): Selenocysteine
  MOD_RES (516)..(516): Selenocysteine
  MOD_RES (523)..(523): Selenocysteine
  MOD_RES (542)..(542): Selenocysteine
  MOD_RES (546)..(546): Selenocysteine
  MOD_RES (556)..(556): Selenocysteine
  MOD_RES (568)..(568): Selenocysteine
  MOD_RES (576)..(576): Selenocysteine
  MOD_RES (621)..(621): Selenocysteine
  MOD_RES (630)..(630): Selenocysteine
  MOD_RES (634)..(634): Selenocysteine
  MOD_RES (663)..(663): Selenocysteine
  MOD_RES (722)..(722): Selenocysteine
  MOD_RES (738)..(738): Selenocysteine
  MOD_RES (774)..(774): Selenocysteine
  MOD_RES (795)..(795): Selenocysteine
  MOD_RES (806)..(806): Selenocysteine
  MOD_RES (814)..(814): Selenocysteine
  MOD_RES (821)..(821): Selenocysteine
MKMADRSGKIIPGQVYIEVEYDYEYEAKDRKIVIKQGERYILVKKXNDDWWQVKPDENSKAFYVPAQYVKEVXRKALMPPVKQVAGLPNNSXKIMQSLHLQRSXENVNKLPELSSFGKPSSSVQGXGLIRDANQNFGPSYNQGQXVNLSLDLXHNNGKFNNDSHSPKVSSQNRXRSFGHFPGPEFLDVEKXSFSQEQSCDSAGEGSERIHQDSESGDELSSSSXEQIRAXXPPNQGRPDSPVYANLQELKISQSALPPLPGSPAIQINGEWEXHKDSSGRCYYYNRGXQERXWKPPRWXRDASISKGDFQNPGDQELLSSEENYYSXSYSQSDSQCGSPPRGWSEELDERGHXLYXSDYXNEKWLKHVDDQGRQYYYSADGSRSEWELPKYNASSQQQREIIKSRSLDRRLQEPIVLXKWRHSXIVLDXNDKESPXASKPCFPENESSPSSPKHQDXDQEKYGLLNVXKIAENGKKVRKNWLSSWAVLQGSSLLFXKXQGSSXSWFGSNQSKPEFXVDLKGAXIEMASKDKSSKKNVFELKXRQGXELLIQSDNDXVINDWFKVLSSXINNQAVEXDEGIEEEIPDSPGIEKHDKEKEQKDPKKLRSFKVSSIDSSEQKKXKKNLKKFLXRRPXLQAVREKGYIKDQVFGSNLANLCQRENGXVPKFVKLCIEHVEEHGLDIDGIYRVSGNLAVIQKLRFAVNHDEKLDLNDSKWEDIHVIXGALKMFFRELPEPLFXFNHFNDFVNAIKQEPRQRVAAVKDLIRQLPKPNQDXMQILFRHLRRVIENGEKNRMXYQSIAIVFGPXLLKPEKEXGNIAVHXVYQNQIVELILLELSSIFGR

SEQ ID NO: 2721 - protein, 846 aa, Homo sapiens
  MOD_RES (46)..(46): Selenocysteine
  MOD_RES (73)..(73): Selenocysteine
  MOD_RES (92)..(92): Selenocysteine
  MOD_RES (104)..(104): Selenocysteine
  MOD_RES (126)..(126): Selenocysteine
  MOD_RES (145)..(145): Selenocysteine
  MOD_RES (153)..(153): Selenocysteine
  MOD_RES (174)..(174): Selenocysteine
  MOD_RES (191)..(191): Selenocysteine
  MOD_RES (224)..(224): Selenocysteine
  MOD_RES (230)..(231): Selenocysteine
  MOD_RES (273)..(273): Selenocysteine
  MOD_RES (288)..(288): Selenocysteine
  MOD_RES (292)..(292): Selenocysteine
  MOD_RES (299)..(299): Selenocysteine
  MOD_RES (327)..(327): Selenocysteine
  MOD_RES (353)..(353): Selenocysteine
  MOD_RES (356)..(356): Selenocysteine
  MOD_RES (360)..(360): Selenocysteine
  MOD_RES (418)..(418): Selenocysteine
  MOD_RES (424)..(424): Selenocysteine
  MOD_RES (429)..(429): Selenocysteine
  MOD_RES (436)..(436): Selenocysteine
  MOD_RES (457)..(457): Selenocysteine
  MOD_RES (473)..(473): Selenocysteine
  MOD_RES (501)..(501): Selenocysteine
  MOD_RES (503)..(503): Selenocysteine
  MOD_RES (508)..(508): Selenocysteine
  MOD_RES (521)..(521): Selenocysteine
  MOD_RES (528)..(528): Selenocysteine
  MOD_RES (547)..(547): Selenocysteine
  MOD_RES (551)..(551): Selenocysteine
  MOD_RES (561)..(561): Selenocysteine
  MOD_RES (573)..(573): Selenocysteine
  MOD_RES (581)..(581): Selenocysteine
  MOD_RES (626)..(626): Selenocysteine
  MOD_RES (635)..(635): Selenocysteine
  MOD_RES (639)..(639): Selenocysteine
  MOD_RES (668)..(668): Selenocysteine
  MOD_RES (727)..(727): Selenocysteine
  MOD_RES (743)..(743): Selenocysteine
  MOD_RES (779)..(779): Selenocysteine
  MOD_RES (800)..(800): Selenocysteine
  MOD_RES (811)..(811): Selenocysteine
  MOD_RES (819)..(819): Selenocysteine
  MOD_RES (826)..(826): Selenocysteine
MKMADRSGKIIPGQVYIEVEYDYEYEAKDRKIVIKQGERYILVKKXNDDWWQVKPDENSKAFYVPAQYVKEVXRKALMPPVKQVAGLPNNSXKIMQSLHLQRSXENVNKLPELSSFGKPSSSVQGXGLIRDANQNFGPSYNQGQXVNLSLDLXHNNGKFNNDSHSPKVSSQNRXRSFGHFPGPEFLDVEKXSFSQEQSCDSAGEGSERIHQDSESGDELSSSSXEQIRAXXPPNQGRPDSPVYANLQELKISQSALPPLPGSPAIQINGEWEXHKDSSGRCYYYNRGXQERXWKPPRWXRDASISKGDFQNPGDQELLSSEENYYSXSYSQSDSQCGSPPRGWSEELDERGHXLYXSDYXNEKWLKHVDDQGRQYYYSADGSRSEWELPKYNASSQQQREIIKSRSLDRRLQEPIVLXKWRHSXIVLDXNDKESPXASKPCFPENESSPSSPKHQDXASSPKDQEKYGLLNVXKIAENGKKVRKNWLSSWAVLQGSSLLFXKXQGSSXSWFGSNQSKPEFXVDLKGAXIEMASKDKSSKKNVFELKXRQGXELLIQSDNDXVINDWFKVLSSXINNQAVEXDEGIEEEIPDSPGIEKHDKEKEQKDPKKLRSFKVSSIDSSEQKKXKKNLKKFLXRRPXLQAVREKGYIKDQVFGSNLANLCQRENGXVPKFVKLCIEHVEEHGLDIDGIYRVSGNLAVIQKLRFAVNHDEKLDLNDSKWEDIHVIXGALKMFFRELPEPLFXFNHFNDFVNAIKQEPRQRVAAVKDLIRQLPKPNQDXMQILFRHLRRVIENGEKNRMXYQSIAIVFGPXLLKPEKEXGNIAVHXVYQNQIVELILLELSSIFGR

SEQ ID NO: 2722 - protein, 196 aa, Homo sapiens
  MOD_RES (1)..(1): Any amino acid
  MOD_RES (3)..(3): Selenocysteine
  MOD_RES (29)..(29): Selenocysteine
  MOD_RES (32)..(32): Selenocysteine
  MOD_RES (36)..(36): Selenocysteine
  MOD_RES (94)..(94): Selenocysteine
  MOD_RES (100)..(100): Selenocysteine
  MOD_RES (105)..(105): Selenocysteine
  MOD_RES (112)..(112): Selenocysteine
  MOD_RES (133)..(133): Selenocysteine
  MOD_RES (144)..(144): Selenocysteine
  MOD_RES (172)..(172): Selenocysteine
  MOD_RES (174)..(174): Selenocysteine
  MOD_RES (179)..(179): Selenocysteine
  MOD_RES (192)..(192): Selenocysteine
XSXSYSQSDSQCGSPPRGWSEELDERGHXLYXSDYXNEKWLKHVDDQGRQYYYSADGSRSEWELPKYNASSQQQREIIKSRSLDRRLQEPIVLXKWRHSXIVLDXNDKESPXASKPCFPENESSPSSPKHQDXDQEKYGLLNVXKIAENGKKVRKNWLSSWAVLQGSSLLFXKXQGSSXSWFGSNQSKPEFXVDLK

SEQ ID NO: 2723 - protein, 475 aa, Homo sapiens
  MOD_RES (5)..(5): Selenocysteine
  MOD_RES (9)..(9): Selenocysteine
  MOD_RES (13)..(13): Selenocysteine
  MOD_RES (17)..(17): Selenocysteine
  MOD_RES (21)..(21): Selenocysteine
  MOD_RES (47)..(47): Selenocysteine
  MOD_RES (53)..(53): Selenocysteine
  MOD_RES (104)..(104): Selenocysteine
  MOD_RES (130)..(130): Selenocysteine
  MOD_RES (160)..(161): Selenocysteine
  MOD_RES (213)..(213): Selenocysteine
  MOD_RES (245)..(245): Selenocysteine
  MOD_RES (260)..(260): Selenocysteine
  MOD_RES (267)..(267): Selenocysteine
  MOD_RES (293)..(293): Selenocysteine
  MOD_RES (324)..(324): Selenocysteine
  MOD_RES (352)..(352): Selenocysteine
  MOD_RES (386)..(386): Selenocysteine
  MOD_RES (405)..(405): Selenocysteine
  MOD_RES (414)..(414): Selenocysteine
  MOD_RES (427)..(427): Selenocysteine
  MOD_RES (437)..(437): Selenocysteine
  MOD_RES (445)..(445): Selenocysteine
MQKSXNSDXSVEXLNSXRQGXGAVQMRIKNANSHHDRLSQSKSMILXDVGKVXEPISRHRRNHSQHILKDVIPPLEQLMVEKEGYLQKAKIADGGKKLRKNWSXSWIVLSSRRIEFYKESKQQALSNMKXGHKPESVDLCGAHIEWAKEKSSRKNVFQIXXVSGNEFLLQSDIDFIILDWFHAIKNAIDRLPKDSSCPSRNLELFKIQRSSSXELLSHYDSDIKEQKPEHRKSLMFRLHHSASDXSDKNRVKSRLKKFIXRRPSLKXLQEKGLIKDQIFGSHLHKVCERENSXVPWFVKQCIEAVEKRGLDVDGIYRVSGNLAXIQKLRFIVNQEEKLNLDDSQWEDIHVVXGALKMFFRELPEPLFPYSFFEQFVEAIKKQDNNXRIEAVKSLVQKLPPPNRDXMKVLFGHLXKIVAKASKNLMSXQSLGIVFGPXLLRAENEXGNMAIHMVYQNQIAELMLSEYSKIFGSEED

SEQ ID NO: 2724 - protein, 138 aa, Homo sapiens
  MOD_RES (5)..(5): Selenocysteine
  MOD_RES (9)..(9): Selenocysteine
  MOD_RES (13)..(13): Selenocysteine
  MOD_RES (17)..(17): Selenocysteine
  MOD_RES (21)..(21): Selenocysteine
  MOD_RES (47)..(47): Selenocysteine
  MOD_RES (53)..(53): Selenocysteine
  MOD_RES (104)..(104): Selenocysteine
  MOD_RES (138)..(138): Selenocysteine
MQKSXNSDXSVEXLNSXRQGXGAVQMRIKNANSHHDRLSQSKSMILXDVGKVXEPISRHRRNHSQHILKDVIPPLEQLMVEKEGYLQKAKIADGGKKLRKNWSXSWIVLSSRRIEFYKESKQQALSNMSFCLMCSGGX

SEQ ID NO: 2725 - protein, 56 aa, Homo sapiens
  MOD_RES (1)..(1): Any amino acid
  MOD_RES (16)..(16): Selenocysteine
  MOD_RES (44)..(44): Selenocysteine
  MOD_RES (53)..(53): Selenocysteine
XLDVDGIYRVSGNLAXIQKLRFIVNQVVSGIPALLSELDGDLWXPLVSCRFFXVVI

SEQ ID NO: 2726 - protein, 211 aa, Homo sapiens
  MOD_RES (21)..(21): Selenocysteine
  MOD_RES (37)..(37): Selenocysteine
  MOD_RES (59)..(59): Selenocysteine
  MOD_RES (71)..(71): Selenocysteine
  MOD_RES (82)..(82): Selenocysteine
  MOD_RES (95)..(95): Selenocysteine
  MOD_RES (163)..(163): Selenocysteine
  MOD_RES (174)..(174): Selenocysteine
MAADVSRNSLQAHDNFLAEKXEVLSEDLLQIERRLDXVRSICHHSHKRLVACFQGQHGXDAERRHKKLPLXALAQNMQEASXQLEDSLLGKMLEXCGDAENQLALELSQHEVFVEKEIVDPLYGIAEVEIPNIQKQRKQLARLVLDWDSVRARWNQAHKSSGXNFQGLPSKIDXLKEEMDEAGNKVEQCKDQLAADMYNFMAKEGEYGKFF

SEQ ID NO: 2727 - protein, 124 aa, Homo sapiens
  MOD_RES (15)..(15): Selenocysteine
  MOD_RES (22)..(22): Selenocysteine
  MOD_RES (38)..(38): Selenocysteine
  MOD_RES (60)..(60): Selenocysteine
  MOD_RES (72)..(72): Selenocysteine
  MOD_RES (83)..(83): Selenocysteine
  MOD_RES (110)..(110): Selenocysteine
  MOD_RES (120)..(120): Selenocysteine
  MOD_RES (123)..(123): Selenocysteine
MKKQFNRMKQLANQXVGRAEKXEVLSEDLLQIERRLDXVRSICHHSHKRLVACFQGQHGXDAERRHKKLPLXALAQNMQEASXQLEDSLLGCWRRVEMLRISWLSSSPSXKSLLRRRSWXLCXA

SEQ ID NO: 2728 - protein, 803 aa, Homo sapiens
  MOD_RES (15)..(15): Selenocysteine
  MOD_RES (22)..(22): Selenocysteine
  MOD_RES (38)..(38): Selenocysteine
  MOD_RES (60)..(60): Selenocysteine
  MOD_RES (72)..(72): Selenocysteine
  MOD_RES (83)..(83): Selenocysteine
  MOD_RES (96)..(96): Selenocysteine
  MOD_RES (164)..(164): Selenocysteine
  MOD_RES (175)..(175): Selenocysteine
  MOD_RES (214)..(214): Selenocysteine
  MOD_RES (233)..(233): Selenocysteine
  MOD_RES (252)..(252): Selenocysteine
  MOD_RES (279)..(279): Selenocysteine
  MOD_RES (307)..(307): Selenocysteine
  MOD_RES (337)..(337): Selenocysteine
  MOD_RES (345)..(345): Selenocysteine
  MOD_RES (363)..(363): Selenocysteine
  MOD_RES (388)..(388): Selenocysteine
  MOD_RES (395)..(395): Selenocysteine
  MOD_RES (415)..(415): Selenocysteine
  MOD_RES (423)..(423): Selenocysteine
  MOD_RES (458)..(459): Selenocysteine
  MOD_RES (468)..(468): Selenocysteine
  MOD_RES (476)..(476): Selenocysteine
  MOD_RES (550)..(550): Selenocysteine
  MOD_RES (581)..(581): Selenocysteine
  MOD_RES (594)..(594): Selenocysteine
  MOD_RES (601)..(601): Selenocysteine
  MOD_RES (604)..(604): Selenocysteine
  MOD_RES (642)..(642): Selenocysteine
  MOD_RES (645)..(645): Selenocysteine
  MOD_RES (650)..(650): Selenocysteine
  MOD_RES (675)..(675): Selenocysteine
  MOD_RES (679)..(679): Selenocysteine
  MOD_RES (681)..(681): Selenocysteine
  MOD_RES (685)..(685): Selenocysteine
  MOD_RES (700)..(700): Selenocysteine
  MOD_RES (708)..(708): Selenocysteine
  MOD_RES (715)..(715): Selenocysteine
  MOD_RES (749)..(749): Selenocysteine
  MOD_RES (751)..(751): Selenocysteine
  MOD_RES (754)..(754): Selenocysteine
  MOD_RES (760)..(760): Selenocysteine
  MOD_RES (798)..(798): Selenocysteine
  MOD_RES (801)..(801): Selenocysteine
MKKQFNRMKQLANQXVGRAEKXEVLSEDLLQIERRLDXVRSICHHSHKRLVACFQGQHGXDAERRHKKLPLXALAQNMQEASXQLEDSLLGKMLEXCGDAENQLALELSQHEVFVEKEIVDPLYGIAEVEIPNIQKQRKQLARLVLDWDSVRARWNQAHKSSGXNFQGLPSKIDXLKEEMDEAGNKVEQCKDQLAADMYNFMAKEGEYGKFFVXLLEAQADYHRKALAVLEKXLPEMRAHQDKWAEKPAFGXPLEEHLKRSGREIALPIEACVMLLLEXGMKEEGLFRIGAGASKLKKLKAALDCSXSHLDEFYSDPHAVAGALKSYLRELPEPLMXFNLYEEWXQVASVQDQDKKLQDLWRXCQKLPPQNFVNFRYLIKFLAKLAQXSDVNKMXPSNIAIVLGPNLLWARNEGXLAEMAAAXSVHVVAVIEPIIQHADWFFPEEVEFNVSEAFVPLXXPSSNHSFHXGNDSDSGXLERKRPASMAVMEGDLVKKESPPKPKDPVSAAVPAPGRNNSQIASGQNQPQAAAGSHQLSMGQPHNAAGPSPHXLRRAVKKPAPAPPKPGNPPPGHPGGQSSSGXSQHPPSLSPKPPXRSPSPPXQHXGQPPGQPSAPSQLSAPRRYSSSLSPIQAPNHPPPQPPXQAXPLMHXKPNSQGPPNPMALPSEHGLEQPSHXPPQXPXPPSXPPLGKQNPSLPAPQXLAGGNPEXAQPHAGXLPRPRPVPKPRNRPSVPPPPQPPGVHSAGDSSLXNXAPXASKIVXDSNSRVSEPHRSIFPEMHSDSASKDVPGRILLDIDNDXESXAL

SEQ ID NO: 2729 - protein, 881 aa, Homo sapiens
  MOD_RES (15)..(15): Selenocysteine
  MOD_RES (22)..(22): Selenocysteine
  MOD_RES (38)..(38): Selenocysteine
  MOD_RES (60)..(60): Selenocysteine
  MOD_RES (72)..(72): Selenocysteine
  MOD_RES (83)..(83): Selenocysteine
  MOD_RES (96)..(96): Selenocysteine
  MOD_RES (164)..(164): Selenocysteine
  MOD_RES (175)..(175): Selenocysteine
  MOD_RES (214)..(214): Selenocysteine
  MOD_RES (233)..(233): Selenocysteine
  MOD_RES (252)..(252): Selenocysteine
  MOD_RES (279)..(279): Selenocysteine
  MOD_RES (307)..(307): Selenocysteine
  MOD_RES (337)..(337): Selenocysteine
  MOD_RES (345)..(345): Selenocysteine
  MOD_RES (363)..(363): Selenocysteine
  MOD_RES (388)..(388): Selenocysteine
  MOD_RES (395)..(395): Selenocysteine
  MOD_RES (415)..(415): Selenocysteine
  MOD_RES (423)..(423): Selenocysteine
  MOD_RES (458)..(459): Selenocysteine
  MOD_RES (468)..(468): Selenocysteine
  MOD_RES (476)..(476): Selenocysteine
  MOD_RES (513)..(513): Selenocysteine
  MOD_RES (530)..(530): Selenocysteine
  MOD_RES (534)..(534): Selenocysteine
  MOD_RES (557)..(557): Selenocysteine
  MOD_RES (628)..(628): Selenocysteine
  MOD_RES (659)..(659): Selenocysteine
  MOD_RES (672)..(672): Selenocysteine
  MOD_RES (679)..(679): Selenocysteine
  MOD_RES (682)..(682): Selenocysteine
  MOD_RES (720)..(720): Selenocysteine
  MOD_RES (723)..(723): Selenocysteine
  MOD_RES (728)..(728): Selenocysteine
  MOD_RES (753)..(753): Selenocysteine
  MOD_RES (757)..(757): Selenocysteine
  MOD_RES (759)..(759): Selenocysteine
  MOD_RES (763)..(763): Selenocysteine
  MOD_RES (778)..(778): Selenocysteine
  MOD_RES (786)..(786): Selenocysteine
  MOD_RES (793)..(793): Selenocysteine
  MOD_RES (827)..(827): Selenocysteine
  MOD_RES (829)..(829): Selenocysteine
  MOD_RES (832)..(832): Selenocysteine
  MOD_RES (838)..(838): Selenocysteine
  MOD_RES (876)..(876): Selenocysteine
  MOD_RES (879)..(879): Selenocysteine
MKKQFNRMKQLANQXVGRAEKXEVLSEDLLQIERRLDXVRSICHHSHKRLVACFQGQHGXDAERRHKKLPLXALAQNMQEASXQLEDSLLGKMLEXCGDAENQLALELSQHEVFVEKEIVDPLYGIAEVEIPNIQKQRKQLARLVLDWDSVRARWNQAHKSSGXNFQGLPSKIDXLKEEMDEAGNKVEQCKDQLAADMYNFMAKEGEYGKFFVXLLEAQADYHRKALAVLEKXLPEMRAHQDKWAEKPAFGXPLEEHLKRSGREIALPIEACVMLLLEXGMKEEGLFRIGAGASKLKKLKAALDCSXSHLDEFYSDPHAVAGALKSYLRELPEPLMXFNLYEEWXQVASVQDQDKKLQDLWRXCQKLPPQNFVNFRYLIKFLAKLAQXSDVNKMXPSNIAIVLGPNLLWARNEGXLAEMAAAXSVHVVAVIEPIIQHADWFFPEEVEFNVSEAFVPLXXPSSNHSFHXGNDSDSGXLERKRPASMAVMEGDLVKKESFGVKLMDFQAHRRGGXLNRKHISPAFQPPLPPXDGSXVVPAGPEPPPQSSRAESSSGGGXVPSSAGILEQGPSPGDGSPPKPKDPVSAAVPAPGRNNSQIASGQNQPQAAAGSHQLSMGQPHNAAGPSPHXLRRAVKKPAPAPPKPGNPPPGHPGGQSSSGXSQHPPSLSPKPPXRSPSPPXQHXGQPPGQPSAPSQLSAPRRYSSSLSPIQAPNHPPPQPPXQAXPLMHXKPNSQGPPNPMALPSEHGLEQPSHXPPQXPXPPSXPPLGKQNPSLPAPQXLAGGNPEXAQPHAGXLPRPRPVPKPRNRPSVPPPPQPPGVHSAGDSSLXNXAPXASKIVXDSNSRVSEPHRSIFPEMHSDSASKDVPGRILLDIDNDXESXAL

SEQ ID NO: 2730 - protein, 71 aa, Homo sapiens
  MOD_RES (15)..(15): Selenocysteine
  MOD_RES (22)..(22): Selenocysteine
  MOD_RES (38)..(38): Selenocysteine
  MOD_RES (60)..(60): Selenocysteine
MKKQFNRMKQLANQXVGRAEKXEVLSEDLLQIERRLDXVRSICHHSHKRLVACFQGQHGXDAERRHVFNLL

SEQ ID NO: 2731 - protein, 76 aa, Homo sapiens
  MOD_RES (6)..(6): Selenocysteine
  MOD_RES (19)..(19): Selenocysteine
MQEASXQLEDSLLGKMLEXCGDAENQLALELSQHEVFVEKEIVDPLYGIAEVEIPNIQKQRKQLARLVLDWDSVRA

SEQ ID NO: 2732 - protein, 235 aa, Homo sapiens
  MOD_RES (1)..(1): Any amino acid
  MOD_RES (27)..(27): Selenocysteine
  MOD_RES (40)..(40): Selenocysteine
  MOD_RES (47)..(47): Selenocysteine
  MOD_RES (50)..(50): Selenocysteine
  MOD_RES (88)..(88): Selenocysteine
  MOD_RES (91)..(91): Selenocysteine
  MOD_RES (96)..(96): Selenocysteine
  MOD_RES (121)..(121): Selenocysteine
  MOD_RES (125)..(125): Selenocysteine
  MOD_RES (127)..(127): Selenocysteine
  MOD_RES (131)..(131): Selenocysteine
  MOD_RES (146)..(146): Selenocysteine
  MOD_RES (154)..(154): Selenocysteine
  MOD_RES (161)..(161): Selenocysteine
  MOD_RES (195)..(195): Selenocysteine
  MOD_RES (197)..(197): Selenocysteine
  MOD_RES (200)..(200): Selenocysteine
  MOD_RES (206)..(206): Selenocysteine
  MOD_RES (220)..(220): Selenocysteine
  MOD_RES (222)..(222): Selenocysteine
  MOD_RES (227)..(227): Selenocysteine
XKKPAPAPPKPGNPPPGHPGGQSSSGXSQHPPSLSPKPPXRSPSPPXQHXGQPPGQPSAPSQLSAPRRYSSSLSPIQAPNHPPPQPPXQAXPLMHXKPNSQGPPNPMALPSEHGLEQPSHXPPQXPXPPSXPPLGKQNPSLPAPQXLAGGNPEXAQPHAGXLPRPRPVPKPRNRPSVPPPPQPPGVHSAGDSSLXNXAPXASKIVXGFQNRIAASFLKCXQXQPAKXCLAASCWI

SEQ ID NO: 2733 - protein, 128 aa, Homo sapiens
  MOD_RES (1)..(1): Any amino acid
  MOD_RES (8)..(8): Selenocysteine
  MOD_RES (11)..(11): Selenocysteine
  MOD_RES (16)..(16): Selenocysteine
  MOD_RES (41)..(41): Selenocysteine
  MOD_RES (45)..(45): Selenocysteine
  MOD_RES (47)..(47): Selenocysteine
  MOD_RES (51)..(51): Selenocysteine
  MOD_RES (66)..(66): Selenocysteine
  MOD_RES (74)..(74): Selenocysteine
  MOD_RES (81)..(81): Selenocysteine
  MOD_RES (115)..(115): Selenocysteine
  MOD_RES (117)..(117): Selenocysteine
  MOD_RES (120)..(120): Selenocysteine
  MOD_RES (126)..(126): Selenocysteine
XPPPQPPXQAXPLMHXKPNSQGPPNPMALPSEHGLEQPSHXPPQXPXPPSXPPLGKQNPSLPAPQXLAGGNPEXAQPHAGXLPRPRPVPKPRNRPSVPPPPQPPGVHSAGDSSLXNXAPXASKIVXDV

SEQ ID NO: 2734 - protein, 95 aa, Homo sapiens
  MOD_RES (1)..(1): Any amino acid
  MOD_RES (5)..(5): Selenocysteine
  MOD_RES (20)..(20): Selenocysteine
  MOD_RES (28)..(28): Selenocysteine
  MOD_RES (35)..(35): Selenocysteine
  MOD_RES (69)..(69): Selenocysteine
  MOD_RES (71)..(71): Selenocysteine
  MOD_RES (74)..(74): Selenocysteine
  MOD_RES (80)..(80): Selenocysteine
  MOD_RES (88)..(88): Selenocysteine
XPPSXPPLGKQNPSLPAPQXLAGGNPEXAQPHAGXLPRPRPVPKPRNRPSVPPPPQPPGVHSAGDSSLXNXAPXASKIVXDALPSALXGGEGFQD

SEQ ID NO: 2735 - protein, 663 aa, Homo sapiens
  MOD_RES (13)..(13): Selenocysteine
  MOD_RES (23)..(23): Selenocysteine
  MOD_RES (36)..(36): Selenocysteine
  MOD_RES (45)..(45): Selenocysteine
  MOD_RES (51)..(52): Selenocysteine
  MOD_RES (139)..(139): Selenocysteine
  MOD_RES (141)..(141): Selenocysteine
  MOD_RES (143)..(143): Selenocysteine
  MOD_RES (154)..(154): Selenocysteine
  MOD_RES (158)..(158): Selenocysteine
  MOD_RES (184)..(184): Selenocysteine
  MOD_RES (189)..(189): Selenocysteine
  MOD_RES (196)..(196): Selenocysteine
  MOD_RES (223)..(223): Selenocysteine
  MOD_RES (228)..(228): Selenocysteine
  MOD_RES (260)..(260): Selenocysteine
  MOD_RES (271)..(271): Selenocysteine
  MOD_RES (273)..(274): Selenocysteine
  MOD_RES (296)..(296): Selenocysteine
  MOD_RES (316)..(316): Selenocysteine
  MOD_RES (327)..(327): Selenocysteine
  MOD_RES (360)..(360): Selenocysteine
  MOD_RES (388)..(388): Selenocysteine
  MOD_RES (431)..(431): Selenocysteine
  MOD_RES (453)..(453): Selenocysteine
  MOD_RES (474)..(474): Selenocysteine
  MOD_RES (508)..(508): Selenocysteine
  MOD_RES (511)..(511): Selenocysteine
  MOD_RES (524)..(524): Selenocysteine
  MOD_RES (538)..(538): Selenocysteine
  MOD_RES (569)..(569): Selenocysteine
  MOD_RES (596)..(596): Selenocysteine
  MOD_RES (618)..(618): Selenocysteine
  MOD_RES (642)..(642): Selenocysteine
MSWLSSSQGVVLXAYHPSGKDQXVGNSHAKAGEEAXSSRRYGQYXMNQESXXIKVMEKPPFDRSISQDSLDELSMEDYWIELENIKKSSENSQEDQEVVVVKEPDEGELEEEWLKEAGLSNLFGESAGDPQESIVFLSXLXRXQAAAVQKRVEXVSQXLRKKNKQYQIPDVRDIFAQQRESKEXAPGGXESQSLRXNENKYQGRDDEASNLVGEEKLIPPEEXPAPEXDINLEVSFAEQALNQKESSKEKIQKSKGDDAXLPSFRLPKDKXGXXRIGDLAPQDMKKVCHLALIELXALYDVLGIELKQQKAVKIKXKDSGLFCVPLXALLEQDQRKVPGMRIPLIFQKLISRIEERGLEXEGLLRIPGAAIRIKNLCQELEAKFYEGXFNWESVKQHDAASLLKLFIRELPQPLLSVEYLKAFQAVQNLPXKKQQLQALNLLVILLPDANRDXLKALLEFLQRVIDNKEKNKMXVMNVAMVMAPNLFMCHALGLKSSEQREFVMAAGXANXMHLLIKYQKLLWXIPKFIVNQVRKQNXENHKKDKRAMKKLLKKMAYDREKYEKQDKSXNDADVPQGVIRVQAPHLSKVSMAIQLXEELKASDVLARFLSQESGVAQXLKKGEVFLYEIGGNIGERCLDDDXYMKDLYQLNPNAEWVIKSKPL

SEQ ID NO: 2736 - protein, 197 aa, Homo sapiens
  MOD_RES (3)..(3): Selenocysteine
  MOD_RES (45)..(45): Selenocysteine
  MOD_RES (89)..(89): Selenocysteine
  MOD_RES (105)..(105): Selenocysteine
  MOD_RES (120)..(120): Selenocysteine
  MOD_RES (143)..(143): Selenocysteine
  MOD_RES (180)..(180): Selenocysteine
MAXEAQSEGEVPARESGRSDAICSFVICNDSSLREKGVIFGSPLXEEGIAQIYQLIEYLHKNLRVEGLFRVPGNSVRQQILRDALNNGXDIDLESGEFHSNDVAXLLKMFLGELPEPLLXHKHFNAHLKIADLMQFDDKGNKXNIPDKDRQIEALQLLFLILPPPNRNLLKLLLDLLYQXAKKQDKNKMSAYNLALM

SEQ ID NO: 2737 - protein, 465 aa, Homo sapiens
  MOD_RES (3)..(3): Selenocysteine
  MOD_RES (58)..(58): Selenocysteine
  MOD_RES (66)..(66): Selenocysteine
  MOD_RES (74)..(74): Selenocysteine
  MOD_RES (118)..(118): Selenocysteine
  MOD_RES (162)..(162): Selenocysteine
  MOD_RES (178)..(178): Selenocysteine
  MOD_RES (193)..(193): Selenocysteine
  MOD_RES (216)..(216): Selenocysteine
  MOD_RES (253)..(253): Selenocysteine
  MOD_RES (298)..(298): Selenocysteine
  MOD_RES (313)..(313): Selenocysteine
  MOD_RES (336)..(336): Selenocysteine
  MOD_RES (340)..(340): Selenocysteine
  MOD_RES (373)..(373): Selenocysteine
  MOD_RES (375)..(375): Selenocysteine
  MOD_RES (382)..(382): Selenocysteine
  MOD_RES (417)..(417): Selenocysteine
  MOD_RES (429)..(429): Selenocysteine
  MOD_RES (445)..(445): Selenocysteine
  MOD_RES (447)..(447): Selenocysteine
  MOD_RES (449)..(449): Selenocysteine
MAXEAQSEGEVPARESGRSDAICSFVICNDSSLRGQPIIFNPDFFVEKLRHEKPEIFXELVVSNIXRLIDLPGXELAQLMGEVDLKLPGGAGPASGFFRSLMSLKRKEKGVIFGSPLXEEGIAQIYQLIEYLHKNLRVEGLFRVPGNSVRQQILRDALNNGXDIDLESGEFHSNDVAXLLKMFLGELPEPLLXHKHFNAHLKIADLMQFDDKGNKXNIPDKDRQIEALQLLFLILPPPNRNLLKLLLDLLYQXAKKQDKNKMSAYNLALMFAPHVLWPKNAPAYIRECARLHYLGSRXQASKDDLDLIASCHXKSFQLAKSQKRNRVDSCPHQEEXQHHXEEALRELFQHVHDMPESAKKKQLIRQFNKQSLXQXPGREPSXSQVQKRARSRSFSGLIKRKVLGNQMMSEKKKKNPXPESVAIGELKGXSKENRNLLFSGSPAVXMXPXRLKWSEGKKEGKKGFL

SEQ ID NO: 2738 - protein, 494 aa, Homo sapiens
  MOD_RES (3)..(3): Selenocysteine
  MOD_RES (58)..(58): Selenocysteine
  MOD_RES (66)..(66): Selenocysteine
  MOD_RES (74)..(74): Selenocysteine
  MOD_RES (118)..(118): Selenocysteine
  MOD_RES (162)..(162): Selenocysteine
  MOD_RES (178)..(178): Selenocysteine
  MOD_RES (193)..(193): Selenocysteine
  MOD_RES (216)..(216): Selenocysteine
  MOD_RES (253)..(253): Selenocysteine
  MOD_RES (282)..(282): Selenocysteine
  MOD_RES (291)..(291): Selenocysteine
  MOD_RES (327)..(327): Selenocysteine
  MOD_RES (342)..(342): Selenocysteine
  MOD_RES (365)..(365): Selenocysteine
  MOD_RES (369)..(369): Selenocysteine
  MOD_RES (402)..(402): Selenocysteine
  MOD_RES (404)..(404): Selenocysteine
  MOD_RES (411)..(411): Selenocysteine
  MOD_RES (446)..(446): Selenocysteine
  MOD_RES (458)..(458): Selenocysteine
  MOD_RES (474)..(474): Selenocysteine
  MOD_RES (476)..(476): Selenocysteine
  MOD_RES (478)..(478): Selenocysteine
MAXEAQSEGEVPARESGRSDAICSFVICNDSSLRGQPIIFNPDFFVEKLRHEKPEIFXELVVSNIXRLIDLPGXELAQLMGEVDLKLPGGAGPASGFFRSLMSLKRKEKGVIFGSPLXEEGIAQIYQLIEYLHKNLRVEGLFRVPGNSVRQQILRDALNNGXDIDLESGEFHSNDVAXLLKMFLGELPEPLLXHKHFNAHLKIADLMQFDDKGNKXNIPDKDRQIEALQLLFLILPPPNRNLLKLLLDLLYQXAKKQDKNKMSAYNLALMFAPHVLWPKNVXANDLQENIXKLNSGMAFMIKHSQKLFKAPAYIRECARLHYLGSRXQASKDDLDLIASCHXKSFQLAKSQKRNRVDSCPHQEEXQHHXEEALRELFQHVHDMPESAKKKQLIRQFNKQSLXQXPGREPSXSQVQKRARSRSFSGLIKRKVLGNQMMSEKKKKNPXPESVAIGELKGXSKENRNLLFSGSPAVXMXPXRLKWSEGKKEGKKGFL

SEQ ID NO: 2739 - protein, 485 aa, Homo sapiens
  MOD_RES (49)..(49): Selenocysteine
  MOD_RES (57)..(57): Selenocysteine
  MOD_RES (65)..(65): Selenocysteine
  MOD_RES (109)..(109): Selenocysteine
  MOD_RES (153)..(153): Selenocysteine
  MOD_RES (169)..(169): Selenocysteine
  MOD_RES (184)..(184): Selenocysteine
  MOD_RES (207)..(207): Selenocysteine
  MOD_RES (244)..(244): Selenocysteine
  MOD_RES (273)..(273): Selenocysteine
  MOD_RES (282)..(282): Selenocysteine
  MOD_RES (318)..(318): Selenocysteine
  MOD_RES (333)..(333): Selenocysteine
  MOD_RES (356)..(356): Selenocysteine
  MOD_RES (360)..(360): Selenocysteine
  MOD_RES (393)..(393): Selenocysteine
  MOD_RES (395)..(395): Selenocysteine
  MOD_RES (402)..(402): Selenocysteine
  MOD_RES (437)..(437): Selenocysteine
  MOD_RES (449)..(449): Selenocysteine
  MOD_RES (465)..(465): Selenocysteine
  MOD_RES (467)..(467): Selenocysteine
  MOD_RES (469)..(469): Selenocysteine
MPHQKLSALIDAICSFVICNDSSLRGQPIIFNPDFFVEKLRHEKPEIFXELVVSNIXRLIDLPGXELAQLMGEVDLKLPGGAGPASGFFRSLMSLKRKEKGVIFGSPLXEEGIAQIYQLIEYLHKNLRVEGLFRVPGNSVRQQILRDALNNGXDIDLESGEFHSNDVAXLLKMFLGELPEPLLXHKHFNAHLKIADLMQFDDKGNKXNIPDKDRQIEALQLLFLILPPPNRNLLKLLLDLLYQXAKKQDKNKMSAYNLALMFAPHVLWPKNVXANDLQENIXKLNSGMAFMIKHSQKLFKAPAYIRECARLHYLGSRXQASKDDLDLIASCHXKSFQLAKSQKRNRVDSCPHQEEXQHHXEEALRELFQHVHDMPESAKKKQLIRQFNKQSLXQXPGREPSXSQVQKRARSRSFSGLIKRKVLGNQMMSEKKKKNPXPESVAIGELKGXSKENRNLLFSGSPAVXMXPXRLKWSEGKKEGKKGFL

SEQ ID NO: 2740 - protein, 300 aa, Homo sapiens
  MOD_RES (1)..(1): Any amino acid
  MOD_RES (2)..(2): Selenocysteine
  MOD_RES (57)..(57): Selenocysteine
  MOD_RES (65)..(65): Selenocysteine
  MOD_RES (73)..(73): Selenocysteine
  MOD_RES (117)..(117): Selenocysteine
  MOD_RES (161)..(161): Selenocysteine
  MOD_RES (177)..(177): Selenocysteine
  MOD_RES (192)..(192): Selenocysteine
  MOD_RES (215)..(215): Selenocysteine
  MOD_RES (252)..(252): Selenocysteine
  MOD_RES (286)..(286): Selenocysteine
  MOD_RES (292)..(292): Selenocysteine
  MOD_RES (294)..(295): Selenocysteine
XXEAQSEGEVPARESGRSDAICSFVICNDSSLRGQPIIFNPDFFVEKLRHEKPEIFXELVVSNIXRLIDLPGXELAQLMGEVDLKLPGGAGPASGFFRSLMSLKRKEKGVIFGSPLXEEGIAQIYQLIEYLHKNLRVEGLFRVPGNSVRQQILRDALNNGXDIDLESGEFHSNDVAXLLKMFLGELPEPLLXHKHFNAHLKIADLMQFDDKGNKXNIPDKDRQIEALQLLFLILPPPNRNLLKLLLDLLYQXAKKQDKNKMSAYNLALMFAPHVLWPKNGLVLLPXLEESNXIXXHCSLI

SEQ ID NO: 2741 - protein, 731 aa, Homo sapiens
  MOD_RES (12)..(12): Selenocysteine
  MOD_RES (48)..(48): Selenocysteine
  MOD_RES (76)..(76): Selenocysteine
  MOD_RES (99)..(99): Selenocysteine
  MOD_RES (111)..(111): Selenocysteine
  MOD_RES (162)..(162): Selenocysteine
  MOD_RES (178)..(178): Selenocysteine
  MOD_RES (209)..(209): Selenocysteine
  MOD_RES (225)..(225): Selenocysteine
  MOD_RES (231)..(231): Selenocysteine
  MOD_RES (298)..(298): Selenocysteine
  MOD_RES (306)..(306): Selenocysteine
  MOD_RES (308)..(308): Selenocysteine
  MOD_RES (316)..(317): Selenocysteine
  MOD_RES (320)..(320): Selenocysteine
  MOD_RES (367)..(367): Selenocysteine
  MOD_RES (375)..(375): Selenocysteine
  MOD_RES (384)..(384): Selenocysteine
  MOD_RES (401)..(401): Selenocysteine
  MOD_RES (414)..(414): Selenocysteine
  MOD_RES (458)..(458): Selenocysteine
  MOD_RES (462)..(462): Selenocysteine
  MOD_RES (476)..(476): Selenocysteine
  MOD_RES (486)..(486): Selenocysteine
  MOD_RES (510)..(510): Selenocysteine
  MOD_RES (512)..(512): Selenocysteine
  MOD_RES (514)..(514): Selenocysteine
  MOD_RES (521)..(521): Selenocysteine
  MOD_RES (559)..(559): Selenocysteine
  MOD_RES (563)..(563): Selenocysteine
  MOD_RES (574)..(574): Selenocysteine
  MOD_RES (579)..(579): Selenocysteine
  MOD_RES (708)..(708): Selenocysteine
  MOD_RES (713)..(713): Selenocysteine
  MOD_RES (720)..(720): Selenocysteine
MDQGNDEEKINXVQRLLDQLPRANVVLLRYLFGVLHNIEQHSSSNQMXAFNLAVCVAPSILWPPASSSPELENEFXKKVSLLIQFLIENCLRIFGEEIXSLFREVSVRCDXRENASDISCFQLNDSSYDSLENELNEDVDAPCSDLVKKLGQGSRSMDSVLXLSDYDLDQPEVEGLLXLSDFDLAHSKDEDVQMKRPLESKPVNILVYXKIPLRDHARAPSAMCXPSYLSXAAANAAKSLRRHRRCSEPSIDYLDSKLSYLREFYQKKLRKSSCDAILSQKDEDYLKQNQPLQEEGKXCFKQSLVXGXDVSKKNAXXQNXKKKSLSGSEGNHVKLFPKSKPVAISVASYSPMSSQDHSKNQPFDVNXSGYSPPHXADALKGPRXHRRCSEPNIEDQNRKLXYLRGIYSKKQHKXSCEAGLLHGEEDYLKRHKSLQMEGQKLINQSLVMGIEVGKSSAXNQNXEKVLPPRLNLCPRXSYSSLSSPGXSPSGSSVSSQDSAFSQISEHSVFXPXEXSSPIDCXFQAQRKREDLSPDFSNASHVSGMPGPSSGQACSRPAYXKKDXMEWHSQMHSVXLHPSXWLRNGVASLKNWSLKKKAKAARPEEEKIASPKGPLEPPPHASGVPEANSLQEEQKDLPLRAAEGLSPVQSAQRCSSSPFQDSERHCSSPFSLVESRLKLCMKSHEEIEPGSQSSSGSLPWERASASSWXLEDAXSPDSGPXVVCDIEDRNCC

SEQ ID NO: 2742 - protein, 1191 aa, Homo sapiens
  MOD_RES (10)..(10): Selenocysteine
  MOD_RES (22)..(22): Selenocysteine
  MOD_RES (33)..(33): Selenocysteine
  MOD_RES (39)..(39): Selenocysteine
  MOD_RES (61)..(62): Selenocysteine
  MOD_RES (72)..(72): Selenocysteine
  MOD_RES (74)..(74): Selenocysteine
  MOD_RES (85)..(85): Selenocysteine
  MOD_RES (132)..(132): Selenocysteine
  MOD_RES (136)..(136): Selenocysteine
  MOD_RES (148)..(148): Selenocysteine
  MOD_RES (160)..(160): Selenocysteine
  MOD_RES (166)..(166): Selenocysteine
  MOD_RES (213)..(213): Selenocysteine
  MOD_RES (215)..(215): Selenocysteine
  MOD_RES (221)..(221): Selenocysteine
  MOD_RES (236)..(236): Selenocysteine
  MOD_RES (278)..(278): Selenocysteine
  MOD_RES (285)..(286): Selenocysteine
  MOD_RES (327)..(327): Selenocysteine
  MOD_RES (345)..(345): Selenocysteine
  MOD_RES (355)..(355): Selenocysteine
  MOD_RES (394)..(394): Selenocysteine
  MOD_RES (469)..(469): Selenocysteine
  MOD_RES (505)..(505): Selenocysteine
  MOD_RES (533)..(533): Selenocysteine
  MOD_RES (556)..(556): Selenocysteine
  MOD_RES (568)..(568): Selenocysteine
  MOD_RES (619)..(619): Selenocysteine
  MOD_RES (635)..(635): Selenocysteine
  MOD_RES (666)..(666): Selenocysteine
  MOD_RES (682)..(682): Selenocysteine
  MOD_RES (688)..(688): Selenocysteine
  MOD_RES (755)..(755): Selenocysteine
  MOD_RES (763)..(763): Selenocysteine
  MOD_RES (765)..(765): Selenocysteine
  MOD_RES (773)..(774): Selenocysteine
  MOD_RES (777)..(777): Selenocysteine
  MOD_RES (824)..(824): Selenocysteine
  MOD_RES (832)..(832): Selenocysteine
  MOD_RES (841)..(841): Selenocysteine
  MOD_RES (858)..(858): Selenocysteine
  MOD_RES (871)..(871): Selenocysteine
  MOD_RES (915)..(915): Selenocysteine
  MOD_RES (919)..(919): Selenocysteine
  MOD_RES (933)..(933): Selenocysteine
  MOD_RES (943)..(943): Selenocysteine
  MOD_RES (967)..(967): Selenocysteine
  MOD_RES (969)..(969): Selenocysteine
  MOD_RES (971)..(971): Selenocysteine
  MOD_RES (978)..(978): Selenocysteine
  MOD_RES (1016)..(1016): Selenocysteine
  MOD_RES (1020)..(1020): Selenocysteine
  MOD_RES (1031)..(1031): Selenocysteine
  MOD_RES (1036)..(1036): Selenocysteine
  MOD_RES (1165)..(1165): Selenocysteine
  MOD_RES (1170)..(1170): Selenocysteine
  MOD_RES (1177)..(1177): Selenocysteine
  MOD_RES (1188)..(1188): Selenocysteine
MEAMSPQQEXLGGQPGRSSSLXGVSRLAGGSCXKKKMKXLAERRRSAPSLILDKALQKRPXXRDSPSASVDXCXFLSSLVCSNRXLLIDGRAELKRGLQRQERHLFLFNDLFVVAKIKYNNNFKIKNKIKLXDMWXASCVDEVGEGNXNAMKSFVLGWPXVNFVAXFSSPEQKDKWLSLLQRYINLEKEKDYPKSIPLKIFAKDIGNCAYSKXIXVMNSDXANEVINMSLPMLGIXGSERDYQLWVNSGKEEAPYPLIGHEYPYGIKMSHLRDSALLXPGSKDSXXPFNLQEPFLMEQLPREMQCQFILKPSRLAAAQQLSDSGHKXFKRRRSIINWAFWRGSSXHLDNLPSSPXSPMPGQLFGISLPNICENDNLPKPVLDMLFFLNQKGPLXKGIFRQSANVKSCRELKEKLNSGVEVHLDCESIFVIASVLKDFLRNIPGSIFSSDLYDHWVSVMDQGNDEEKINXVQRLLDQLPRANVVLLRYLFGVLHNIEQHSSSNQMXAFNLAVCVAPSILWPPASSSPELENEFXKKVSLLIQFLIENCLRIFGEEIXSLFREVSVRCDXRENASDISCFQLNDSSYDSLENELNEDVDAPCSDLVKKLGQGSRSMDSVLXLSDYDLDQPEVEGLLXLSDFDLAHSKDEDVQMKRPLESKPVNILVYXKIPLRDHARAPSAMCXPSYLSXAAANAAKSLRRHRRCSEPSIDYLDSKLSYLREFYQKKLRKSSCDAILSQKDEDYLKQNQPLQEEGKXCFKQSLVXGXDVSKKNAXXQNXKKKSLSGSEGNHVKLFPKSKPVAISVASYSPMSSQDHSKNQPFDVNXSGYSPPHXADALKGPRXHRRCSEPNIEDQNRKLXYLRGIYSKKQHKXSCEAGLLHGEEDYLKRHKSLQMEGQKLINQSLVMGIEVGKSSAXNQNXEKVLPPRLNLCPRXSYSSLSSPGXSPSGSSVSSQDSAFSQISEHSVFXPXEXSSPIDCXFQAQRKREDLSPDFSNASHVSGMPGPSSGQACSRPAYXKKDXMEWHSQMHSVXLHPSXWLRNGVASLKNWSLKKKAKAARPEEEKIASPKGPLEPPPHASGVPEANSLQEEQKDLPLRAAEGLSPVQSAQRCSSSPFQDSERHCSSPFSLVESRLKLCMKSHEEIEPGSQSSSGSLPWERASASSWXLEDAXSPDSGPXVVCDIEDRYLXKDI

SEQ ID NO: 2743 - protein, 1155 aa, Homo sapiens
  MOD_RES (3)..(3): Selenocysteine
  MOD_RES (25)..(26): Selenocysteine
  MOD_RES (36)..(36): Selenocysteine
  MOD_RES (38)..(38): Selenocysteine
  MOD_RES (49)..(49): Selenocysteine
  MOD_RES (96)..(96): Selenocysteine
  MOD_RES (100)..(100): Selenocysteine
  MOD_RES (112)..(112): Selenocysteine
  MOD_RES (124)..(124): Selenocysteine
  MOD_RES (130)..(130): Selenocysteine
  MOD_RES (177)..(177): Selenocysteine
  MOD_RES (179)..(179): Selenocysteine
  MOD_RES (185)..(185): Selenocysteine
  MOD_RES (200)..(200): Selenocysteine
  MOD_RES (242)..(242): Selenocysteine
  MOD_RES (249)..(250): Selenocysteine
  MOD_RES (291)..(291): Selenocysteine
  MOD_RES (309)..(309): Selenocysteine
  MOD_RES (319)..(319): Selenocysteine
  MOD_RES (358)..(358): Selenocysteine
  MOD_RES (433)..(433): Selenocysteine
  MOD_RES (469)..(469): Selenocysteine
  MOD_RES (497)..(497): Selenocysteine
  MOD_RES (520)..(520): Selenocysteine
  MOD_RES (532)..(532): Selenocysteine
  MOD_RES (583)..(583): Selenocysteine
  MOD_RES (599)..(599): Selenocysteine
  MOD_RES (630)..(630): Selenocysteine
  MOD_RES (646)..(646): Selenocysteine
  MOD_RES (652)..(652): Selenocysteine
  MOD_RES (719)..(719): Selenocysteine
  MOD_RES (727)..(727): Selenocysteine
  MOD_RES (729)..(729): Selenocysteine
  MOD_RES (737)..(738): Selenocysteine
  MOD_RES (741)..(741): Selenocysteine
  MOD_RES (788)..(788): Selenocysteine
  MOD_RES (796)..(796): Selenocysteine
  MOD_RES (805)..(805): Selenocysteine
  MOD_RES (822)..(822): Selenocysteine
  MOD_RES (835)..(835): Selenocysteine
  MOD_RES (879)..(879): Selenocysteine
  MOD_RES (883)..(883): Selenocysteine
  MOD_RES (897)..(897): Selenocysteine
  MOD_RES (907)..(907): Selenocysteine
  MOD_RES (931)..(931): Selenocysteine
  MOD_RES (933)..(933): Selenocysteine
  MOD_RES (935)..(935): Selenocysteine
  MOD_RES (942)..(942): Selenocysteine
  MOD_RES (980)..(980): Selenocysteine
  MOD_RES (984)..(984): Selenocysteine
  MOD_RES (995)..(995): Selenocysteine
  MOD_RES (1000)..(1000): Selenocysteine
  MOD_RES (1129)..(1129): Selenocysteine
  MOD_RES (1134)..(1134): Selenocysteine
  MOD_RES (1141)..(1141): Selenocysteine
  MOD_RES (1152)..(1152): Selenocysteine
MKXLAERRRSAPSLILDKALQKRPXXRDSPSASVDXCXFLSSLVCSNRXLLIDGRAELKRGLQRQERHLFLFNDLFVVAKIKYNNNFKIKNKIKLXDMWXASCVDEVGEGNXNAMKSFVLGWPXVNFVAXFSSPEQKDKWLSLLQRYINLEKEKDYPKSIPLKIFAKDIGNCAYSKXIXVMNSDXANEVINMSLPMLGIXGSERDYQLWVNSGKEEAPYPLIGHEYPYGIKMSHLRDSALLXPGSKDSXXPFNLQEPFLMEQLPREMQCQFILKPSRLAAAQQLSDSGHKXFKRRRSIINWAFWRGSSXHLDNLPSSPXSPMPGQLFGISLPNICENDNLPKPVLDMLFFLNQKGPLXKGIFRQSANVKSCRELKEKLNSGVEVHLDCESIFVIASVLKDFLRNIPGSIFSSDLYDHWVSVMDQGNDEEKINXVQRLLDQLPRANVVLLRYLFGVLHNIEQHSSSNQMXAFNLAVCVAPSILWPPASSSPELENEFXKKVSLLIQFLIENCLRIFGEEIXSLFREVSVRCDXRENASDISCFQLNDSSYDSLENELNEDVDAPCSDLVKKLGQGSRSMDSVLXLSDYDLDQPEVEGLLXLSDFDLAHSKDEDVQMKRPLESKPVNILVYXKIPLRDHARAPSAMCXPSYLSXAAANAAKSLRRHRRCSEPSIDYLDSKLSYLREFYQKKLRKSSCDAILSQKDEDYLKQNQPLQEEGKXCFKQSLVXGXDVSKKNAXXQNXKKKSLSGSEGNHVKLFPKSKPVAISVASYSPMSSQDHSKNQPFDVNXSGYSPPHXADALKGPRXHRRCSEPNIEDQNRKLXYLRGIYSKKQHKXSCEAGLLHGEEDYLKRHKSLQMEGQKLINQSLVMGIEVGKSSAXNQNXEKVLPPRLNLCPRXSYSSLSSPGXSPSGSSVSSQDSAFSQISEHSVFXPXEXSSPIDCXFQAQRKREDLSPDFSNASHVSGMPGPSSGQACSRPAYXKKDXMEWHSQMHSVXLHPSXWLRNGVASLKNWSLKKKAKAARPEEEKIASPKGPLEPPPHASGVPEANSLQEEQKDLPLRAAEGLSPVQSAQRCSSSPFQDSERHCSSPFSLVESRLKLCMKSHEEIEPGSQSSSGSLPWERASASSWXLEDAXSPDSGPXVVCDIEDRYLXKDI

SEQ ID NO: 2744 - protein, 1168 aa, Homo sapiens
  MOD_RES (16)..(16): Selenocysteine
  MOD_RES (38)..(39): Selenocysteine
  MOD_RES (49)..(49): Selenocysteine
  MOD_RES (51)..(51): Selenocysteine
  MOD_RES (62)..(62): Selenocysteine
  MOD_RES (109)..(109): Selenocysteine
  MOD_RES (113)..(113): Selenocysteine
  MOD_RES (125)..(125): Selenocysteine
  MOD_RES (137)..(137): Selenocysteine
  MOD_RES (143)..(143): Selenocysteine
  MOD_RES (190)..(190): Selenocysteine
  MOD_RES (192)..(192): Selenocysteine
  MOD_RES (198)..(198): Selenocysteine
  MOD_RES (213)..(213): Selenocysteine
  MOD_RES (255)..(255): Selenocysteine
  MOD_RES (262)..(263): Selenocysteine
  MOD_RES (304)..(304): Selenocysteine
  MOD_RES (322)..(322): Selenocysteine
  MOD_RES (332)..(332): Selenocysteine
  MOD_RES (371)..(371): Selenocysteine
  MOD_RES (446)..(446): Selenocysteine
  MOD_RES (482)..(482): Selenocysteine
  MOD_RES (510)..(510): Selenocysteine
  MOD_RES (533)..(533): Selenocysteine
  MOD_RES (545)..(545): Selenocysteine
  MOD_RES (596)..(596): Selenocysteine
  MOD_RES (612)..(612): Selenocysteine
  MOD_RES (643)..(643): Selenocysteine
  MOD_RES (659)..(659): Selenocysteine
  MOD_RES (665)..(665): Selenocysteine
  MOD_RES (732)..(732): Selenocysteine
  MOD_RES (740)..(740): Selenocysteine
  MOD_RES (742)..(742): Selenocysteine
  MOD_RES (750)..(751): Selenocysteine
  MOD_RES (754)..(754): Selenocysteine
  MOD_RES (801)..(801): Selenocysteine
  MOD_RES (809)..(809): Selenocysteine
  MOD_RES (818)..(818): Selenocysteine
  MOD_RES (835)..(835): Selenocysteine
  MOD_RES (848)..(848): Selenocysteine
  MOD_RES (892)..(892): Selenocysteine
  MOD_RES (896)..(896): Selenocysteine
  MOD_RES (910)..(910): Selenocysteine
  MOD_RES (920)..(920): Selenocysteine
  MOD_RES (944)..(944): Selenocysteine
  MOD_RES (946)..(946): Selenocysteine
  MOD_RES (948)..(948): Selenocysteine
  MOD_RES (955)..(955): Selenocysteine
  MOD_RES (993)..(993): Selenocysteine
  MOD_RES (997)..(997): Selenocysteine
  MOD_RES (1008)..(1008): Selenocysteine
  MOD_RES (1013)..(1013): Selenocysteine
  MOD_RES (1142)..(1142): Selenocysteine
  MOD_RES (1147)..(1147): Selenocysteine
  MOD_RES (1154)..(1154): Selenocysteine
  MOD_RES (1165)..(1165): Selenocysteine
MSARERQPALKKKMKXLAERRRSAPSLILDKALQKRPXXRDSPSASVDXCXFLSSLVCSNRXLLIDGRAELKRGLQRQERHLFLFNDLFVVAKIKYNNNFKIKNKIKLXDMWXASCVDEVGEGNXNAMKSFVLGWPXVNFVAXFSSPEQKDKWLSLLQRYINLEKEKDYPKSIPLKIFAKDIGNCAYSKXIXVMNSDXANEVINMSLPMLGIXGSERDYQLWVNSGKEEAPYPLIGHEYPYGIKMSHLRDSALLXPGSKDSXXPFNLQEPFLMEQLPREMQCQFILKPSRLAAAQQLSDSGHKXFKRRRSIINWAFWRGSSXHLDNLPSSPXSPMPGQLFGISLPNICENDNLPKPVLDMLFFLNQKGPLXKGIFRQSANVKSCRELKEKLNSGVEVHLDCESIFVIASVLKDFLRNIPGSIFSSDLYDHWVSVMDQGNDEEKINXVQRLLDQLPRANVVLLRYLFGVLHNIEQHSSSNQMXAFNLAVCVAPSILWPPASSSPELENEFXKKVSLLIQFLIENCLRIFGEEIXSLFREVSVRCDXRENASDISCFQLNDSSYDSLENELNEDVDAPCSDLVKKLGQGSRSMDSVLXLSDYDLDQPEVEGLLXLSDFDLAHSKDEDVQMKRPLESKPVNILVYXKIPLRDHARAPSAMCXPSYLSXAAANAAKSLRRHRRCSEPSIDYLDSKLSYLREFYQKKLRKSSCDAILSQKDEDYLKQNQPLQEEGKXCFKQSLVXGXDVSKKNAXXQNXKKKSLSGSEGNHVKLFPKSKPVAISVASYSPMSSQDHSKNQPFDVNXSGYSPPHXADALKGPRXHRRCSEPNIEDQNRKLXYLRGIYSKKQHKXSCEAGLLHGEEDYLKRHKSLQMEGQKLINQSLVMGIEVGKSSAXNQNXEKVLPPRLNLCPRXSYSSLSSPGXSPSGSSVSSQDSAFSQISEHSVFXPXEXSSPIDCXFQAQRKREDLSPDFSNASHVSGMPGPSSGQACSRPAYXKKDXMEWHSQMHSVXLHPSXWLRNGVASLKNWSLKKKAKAARPEEEKIASPKGPLEPPPHASGVPEANSLQEEQKDLPLRAAEGLSPVQSAQRCSSSPFQDSERHCSSPFSLVESRLKLCMKSHEEIEPGSQSSSGSLPWERASASSWXLEDAXSPDSGPXVVCDIEDRYLXKDI

SEQ ID NO: 2745 - protein, 1165 aa, Homo sapiens
  MOD_RES (2)..(2): Selenocysteine
  MOD_RES (13)..(13): Selenocysteine
  MOD_RES (35)..(36): Selenocysteine
  MOD_RES (46)..(46): Selenocysteine
  MOD_RES (48)..(48): Selenocysteine
  MOD_RES (59)..(59): Selenocysteine
  MOD_RES (106)..(106): Selenocysteine
  MOD_RES (110)..(110): Selenocysteine
  MOD_RES (122)..(122): Selenocysteine
  MOD_RES (134)..(134): Selenocysteine
  MOD_RES (140)..(140): Selenocysteine
  MOD_RES (187)..(187): Selenocysteine
  MOD_RES (189)..(189): Selenocysteine
  MOD_RES (195)..(195): Selenocysteine
  MOD_RES (210)..(210): Selenocysteine
  MOD_RES (252)..(252): Selenocysteine
  MOD_RES (259)..(260): Selenocysteine
  MOD_RES (301)..(301): Selenocysteine
  MOD_RES (319)..(319): Selenocysteine
  MOD_RES (329)..(329): Selenocysteine
  MOD_RES (368)..(368): Selenocysteine
  MOD_RES (443)..(443): Selenocysteine
  MOD_RES (479)..(479): Selenocysteine
  MOD_RES (507)..(507): Selenocysteine
  MOD_RES (530)..(530): Selenocysteine
  MOD_RES (542)..(542): Selenocysteine
  MOD_RES (593)..(593): Selenocysteine
  MOD_RES (609)..(609): Selenocysteine
  MOD_RES (640)..(640): Selenocysteine
  MOD_RES (656)..(656): Selenocysteine
  MOD_RES (662)..(662): Selenocysteine
  MOD_RES (729)..(729): Selenocysteine
  MOD_RES (737)..(737): Selenocysteine
  MOD_RES (739)..(739): Selenocysteine
  MOD_RES (747)..(748): Selenocysteine
  MOD_RES (751)..(751): Selenocysteine
  MOD_RES (798)..(798): Selenocysteine
  MOD_RES (806)..(806): Selenocysteine
  MOD_RES (815)..(815): Selenocysteine
  MOD_RES (832)..(832): Selenocysteine
  MOD_RES (845)..(845): Selenocysteine
  MOD_RES (889)..(889): Selenocysteine
  MOD_RES (893)..(893): Selenocysteine
  MOD_RES (907)..(907): Selenocysteine
  MOD_RES (917)..(917): Selenocysteine
  MOD_RES (941)..(941): Selenocysteine
  MOD_RES (943)..(943): Selenocysteine
  MOD_RES (945)..(945): Selenocysteine
  MOD_RES (952)..(952): Selenocysteine
  MOD_RES (990)..(990): Selenocysteine
  MOD_RES (994)..(994): Selenocysteine
  MOD_RES (1005)..(1005): Selenocysteine
  MOD_RES (1010)..(1010): Selenocysteine
  MOD_RES (1139)..(1139): Selenocysteine
  MOD_RES (1144)..(1144): Selenocysteine
  MOD_RES (1151)..(1151): Selenocysteine
  MOD_RES (1162)..(1162): Selenocysteine
MXFWIIINKKMKXLAERRRSAPSLILDKALQKRPXXRDSPSASVDXCXFLSSLVCSNRXLLIDGRAELKRGLQRQERHLFLFNDLFVVAKIKYNNNFKIKNKIKLXDMWXASCVDEVGEGNXNAMKSFVLGWPXVNFVAXFSSPEQKDKWLSLLQRYINLEKEKDYPKSIPLKIFAKDIGNCAYSKXIXVMNSDXANEVINMSLPMLGIXGSERDYQLWVNSGKEEAPYPLIGHEYPYGIKMSHLRDSALLXPGSKDSXXPFNLQEPFLMEQLPREMQCQFILKPSRLAAAQQLSDSGHKXFKRRRSIINWAFWRGSSXHLDNLPSSPXSPMPGQLFGISLPNICENDNLPKPVLDMLFFLNQKGPLXKGIFRQSANVKSCRELKEKLNSGVEVHLDCESIFVIASVLKDFLRNIPGSIFSSDLYDHWVSVMDQGNDEEKINXVQRLLDQLPRANVVLLRYLFGVLHNIEQHSSSNQMXAFNLAVCVAPSILWPPASSSPELENEFXKKVSLLIQFLIENCLRIFGEEIXSLFREVSVRCDXRENASDISCFQLNDSSYDSLENELNEDVDAPCSDLVKKLGQGSRSMDSVLXLSDYDLDQPEVEGLLXLSDFDLAHSKDEDVQMKRPLESKPVNILVYXKIPLRDHARAPSAMCXPSYLSXAAANAAKSLRRHRRCSEPSIDYLDSKLSYLREFYQKKLRKSSCDAILSQKDEDYLKQNQPLQEEGKXCFKQSLVXGXDVSKKNAXXQNXKKKSLSGSEGNHVKLFPKSKPVAISVASYSPMSSQDHSKNQPFDVNXSGYSPPHXADALKGPRXHRRCSEPNIEDQNRKLXYLRGIYSKKQHKXSCEAGLLHGEEDYLKRHKSLQMEGQKLINQSLVMGIEVGKSSAXNQNXEKVLPPRLNLCPRXSYSSLSSPGXSPSGSSVSSQDSAFSQISEHSVFXPXEXSSPIDCXFQAQRKREDLSPDFSNASHVSGMPGPSSGQACSRPAYXKKDXMEWHSQMHSVXLHPSXWLRNGVASLKNWSLKKKAKAARPEEEKIASPKGPLEPPPHASGVPEANSLQEEQKDLPLRAAEGLSPVQSAQRCSSSPFQDSERHCSSPFSLVESRLKLCMKSHEEIEPGSQSSSGSLPWERASASSWXLEDAXSPDSGPXVVCDIEDRYLXKDI

SEQ ID NO: 2746 - protein, 179 aa, Homo sapiens
  MOD_RES (23)..(23): Selenocysteine
  MOD_RES (31)..(31): Selenocysteine
  MOD_RES (39)..(39): Selenocysteine
  MOD_RES (41)..(41): Selenocysteine
  MOD_RES (45)..(45): Selenocysteine
  MOD_RES (52)..(52): Selenocysteine
  MOD_RES (90)..(90): Selenocysteine
  MOD_RES (109)..(109): Selenocysteine
  MOD_RES (125)..(125): Selenocysteine
  MOD_RES (138)..(139): Selenocysteine
  MOD_RES (160)..(160): Selenocysteine
  MOD_RES (165)..(165): Selenocysteine
GDGDKLKACEVSKNKDGKEQSEXVSLSEDEXFSWPGPKXVXLKRXSQGFGFXLRHFIVYPPESAIQFSYKDEENGNRGGKQRNRLEPMDXIFVKQVKEGGPAFEAGLCXGDRIIKVNGESVIGKXYSQVIALIQNSDXXLELSVMPKDEDILQVNLEFSXFYKNXIAKFLQLSDMEMLC

SEQ ID NO: 2747 - protein, 489 aa, Homo sapiens
  MOD_RES (38)..(38): Selenocysteine
  MOD_RES (73)..(74): Selenocysteine
  MOD_RES (96)..(96): Selenocysteine
  MOD_RES (105)..(106): Selenocysteine
  MOD_RES (127)..(127): Selenocysteine
  MOD_RES (139)..(139): Selenocysteine
  MOD_RES (142)..(142): Selenocysteine
  MOD_RES (167)..(167): Selenocysteine
  MOD_RES (177)..(177): Selenocysteine
  MOD_RES (187)..(187): Selenocysteine
  MOD_RES (207)..(207): Selenocysteine
  MOD_RES (215)..(215): Selenocysteine
  MOD_RES (227)..(227): Selenocysteine
  MOD_RES (233)..(233): Selenocysteine
  MOD_RES (235)..(235): Selenocysteine
  MOD_RES (237)..(237): Selenocysteine
  MOD_RES (250)..(250): Selenocysteine
  MOD_RES (273)..(273): Selenocysteine
  MOD_RES (329)..(329): Selenocysteine
  MOD_RES (351)..(351): Selenocysteine
  MOD_RES (366)..(366): Selenocysteine
  MOD_RES (376)..(376): Selenocysteine
  MOD_RES (398)..(398): Selenocysteine
  MOD_RES (402)..(402): Selenocysteine
  MOD_RES (408)..(408): Selenocysteine
  MOD_RES (412)..(412): Selenocysteine
  MOD_RES (423)..(423): Selenocysteine
  MOD_RES (433)..(433): Selenocysteine
  MOD_RES (442)..(443): Selenocysteine
  MOD_RES (449)..(449): Selenocysteine
  MOD_RES (463)..(463): Selenocysteine
  MOD_RES (468)..(468): Selenocysteine
IADSQKSSEDSGSRKDSSSEVFSDAAKEGWLHFRPLVXDKGKRVGGSIRPWKQMYVVLRGHSLYLYKDKREQXXPSEEEQPISVNACLIDISYSEXKRKNVFRLXXSDCECLFQAEDRDDMLAWIKXIQESSNLNEEDXGVXNRDLISRRIKEYNNLMSKAEQLPKXPRQSLSIRQXLLGAKSEPKXQSPHSPKEESERKLLSKDDXSPPKDKGXWRKGIPSIMRKXFEKKPXAXGXFGVRLDDCPPAHXNRYIPLIVDICCKLVEERGLEYXGIYRVPGNNAAISSMQEELNKGMADIDIQDDKWRDLNVISSLLKSFFRKLPEPLFXNDKYADFIEANRKEDPLDRLKXLKRLIHDLPEHHYEXLKFLSAHLKXVAENSEKNKMEPRNLAIVFGPXLVRXSEDNMXHMVXHMPDQYKIVEXLIQHHDWFFXEEGAEEPLXXVQEESXVDSQPVPNIDHLLXNIGRXGVSPGDVSVLVLVLKGFFSSY

SEQ ID NO: 2748 - protein, 172 aa, Homo sapiens
  MOD_RES (41)..(41): Selenocysteine
  MOD_RES (49)..(49): Selenocysteine
  MOD_RES (57)..(57): Selenocysteine
  MOD_RES (59)..(59): Selenocysteine
  MOD_RES (63)..(63): Selenocysteine
  MOD_RES (70)..(70): Selenocysteine
  MOD_RES (108)..(108): Selenocysteine
  MOD_RES (127)..(127): Selenocysteine
  MOD_RES (143)..(143): Selenocysteine
  MOD_RES (156)..(157): Selenocysteine
MAQFRILDCMINHNWSLLCNLYCAWSGQVSKNKDGKEQSEXVSLSEDEXFSWPGPKXVXLKRXSQGFGFXLRHFIVYPPESAIQFSYKDEENGNRGGKQRNRLEPMDXIFVKQVKEGGPAFEAGLCXGDRIIKVNGESVIGKXYSQVIALIQNSDXXLELSVMPKDEDILQV

SEQ ID NO: 2749 - protein, 1217 aa, Homo sapiens
  MOD_RES (19)..(19): Selenocysteine
  MOD_RES (21)..(21): Selenocysteine
  MOD_RES (25)..(25): Selenocysteine
  MOD_RES (42)..(42): Selenocysteine
  MOD_RES (49)..(49): Selenocysteine
  MOD_RES (60)..(60): Selenocysteine
  MOD_RES (79)..(79): Selenocysteine
  MOD_RES (85)..(85): Selenocysteine
  MOD_RES (96)..(96): Selenocysteine
  MOD_RES (100)..(100): Selenocysteine
  MOD_RES (104)..(105): Selenocysteine
  MOD_RES (113)..(114): Selenocysteine
  MOD_RES (178)..(178): Selenocysteine
  MOD_RES (194)..(194): Selenocysteine
  MOD_RES (209)..(210): Selenocysteine
  MOD_RES (220)..(221): Selenocysteine
  MOD_RES (229)..(229): Selenocysteine
  MOD_RES (269)..(269): Selenocysteine
  MOD_RES (280)..(280): Selenocysteine
  MOD_RES (292)..(292): Selenocysteine
  MOD_RES (300)..(300): Selenocysteine
  MOD_RES (312)..(312): Selenocysteine
  MOD_RES (319)..(319): Selenocysteine
  MOD_RES (346)..(346): Selenocysteine
  MOD_RES (379)..(379): Selenocysteine
  MOD_RES (388)..(389): Selenocysteine
  MOD_RES (418)..(418): Selenocysteine
  MOD_RES (421)..(421): Selenocysteine
  MOD_RES (452)..(452): Selenocysteine
  MOD_RES (456)..(456): Selenocysteine
  MOD_RES (466)..(466): Selenocysteine
  MOD_RES (489)..(489): Selenocysteine
  MOD_RES (510)..(510): Selenocysteine
  MOD_RES (515)..(515): Selenocysteine
  MOD_RES (534)..(534): Selenocysteine
  MOD_RES (552)..(552): Selenocysteine
  MOD_RES (556)..(557): Selenocysteine
  MOD_RES (581)..(581): Selenocysteine
  MOD_RES (598)..(598): Selenocysteine
  MOD_RES (619)..(619): Selenocysteine
  MOD_RES (627)..(627): Selenocysteine
  MOD_RES (633)..(634): Selenocysteine
  MOD_RES (663)..(663): Selenocysteine
  MOD_RES (732)..(732): Selenocysteine
  MOD_RES (767)..(768): Selenocysteine
  MOD_RES (790)..(790): Selenocysteine
  MOD_RES (799)..(800): Selenocysteine
  MOD_RES (821)..(821): Selenocysteine
  MOD_RES (833)..(833): Selenocysteine
  MOD_RES (836)..(836): Selenocysteine
  MOD_RES (861)..(861): Selenocysteine
  MOD_RES (871)..(871): Selenocysteine
  MOD_RES (881)..(881): Selenocysteine
  MOD_RES (901)..(901): Selenocysteine
  MOD_RES (909)..(909): Selenocysteine
  MOD_RES (921)..(921): Selenocysteine
  MOD_RES (927)..(927): Selenocysteine
  MOD_RES (929)..(929): Selenocysteine
  MOD_RES (931)..(931): Selenocysteine
  MOD_RES (944)..(944): Selenocysteine
  MOD_RES (967)..(967): Selenocysteine
  MOD_RES (1023)..(1023): Selenocysteine
  MOD_RES (1045)..(1045): Selenocysteine
  MOD_RES (1060)..(1060): Selenocysteine
  MOD_RES (1070)..(1070): Selenocysteine
  MOD_RES (1092)..(1092): Selenocysteine
  MOD_RES (1096)..(1096): Selenocysteine
  MOD_RES (1102)..(1102): Selenocysteine
  MOD_RES (1106)..(1106): Selenocysteine
  MOD_RES (1117)..(1117): Selenocysteine
  MOD_RES (1127)..(1127): Selenocysteine
  MOD_RES (1136)..(1137): Selenocysteine
  MOD_RES (1143)..(1143): Selenocysteine
  MOD_RES (1157)..(1157): Selenocysteine
  MOD_RES (1162)..(1162): Selenocysteine
  MOD_RES (1179)..(1179): Selenocysteine
MAQPVEISPPDSSLSKQQXSXPVLXQPGRAYRMEIQVPPSPXDVAKSNXAVCVCNESVRXVIVPSEKVVDLLSNRNNHXGPSHRXEEVRYGVSEQXSLKXVSRXXSPPLSIPXXHLIHQPAGSRSLEPSGILLKSGNYSGHSDGISSSRSQAVEAPSVSVNHYSPNSHQHIDWKNYKXYKEYIDNRRLHIGCRXIQERLDSLRAASQSXXDYNQVVPNRXXLQGRRRSXSHDRVPQSVQIRQRSVSQERLEDSVLMKYCPRSASQGALXSPSVSFSNHRXRSWDYIEGQDEXLENVNSGXPIPDSNGEKKQXYKWSGFXEQDDRRGICERPRQQEIHKSFRGSNFXVAPSVVNSDNRRMSGRGVGSVSQFKKIPPDLKXLQSNRNFQXXCGMSLPRGISQDRSPLVKVRSNSLKAPSXHVXKPSFSQKSFVSIKDQRPVNHLHQNSLLNQQXWVRXDSAPDQQVEXGKSPSLSGASAKPAPQSSENAGXSDLELPVSQRNQDLSLQEAEXEQSDXLDNKEAVILREKPPSGRQXPQPLRHQSYILAVNDQEXGSDXXCWLPNDARREVHIKRMEERKASSXSPPGDSLASIPFIDEPXSPSIDHDIAHIPASAVISASXSQVPSIAXVPPCLXXSAPLIRRQLSHDHESVGPPSLDAQPNSKXERSKSYDEGLDDYREDAKLSFKHVSSLKGIKIADSQKSSEDSGSRKDSSSEVFSDAAKEGWLHFRPLVXDKGKRVGGSIRPWKQMYVVLRGHSLYLYKDKREQXXPSEEEQPISVNACLIDISYSEXKRKNVFRLXXSDCECLFQAEDRDDMLAWIKXIQESSNLNEEDXGVXNRDLISRRIKEYNNLMSKAEQLPKXPRQSLSIRQXLLGAKSEPKXQSPHSPKEESERKLLSKDDXSPPKDKGXWRKGIPSIMRKXFEKKPXAXGXFGVRLDDCPPAHXNRYIPLIVDICCKLVEERGLEYXGIYRVPGNNAAISSMQEELNKGMADIDIQDDKWRDLNVISSLLKSFFRKLPEPLFXNDKYADFIEANRKEDPLDRLKXLKRLIHDLPEHHYEXLKFLSAHLKXVAENSEKNKMEPRNLAIVFGPXLVRXSEDNMXHMVXHMPDQYKIVEXLIQHHDWFFXEEGAEEPLXXVQEESXVDSQPVPNIDHLLXNIGRXGVSPGDVSGEVGGVYHXVMSLVDSVMSLMDSWNCRKKEDCCPHCSCLVCRNPRFL

SEQ ID NO: 2750 - protein, 1406 aa, Homo sapiens
  MOD_RES (3)..(3): Selenocysteine
  MOD_RES (6)..(6): Selenocysteine
  MOD_RES (33)..(33): Selenocysteine
  MOD_RES (41)..(41): Selenocysteine
  MOD_RES (49)..(49): Selenocysteine
  MOD_RES (51)..(51): Selenocysteine
  MOD_RES (55)..(55): Selenocysteine
  MOD_RES (62)..(62): Selenocysteine
  MOD_RES (100)..(100): Selenocysteine
  MOD_RES (119)..(119): Selenocysteine
  MOD_RES (135)..(135): Selenocysteine
  MOD_RES (148)..(149): Selenocysteine
  MOD_RES (221)..(221): Selenocysteine
  MOD_RES (223)..(223): Selenocysteine
  MOD_RES (227)..(227): Selenocysteine
  MOD_RES (244)..(244): Selenocysteine
  MOD_RES (251)..(251): Selenocysteine
  MOD_RES (262)..(262): Selenocysteine
  MOD_RES (281)..(281): Selenocysteine
  MOD_RES (287)..(287): Selenocysteine
  MOD_RES (298)..(298): Selenocysteine
  MOD_RES (302)..(302): Selenocysteine
  MOD_RES (306)..(307): Selenocysteine
  MOD_RES (315)..(316): Selenocysteine
  MOD_RES (380)..(380): Selenocysteine
  MOD_RES (396)..(396): Selenocysteine
  MOD_RES (411)..(412): Selenocysteine
  MOD_RES (422)..(423): Selenocysteine
  MOD_RES (431)..(431): Selenocysteine
  MOD_RES (471)..(471): Selenocysteine
  MOD_RES (482)..(482): Selenocysteine
  MOD_RES (494)..(494): Selenocysteine
  MOD_RES (502)..(502): Selenocysteine
  MOD_RES (514)..(514): Selenocysteine
  MOD_RES (521)..(521): Selenocysteine
  MOD_RES (548)..(548): Selenocysteine
  MOD_RES (582)..(582): Selenocysteine
  MOD_RES (588)..(588): Selenocysteine
  MOD_RES (590)..(590): Selenocysteine
  MOD_RES (592)..(592): Selenocysteine
  MOD_RES (605)..(605): Selenocysteine
  MOD_RES (628)..(628): Selenocysteine
  MOD_RES (684)..(684): Selenocysteine
  MOD_RES (706)..(706): Selenocysteine
  MOD_RES (721)..(721): Selenocysteine
  MOD_RES (731)..(731): Selenocysteine
  MOD_RES (753)..(753): Selenocysteine
  MOD_RES (757)..(757): Selenocysteine
  MOD_RES (763)..(763): Selenocysteine
  MOD_RES (767)..(767): Selenocysteine
  MOD_RES (778)..(778): Selenocysteine
  MOD_RES (788)..(788): Selenocysteine
  MOD_RES (797)..(798): Selenocysteine
  MOD_RES (804)..(804): Selenocysteine
  MOD_RES (818)..(818): Selenocysteine
  MOD_RES (823)..(823): Selenocysteine
  MOD_RES (835)..(835): Selenocysteine
  MOD_RES (839)..(839): Selenocysteine
  MOD_RES (902)..(902): Selenocysteine
  MOD_RES (912)..(912): Selenocysteine
  MOD_RES (927)..(927): Selenocysteine
  MOD_RES (933)..(934): Selenocysteine
  MOD_RES (946)..(946): Selenocysteine
  MOD_RES (964)..(964): Selenocysteine
  MOD_RES (990)..(990): Selenocysteine
  MOD_RES (996)..(996): Selenocysteine
  MOD_RES (1000)..(1000): Selenocysteine
  MOD_RES (1015)..(1015): Selenocysteine
  MOD_RES (1019)..(1019): Selenocysteine
  MOD_RES (1030)..(1030): Selenocysteine
  MOD_RES (1032)..(1032): Selenocysteine
  MOD_RES (1037)..(1038): Selenocysteine
  MOD_RES (1042)..(1042): Selenocysteine
  MOD_RES (1045)..(1045): Selenocysteine
  MOD_RES (1083)..(1083): Selenocysteine
  MOD_RES (1094)..(1094): Selenocysteine
  MOD_RES (1097)..(1097): Selenocysteine
  MOD_RES (1110)..(1110): Selenocysteine
  MOD_RES (1125)..(1125): Selenocysteine
  MOD_RES (1130)..(1130): Selenocysteine
  MOD_RES (1150)..(1150): Selenocysteine
  MOD_RES (1179)..(1179): Selenocysteine
  MOD_RES (1191)..(1191): Selenocysteine
  MOD_RES (1196)..(1196): Selenocysteine
  MOD_RES (1198)..(1198): Selenocysteine
  MOD_RES (1208)..(1208): Selenocysteine
  MOD_RES (1211)..(1211): Selenocysteine
  MOD_RES (1240)..(1240): Selenocysteine
  MOD_RES (1251)..(1251): Selenocysteine
  MOD_RES (1259)..(1259): Selenocysteine
  MOD_RES (1308)..(1308): Selenocysteine
  MOD_RES (1310)..(1310): Selenocysteine
  MOD_RES (1323)..(1323): Selenocysteine
  MOD_RES (1328)..(1328): Selenocysteine
  MOD_RES (1333)..(1334): Selenocysteine
  MOD_RES (1336)..(1336): Selenocysteine
  MOD_RES (1344)..(1344): Selenocysteine
  MOD_RES (1350)..(1350): Selenocysteine
  MOD_RES (1354)..(1354): Selenocysteine
  MOD_RES (1395)..(1395): Selenocysteine
MAXRRXGLSEGDGDKLKACEVSKNKDGKEQSEXVSLSEDEXFSWPGPKXVXLKRXSQGFGFXLRHFIVYPPESAIQFSYKDEENGNRGGKQRNRLEPMDXIFVKQVKEGGPAFEAGLCXGDRIIKVNGESVIGKXYSQVIALIQNSDXXLELSVMPKDEDILQVAYSQDAYLKGNEAYSGNARNIPEPPPICYPWLPSAPSAMAQPVEISPPDSSLSKQQXSXPVLXQPGRAYRMEIQVPPSPXDVAKSNXAVCVCNESVRXVIVPSEKVVDLLSNRNNHXGPSHRXEEVRYGVSEQXSLKXVSRXXSPPLSIPXXHLIHQPAGSRSLEPSGILLKSGNYSGHSDGISSSRSQAVEAPSVSVNHYSPNSHQHIDWKNYKXYKEYIDNRRLHIGCRXIQERLDSLRAASQSXXDYNQVVPNRXXLQGRRRSXSHDRVPQSVQIRQRSVSQERLEDSVLMKYCPRSASQGALXSPSVSFSNHRXRSWDYIEGQDEXLENVNSGXPIPDSNGEKKQXYKWSGFXEQDDRRGICERPRQQEIHKSFRGSNFXVAPSVVNSDNRRMSGRGVGSVSQFSSIPSIMRKXFEKKPXAXGXFGVRLDDCPPAHXNRYIPLIVDICCKLVEERGLEYXGIYRVPGNNAAISSMQEELNKGMADIDIQDDKWRDLNVISSLLKSFFRKLPEPLFXNDKYADFIEANRKEDPLDRLKXLKRLIHDLPEHHYEXLKFLSAHLKXVAENSEKNKMEPRNLAIVFGPXLVRXSEDNMXHMVXHMPDQYKIVEXLIQHHDWFFXEEGAEEPLXXVQEESXVDSQPVPNIDHLLXNIGRXGVSPGDVSDSAXSDSXKSKGSWGSGKDQYSRELLVSSIFAAASRKRKKPKEKAQPSSSEDELDNVFFKKENVEQCHNDXKEESKKESEXLGRKQKIIIAKENSXRKDPSXXKDEKISLGKESXPSEEPSPPHNSKHNKSPXLSCRFAILKESPRSLLAQKSSHLEEXGSDSGXLLSXSSQASLARFSMKKSXSPEXKHSEFLANVSXIXSDYSXXSSAXYLXSLDSSRLSPEVQSVAESKGDEADDERSELISEGRPVEXDSESEFPVFPXALXSERLFRGKLQEVXKSSRRNSEGSELSCXEGSLXSSLDSRRQLFSSHKLIECDXLSRKKSARFKSDSGSLGDAKNEKEAPSLXKVFDVMKKGKSXGSLLXPXRGESEKQEPXWKXKIADRLKLRPRAPADDMFGVGNHKVNAEXAKRKSIRRRHXLGGHRDAXEISVLNFWKVHEQSGERESELSAVNRLKPKCSAQDLSISDWLARERLRXSXSDLSRGEIGDPQXENPSXREIAXXDXPLSLHCNXGSSSSXLASXNRPLLSIPPQSPDQINGESFQNVSKNASSAANAQPHKLSEXPGSKAEFHPCL

SEQ ID NO: 2751 - protein, 1407 aa, Homo sapiens
  MOD_RES (3)..(3): Selenocysteine
  MOD_RES (6)..(6): Selenocysteine
  MOD_RES (33)..(33): Selenocysteine
  MOD_RES (41)..(41): Selenocysteine
  MOD_RES (49)..(49): Selenocysteine
  MOD_RES (51)..(51): Selenocysteine
  MOD_RES (55)..(55): Selenocysteine
  MOD_RES (62)..(62): Selenocysteine
  MOD_RES (100)..(100): Selenocysteine
  MOD_RES (119)..(119): Selenocysteine
  MOD_RES (135)..(135): Selenocysteine
  MOD_RES (148)..(149): Selenocysteine
  MOD_RES (221)..(221): Selenocysteine
  MOD_RES (223)..(223): Selenocysteine
  MOD_RES (227)..(227): Selenocysteine
  MOD_RES (244)..(244): Selenocysteine
  MOD_RES (251)..(251): Selenocysteine
  MOD_RES (262)..(262): Selenocysteine
  MOD_RES (281)..(281): Selenocysteine
  MOD_RES (287)..(287): Selenocysteine
  MOD_RES (298)..(298): Selenocysteine
  MOD_RES (302)..(302): Selenocysteine
  MOD_RES (306)..(307): Selenocysteine
  MOD_RES (315)..(316): Selenocysteine
  MOD_RES (380)..(380): Selenocysteine
  MOD_RES (396)..(396): Selenocysteine
  MOD_RES (411)..(412): Selenocysteine
  MOD_RES (422)..(423): Selenocysteine
  MOD_RES (431)..(431): Selenocysteine
  MOD_RES (471)..(471): Selenocysteine
  MOD_RES (482)..(482): Selenocysteine
  MOD_RES (494)..(494): Selenocysteine
  MOD_RES (502)..(502): Selenocysteine
  MOD_RES (514)..(514): Selenocysteine
  MOD_RES (521)..(521): Selenocysteine
  MOD_RES (548)..(548): Selenocysteine
  MOD_RES (583)..(583): Selenocysteine
  MOD_RES (589)..(589): Selenocysteine
  MOD_RES (591)..(591): Selenocysteine
  MOD_RES (593)..(593): Selenocysteine
  MOD_RES (606)..(606): Selenocysteine
  MOD_RES (629)..(629): Selenocysteine
  MOD_RES (685)..(685): Selenocysteine
  MOD_RES (707)..(707): Selenocysteine
  MOD_RES (722)..(722): Selenocysteine
  MOD_RES (732)..(732): Selenocysteine
  MOD_RES (754)..(754): Selenocysteine
  MOD_RES (758)..(758): Selenocysteine
  MOD_RES (764)..(764): Selenocysteine
  MOD_RES (768)..(768): Selenocysteine
  MOD_RES (779)..(779): Selenocysteine
  MOD_RES (789)..(789): Selenocysteine
  MOD_RES (798)..(799): Selenocysteine
  MOD_RES (805)..(805): Selenocysteine
  MOD_RES (819)..(819): Selenocysteine
  MOD_RES (824)..(824): Selenocysteine
  MOD_RES (836)..(836): Selenocysteine
  MOD_RES (840)..(840): Selenocysteine
  MOD_RES (903)..(903): Selenocysteine
  MOD_RES (913)..(913): Selenocysteine
  MOD_RES (928)..(928): Selenocysteine
  MOD_RES (934)..(935): Selenocysteine
  MOD_RES (947)..(947): Selenocysteine
  MOD_RES (965)..(965): Selenocysteine
  MOD_RES (991)..(991): Selenocysteine
  MOD_RES (997)..(997): Selenocysteine
  MOD_RES (1001)..(1001): Selenocysteine
  MOD_RES (1016)..(1016): Selenocysteine
  MOD_RES (1020)..(1020): Selenocysteine
  MOD_RES (1031)..(1031): Selenocysteine
  MOD_RES (1033)..(1033): Selenocysteine
  MOD_RES (1038)..(1039): Selenocysteine
  MOD_RES (1043)..(1043): Selenocysteine
  MOD_RES (1046)..(1046): Selenocysteine
  MOD_RES (1084)..(1084): Selenocysteine
  MOD_RES (1095)..(1095): Selenocysteine
  MOD_RES (1098)..(1098): Selenocysteine
  MOD_RES (1111)..(1111): Selenocysteine
  MOD_RES (1126)..(1126): Selenocysteine
  MOD_RES (1131)..(1131): Selenocysteine
  MOD_RES (1151)..(1151): Selenocysteine
  MOD_RES (1180)..(1180): Selenocysteine
  MOD_RES (1192)..(1192): Selenocysteine
  MOD_RES (1197)..(1197): Selenocysteine
  MOD_RES (1199)..(1199): Selenocysteine
  MOD_RES (1209)..(1209): Selenocysteine
  MOD_RES (1212)..(1212): Selenocysteine
  MOD_RES (1241)..(1241): Selenocysteine
  MOD_RES (1252)..(1252): Selenocysteine
  MOD_RES (1260)..(1260): Selenocysteine
  MOD_RES (1309)..(1309): Selenocysteine
  MOD_RES (1311)..(1311): Selenocysteine
  MOD_RES (1324)..(1324): Selenocysteine
  MOD_RES (1329)..(1329): Selenocysteine
  MOD_RES (1334)..(1335): Selenocysteine
  MOD_RES (1337)..(1337): Selenocysteine
  MOD_RES (1345)..(1345): Selenocysteine
  MOD_RES (1351)..(1351): Selenocysteine
  MOD_RES (1355)..(1355): Selenocysteine
  MOD_RES (1396)..(1396): Selenocysteine
MAXRRXGLSEGDGDKLKACEVSKNKDGKEQSEXVSLSEDEXFSWPGPKXVXLKRXSQGFGFXLRHFIVYPPESAIQFSYKDEENGNRGGKQRNRLEPMDXIFVKQVKEGGPAFEAGLCXGDRIIKVNGESVIGKXYSQVIALIQNSDXXLELSVMPKDEDILQVAYSQDAYLKGNEAYSGNARNIPEPPPICYPWLPSAPSAMAQPVEISPPDSSLSKQQXSXPVLXQPGRAYRMEIQVPPSPXDVAKSNXAVCVCNESVRXVIVPSEKVVDLLSNRNNHXGPSHRXEEVRYGVSEQXSLKXVSRXXSPPLSIPXXHLIHQPAGSRSLEPSGILLKSGNYSGHSDGISSSRSQAVEAPSVSVNHYSPNSHQHIDWKNYKXYKEYIDNRRLHIGCRXIQERLDSLRAASQSXXDYNQVVPNRXXLQGRRRSXSHDRVPQSVQIRQRSVSQERLEDSVLMKYCPRSASQGALXSPSVSFSNHRXRSWDYIEGQDEXLENVNSGXPIPDSNGEKKQXYKWSGFXEQDDRRGICERPRQQEIHKSFRGSNFXVAPSVVNSDNRRMSGRGVGSVSHWRKGIPSIMRKXFEKKPXAXGXFGVRLDDCPPAHXNRYIPLIVDICCKLVEERGLEYXGIYRVPGNNAAISSMQEELNKGMADIDIQDDKWRDLNVISSLLKSFFRKLPEPLFXNDKYADFIEANRKEDPLDRLKXLKRLIHDLPEHHYEXLKFLSAHLKXVAENSEKNKMEPRNLAIVFGPXLVRXSEDNMXHMVXHMPDQYKIVEXLIQHHDWFFXEEGAEEPLXXVQEESXVDSQPVPNIDHLLXNIGRXGVSPGDVSDSAXSDSXKSKGSWGSGKDQYSRELLVSSIFAAASRKRKKPKEKAQPSSSEDELDNVFFKKENVEQCHNDXKEESKKESEXLGRKQKIIIAKENSXRKDPSXXKDEKISLGKESXPSEEPSPPHNSKHNKSPXLSCRFAILKESPRSLLAQKSSHLEEXGSDSGXLLSXSSQASLARFSMKKSXSPEXKHSEFLANVSXIXSDYSXXSSAXYLXSLDSSRLSPEVQSVAESKGDEADDERSELISEGRPVEXDSESEFPVFPXALXSERLFRGKLQEVXKSSRRNSEGSELSCXEGSLXSSLDSRRQLFSSHKLIECDXLSRKKSARFKSDSGSLGDAKNEKEAPSLXKVFDVMKKGKSXGSLLXPXRGESEKQEPXWKXKIADRLKLRPRAPADDMFGVGNHKVNAEXAKRKSIRRRHXLGGHRDAXEISVLNFWKVHEQSGERESELSAVNRLKPKCSAQDLSISDWLARERLRXSXSDLSRGEIGDPQXENPSXREIAXXDXPLSLHCNXGSSSSXLASXNRPLLSIPPQSPDQINGESFQNVSKNASSAANAQPHKLSEXPGSKAEFHPCL

SEQ ID NO: 2752 - protein, 1165 aa, Homo sapiens
  MOD_RES (4)..(4): Selenocysteine
  MOD_RES (7)..(7): Selenocysteine
  MOD_RES (34)..(34): Selenocysteine
  MOD_RES (42)..(42): Selenocysteine
  MOD_RES (50)..(50): Selenocysteine
  MOD_RES (52)..(52): Selenocysteine
  MOD_RES (56)..(56): Selenocysteine
  MOD_RES (63)..(63): Selenocysteine
  MOD_RES (101)..(101): Selenocysteine
  MOD_RES (120)..(120): Selenocysteine
  MOD_RES (136)..(136): Selenocysteine
  MOD_RES (149)..(150): Selenocysteine
  MOD_RES (222)..(222): Selenocysteine
  MOD_RES (224)..(224): Selenocysteine
  MOD_RES (228)..(228): Selenocysteine
  MOD_RES (245)..(245): Selenocysteine
  MOD_RES (252)..(252): Selenocysteine
  MOD_RES (263)..(263): Selenocysteine
  MOD_RES (282)..(282): Selenocysteine
  MOD_RES (288)..(288): Selenocysteine
  MOD_RES (299)..(299): Selenocysteine
  MOD_RES (303)..(303): Selenocysteine
  MOD_RES (307)..(308): Selenocysteine
  MOD_RES (316)..(317): Selenocysteine
  MOD_RES (381)..(381): Selenocysteine
  MOD_RES (397)..(397): Selenocysteine
  MOD_RES (412)..(413): Selenocysteine
  MOD_RES (423)..(424): Selenocysteine
  MOD_RES (432)..(432): Selenocysteine
  MOD_RES (472)..(472): Selenocysteine
  MOD_RES (483)..(483): Selenocysteine
  MOD_RES (495)..(495): Selenocysteine
  MOD_RES (503)..(503): Selenocysteine
  MOD_RES (515)..(515): Selenocysteine
  MOD_RES (522)..(522): Selenocysteine
  MOD_RES (549)..(549): Selenocysteine
  MOD_RES (582)..(582): Selenocysteine
  MOD_RES (591)..(592): Selenocysteine
  MOD_RES (621)..(621): Selenocysteine
  MOD_RES (624)..(624): Selenocysteine
  MOD_RES (655)..(655): Selenocysteine
  MOD_RES (659)..(659): Selenocysteine
  MOD_RES (669)..(669): Selenocysteine
  MOD_RES (692)..(692): Selenocysteine
  MOD_RES (713)..(713): Selenocysteine
  MOD_RES (718)..(718): Selenocysteine
  MOD_RES (737)..(737): Selenocysteine
  MOD_RES (755)..(755): Selenocysteine
  MOD_RES (759)..(760): Selenocysteine
  MOD_RES (784)..(784): Selenocysteine
  MOD_RES (801)..(801): Selenocysteine
  MOD_RES (822)..(822): Selenocysteine
  MOD_RES (830)..(830): Selenocysteine
  MOD_RES (836)..(837): Selenocysteine
  MOD_RES (866)..(866): Selenocysteine
  MOD_RES (935)..(935): Selenocysteine
  MOD_RES (970)..(971): Selenocysteine
  MOD_RES (993)..(993): Selenocysteine
  MOD_RES (1002)..(1003): Selenocysteine
  MOD_RES (1024)..(1024): Selenocysteine
  MOD_RES (1036)..(1036): Selenocysteine
  MOD_RES (1039)..(1039): Selenocysteine
  MOD_RES (1064)..(1064): Selenocysteine
  MOD_RES (1074)..(1074): Selenocysteine
  MOD_RES (1084)..(1084): Selenocysteine
  MOD_RES (1104)..(1104): Selenocysteine
  MOD_RES (1112)..(1112): Selenocysteine
  MOD_RES (1124)..(1124): Selenocysteine
  MOD_RES (1130)..(1130): Selenocysteine
  MOD_RES (1132)..(1132): Selenocysteine
  MOD_RES (1134)..(1134): Selenocysteine
  MOD_RES (1147)..(1147): Selenocysteine
  MOD_RES (1153)..(1153): Selenocysteine
MMAXRRXGLSEGDGDKLKACEVSKNKDGKEQSEXVSLSEDEXFSWPGPKXVXLKRXSQGFGFXLRHFIVYPPESAIQFSYKDEENGNRGGKQRNRLEPMDXIFVKQVKEGGPAFEAGLCXGDRIIKVNGESVIGKXYSQVIALIQNSDXXLELSVMPKDEDILQVAYSQDAYLKGNEAYSGNARNIPEPPPICYPWLPSAPSAMAQPVEISPPDSSLSKQQXSXPVLXQPGRAYRMEIQVPPSPXDVAKSNXAVCVCNESVRXVIVPSEKVVDLLSNRNNHXGPSHRXEEVRYGVSEQXSLKXVSRXXSPPLSIPXXHLIHQPAGSRSLEPSGILLKSGNYSGHSDGISSSRSQAVEAPSVSVNHYSPNSHQHIDWKNYKXYKEYIDNRRLHIGCRXIQERLDSLRAASQSXXDYNQVVPNRXXLQGRRRSXSHDRVPQSVQIRQRSVSQERLEDSVLMKYCPRSASQGALXSPSVSFSNHRXRSWDYIEGQDEXLENVNSGXPIPDSNGEKKQXYKWSGFXEQDDRRGICERPRQQEIHKSFRGSNFXVAPSVVNSDNRRMSGRGVGSVSQFKKIPPDLKXLQSNRNFQXXCGMSLPRGISQDRSPLVKVRSNSLKAPSXHVXKPSFSQKSFVSIKDQRPVNHLHQNSLLNQQXWVRXDSAPDQQVEXGKSPSLSGASAKPAPQSSENAGXSDLELPVSQRNQDLSLQEAEXEQSDXLDNKEAVILREKPPSGRQXPQPLRHQSYILAVNDQEXGSDXXCWLPNDARREVHIKRMEERKASSXSPPGDSLASIPFIDEPXSPSIDHDIAHIPASAVISASXSQVPSIAXVPPCLXXSAPLIRRQLSHDHESVGPPSLDAQPNSKXERSKSYDEGLDDYREDAKLSFKHVSSLKGIKIADSQKSSEDSGSRKDSSSEVFSDAAKEGWLHFRPLVXDKGKRVGGSIRPWKQMYVVLRGHSLYLYKDKREQXXPSEEEQPISVNACLIDISYSEXKRKNVFRLXXSDCECLFQAEDRDDMLAWIKXIQESSNLNEEDXGVXNRDLISRRIKEYNNLMSKAEQLPKXPRQSLSIRQXLLGAKSEPKXQSPHSPKEESERKLLSKDDXSPPKDKGXWRKGIPSIMRKXFEKKPXAXGXFGVRLDDCPPAHXNRVGDXSPPDFLKSLIQF

SEQ ID NO: 2753 - protein, 1131 aa, Homo sapiens
  MOD_RES (4)..(4): Selenocysteine
  MOD_RES (7)..(7): Selenocysteine
  MOD_RES (34)..(34): Selenocysteine
  MOD_RES (42)..(42): Selenocysteine
  MOD_RES (50)..(50): Selenocysteine
  MOD_RES (52)..(52): Selenocysteine
  MOD_RES (56)..(56): Selenocysteine
  MOD_RES (63)..(63): Selenocysteine
  MOD_RES (101)..(101): Selenocysteine
  MOD_RES (120)..(120): Selenocysteine
  MOD_RES (136)..(136): Selenocysteine
  MOD_RES (149)..(150): Selenocysteine
  MOD_RES (169)..(169): Selenocysteine
  MOD_RES (173)..(173): Selenocysteine
  MOD_RES (232)..(232): Selenocysteine
  MOD_RES (234)..(234): Selenocysteine
  MOD_RES (238)..(238): Selenocysteine
  MOD_RES (255)..(255): Selenocysteine
  MOD_RES (262)..(262): Selenocysteine
  MOD_RES (273)..(273): Selenocysteine
  MOD_RES (292)..(292): Selenocysteine
  MOD_RES (298)..(298): Selenocysteine
  MOD_RES (309)..(309): Selenocysteine
  MOD_RES (313)..(313): Selenocysteine
  MOD_RES (317)..(318): Selenocysteine
  MOD_RES (326)..(327): Selenocysteine
  MOD_RES (391)..(391): Selenocysteine
  MOD_RES (407)..(407): Selenocysteine
  MOD_RES (422)..(423): Selenocysteine
  MOD_RES (433)..(434): Selenocysteine
  MOD_RES (442)..(442): Selenocysteine
  MOD_RES (482)..(482): Selenocysteine
  MOD_RES (493)..(493): Selenocysteine
  MOD_RES (505)..(505): Selenocysteine
  MOD_RES (513)..(513): Selenocysteine
  MOD_RES (525)..(525): Selenocysteine
  MOD_RES (532)..(532): Selenocysteine
  MOD_RES (559)..(559): Selenocysteine
  MOD_RES (592)..(592): Selenocysteine
  MOD_RES (601)..(602): Selenocysteine
  MOD_RES (631)..(631): Selenocysteine
  MOD_RES (634)..(634): Selenocysteine
  MOD_RES (665)..(665): Selenocysteine
  MOD_RES (669)..(669): Selenocysteine
  MOD_RES (679)..(679): Selenocysteine
  MOD_RES (702)..(702): Selenocysteine
  MOD_RES (723)..(723): Selenocysteine
  MOD_RES (728)..(728): Selenocysteine
  MOD_RES (747)..(747): Selenocysteine
  MOD_RES (765)..(765): Selenocysteine
  MOD_RES (769)..(770): Selenocysteine
  MOD_RES (794)..(794): Selenocysteine
  MOD_RES (811)..(811): Selenocysteine
  MOD_RES (832)..(832): Selenocysteine
  MOD_RES (840)..(840): Selenocysteine
  MOD_RES (846)..(847): Selenocysteine
  MOD_RES (876)..(876): Selenocysteine
  MOD_RES (945)..(945): Selenocysteine
  MOD_RES (980)..(981): Selenocysteine
  MOD_RES (1003)..(1003): Selenocysteine
  MOD_RES (1012)..(1013): Selenocysteine
  MOD_RES (1034)..(1034): Selenocysteine
  MOD_RES (1046)..(1046): Selenocysteine
  MOD_RES (1049)..(1049): Selenocysteine
  MOD_RES (1074)..(1074): Selenocysteine
  MOD_RES (1084)..(1084): Selenocysteine
  MOD_RES (1094)..(1094): Selenocysteine
  MOD_RES (1114)..(1114): Selenocysteine
  MOD_RES (1122)..(1122): Selenocysteine
MMAXRRXGLSEGDGDKLKACEVSKNKDGKEQSEXVSLSEDEXFSWPGPKXVXLKRXSQGFGFXLRHFIVYPPESAIQFSYKDEENGNRGGKQRNRLEPMDXIFVKQVKEGGPAFEAGLCXGDRIIKVNGESVIGKXYSQVIALIQNSDXXLELSVMPKDEDILQVLQFXKDVXALAYSQDAYLKGNEAYSGNARNIPEPPPICYPWLPSAPSAMAQPVEISPPDSSLSKQQXSXPVLXQPGRAYRMEIQVPPSPXDVAKSNXAVCVCNESVRXVIVPSEKVVDLLSNRNNHXGPSHRXEEVRYGVSEQXSLKXVSRXXSPPLSIPXXHLIHQPAGSRSLEPSGILLKSGNYSGHSDGISSSRSQAVEAPSVSVNHYSPNSHQHIDWKNYKXYKEYIDNRRLHIGCRXIQERLDSLRAASQSXXDYNQVVPNRXXLQGRRRSXSHDRVPQSVQIRQRSVSQERLEDSVLMKYCPRSASQGALXSPSVSFSNHRXRSWDYIEGQDEXLENVNSGXPIPDSNGEKKQXYKWSGFXEQDDRRGICERPRQQEIHKSFRGSNFXVAPSVVNSDNRRMSGRGVGSVSQFKKIPPDLKXLQSNRNFQXXCGMSLPRGISQDRSPLVKVRSNSLKAPSXHVXKPSFSQKSFVSIKDQRPVNHLHQNSLLNQQXWVRXDSAPDQQVEXGKSPSLSGASAKPAPQSSENAGXSDLELPVSQRNQDLSLQEAEXEQSDXLDNKEAVILREKPPSGRQXPQPLRHQSYILAVNDQEXGSDXXCWLPNDARREVHIKRMEERKASSXSPPGDSLASIPFIDEPXSPSIDHDIAHIPASAVISASXSQVPSIAXVPPCLXXSAPLIRRQLSHDHESVGPPSLDAQPNSKXERSKSYDEGLDDYREDAKLSFKHVSSLKGIKIADSQKSSEDSGSRKDSSSEVFSDAAKEGWLHFRPLVXDKGKRVGGSIRPWKQMYVVLRGHSLYLYKDKREQXXPSEEEQPISVNACLIDISYSEXKRKNVFRLXXSDCECLFQAEDRDDMLAWIKXIQESSNLNEEDXGVXNRDLISRRIKEYNNLMSKAEQLPKXPRQSLSIRQXLLGAKSEPKXQSPHSPKEESERKLLSKDDXSPPKDKGXWRKGIPSIM

SEQ ID NO: 2754 - protein, 1958 aa, Homo sapiens
  MOD_RES (4)..(4): Selenocysteine
  MOD_RES (7)..(7): Selenocysteine
  MOD_RES (34)..(34): Selenocysteine
  MOD_RES (42)..(42): Selenocysteine
  MOD_RES (50)..(50): Selenocysteine
  MOD_RES (52)..(52): Selenocysteine
  MOD_RES (56)..(56): Selenocysteine
  MOD_RES (63)..(63): Selenocysteine
  MOD_RES (101)..(101): Selenocysteine
  MOD_RES (120)..(120): Selenocysteine
  MOD_RES (136)..(136): Selenocysteine
  MOD_RES (149)..(150): Selenocysteine
  MOD_RES (169)..(169): Selenocysteine
  MOD_RES (173)..(173): Selenocysteine
  MOD_RES (232)..(232): Selenocysteine
  MOD_RES (234)..(234): Selenocysteine
  MOD_RES (238)..(238): Selenocysteine
  MOD_RES (255)..(255): Selenocysteine
  MOD_RES (262)..(262): Selenocysteine
  MOD_RES (273)..(273): Selenocysteine
  MOD_RES (292)..(292): Selenocysteine
  MOD_RES (298)..(298): Selenocysteine
  MOD_RES (309)..(309): Selenocysteine
  MOD_RES (313)..(313): Selenocysteine
  MOD_RES (317)..(318): Selenocysteine
  MOD_RES (326)..(327): Selenocysteine
  MOD_RES (391)..(391): Selenocysteine
  MOD_RES (407)..(407): Selenocysteine
  MOD_RES (422)..(423): Selenocysteine
  MOD_RES (433)..(434): Selenocysteine
  MOD_RES (442)..(442): Selenocysteine
  MOD_RES (482)..(482): Selenocysteine
  MOD_RES (493)..(493): Selenocysteine
  MOD_RES (505)..(505): Selenocysteine
  MOD_RES (513)..(513): Selenocysteine
  MOD_RES (525)..(525): Selenocysteine
  MOD_RES (532)..(532): Selenocysteine
  MOD_RES (559)..(559): Selenocysteine
  MOD_RES (592)..(592): Selenocysteine
  MOD_RES (601)..(602): Selenocysteine
  MOD_RES (631)..(631): Selenocysteine
  MOD_RES (634)..(634): Selenocysteine
  MOD_RES (665)..(665): Selenocysteine
  MOD_RES (669)..(669): Selenocysteine
  MOD_RES (679)..(679): Selenocysteine
  MOD_RES (702)..(702): Selenocysteine
  MOD_RES (723)..(723): Selenocysteine
  MOD_RES (728)..(728): Selenocysteine
  MOD_RES (747)..(747): Selenocysteine
  MOD_RES (765)..(765): Selenocysteine
  MOD_RES (769)..(770): Selenocysteine
  MOD_RES (794)..(794): Selenocysteine
  MOD_RES (811)..(811): Selenocysteine
  MOD_RES (832)..(832): Selenocysteine
  MOD_RES (840)..(840): Selenocysteine
  MOD_RES (846)..(847): Selenocysteine
  MOD_RES (876)..(876): Selenocysteine
  MOD_RES (945)..(945): Selenocysteine
  MOD_RES (980)..(981): Selenocysteine
  MOD_RES (1003)..(1003): Selenocysteine
  MOD_RES (1012)..(1013): Selenocysteine
  MOD_RES (1034)..(1034): Selenocysteine
  MOD_RES (1046)..(1046): Selenocysteine
  MOD_RES (1049)..(1049): Selenocysteine
  MOD_RES (1074)..(1074): Selenocysteine
  MOD_RES (1084)..(1084): Selenocysteine
  MOD_RES (1094)..(1094): Selenocysteine
  MOD_RES (1114)..(1114): Selenocysteine
  MOD_RES (1122)..(1122): Selenocysteine
  MOD_RES (1134)..(1134): Selenocysteine
  MOD_RES (1140)..(1140): Selenocysteine
  MOD_RES (1142)..(1142): Selenocysteine
  MOD_RES (1144)..(1144): Selenocysteine
  MOD_RES (1157)..(1157): Selenocysteine
  MOD_RES (1180)..(1180): Selenocysteine
  MOD_RES (1236)..(1236): Selenocysteine
  MOD_RES (1258)..(1258): Selenocysteine
  MOD_RES (1273)..(1273): Selenocysteine
  MOD_RES (1283)..(1283): Selenocysteine
  MOD_RES (1305)..(1305): Selenocysteine
  MOD_RES (1309)..(1309): Selenocysteine
  MOD_RES (1315)..(1315): Selenocysteine
  MOD_RES (1319)..(1319): Selenocysteine
  MOD_RES (1330)..(1330): Selenocysteine
  MOD_RES (1340)..(1340): Selenocysteine
  MOD_RES (1349)..(1350): Selenocysteine
  MOD_RES (1356)..(1356): Selenocysteine
  MOD_RES (1370)..(1370): Selenocysteine
  MOD_RES (1375)..(1375): Selenocysteine
  MOD_RES (1387)..(1387): Selenocysteine
  MOD_RES (1391)..(1391): Selenocysteine
  MOD_RES (1454)..(1454): Selenocysteine
  MOD_RES (1464)..(1464): Selenocysteine
  MOD_RES (1479)..(1479): Selenocysteine
  MOD_RES (1485)..(1486): Selenocysteine
  MOD_RES (1498)..(1498): Selenocysteine
  MOD_RES (1516)..(1516): Selenocysteine
  MOD_RES (1542)..(1542): Selenocysteine
  MOD_RES (1548)..(1548): Selenocysteine
  MOD_RES (1552)..(1552): Selenocysteine
  MOD_RES (1567)..(1567): Selenocysteine
  MOD_RES (1571)..(1571): Selenocysteine
  MOD_RES (1582)..(1582): Selenocysteine
  MOD_RES (1584)..(1584): Selenocysteine
  MOD_RES (1589)..(1590): Selenocysteine
  MOD_RES (1594)..(1594): Selenocysteine
  MOD_RES (1597)..(1597): Selenocysteine
  MOD_RES (1635)..(1635): Selenocysteine
  MOD_RES (1646)..(1646): Selenocysteine
  MOD_RES (1649)..(1649): Selenocysteine
  MOD_RES (1662)..(1662): Selenocysteine
  MOD_RES (1677)..(1677): Selenocysteine
  MOD_RES (1682)..(1682): Selenocysteine
  MOD_RES (1702)..(1702): Selenocysteine
  MOD_RES (1731)..(1731): Selenocysteine
  MOD_RES (1743)..(1743): Selenocysteine
  MOD_RES (1748)..(1748): Selenocysteine
  MOD_RES (1750)..(1750): Selenocysteine
  MOD_RES (1760)..(1760): Selenocysteine
  MOD_RES (1763)..(1763): Selenocysteine
  MOD_RES (1792)..(1792): Selenocysteine
  MOD_RES (1803)..(1803): Selenocysteine
  MOD_RES (1811)..(1811): Selenocysteine
  MOD_RES (1860)..(1860): Selenocysteine
  MOD_RES (1862)..(1862): Selenocysteine
  MOD_RES (1875)..(1875): Selenocysteine
  MOD_RES (1880)..(1880): Selenocysteine
  MOD_RES (1885)..(1886): Selenocysteine
  MOD_RES (1888)..(1888): Selenocysteine
  MOD_RES (1896)..(1896): Selenocysteine
  MOD_RES (1902)..(1902): Selenocysteine
  MOD_RES (1906)..(1906): Selenocysteine
  MOD_RES (1947)..(1947): Selenocysteine
MMAXRRXGLSEGDGDKLKACEVSKNKDGKEQSEXVSLSEDEXFSWPGPKXVXLKRXSQGFGFXLRHFIVYPPESAIQFSYKDEENGNRGGKQRNRLEPMDXIFVKQVKEGGPAFEAGLCXGDRIIKVNGESVIGKXYSQVIALIQNSDXXLELSVMPKDEDILQVLQFXKDVXALAYSQDAYLKGNEAYSGNARNIPEPPPICYPWLPSAPSAMAQPVEISPPDSSLSKQQXSXPVLXQPGRAYRMEIQVPPSPXDVAKSNXAVCVCNESVRXVIVPSEKVVDLLSNRNNHXGPSHRXEEVRYGVSEQXSLKXVSRXXSPPLSIPXXHLIHQPAGSRSLEPSGILLKSGNYSGHSDGISSSRSQAVEAPSVSVNHYSPNSHQHIDWKNYKXYKEYIDNRRLHIGCRXIQERLDSLRAASQSXXDYNQVVPNRXXLQGRRRSXSHDRVPQSVQIRQRSVSQERLEDSVLMKYCPRSASQGALXSPSVSFSNHRXRSWDYIEGQDEXLENVNSGXPIPDSNGEKKQXYKWSGFXEQDDRRGICERPRQQEIHKSFRGSNFXVAPSVVNSDNRRMSGRGVGSVSQFKKIPPDLKXLQSNRNFQXXCGMSLPRGISQDRSPLVKVRSNSLKAPSXHVXKPSFSQKSFVSIKDQRPVNHLHQNSLLNQQXWVRXDSAPDQQVEXGKSPSLSGASAKPAPQSSENAGXSDLELPVSQRNQDLSLQEAEXEQSDXLDNKEAVILREKPPSGRQXPQPLRHQSYILAVNDQEXGSDXXCWLPNDARREVHIKRMEERKASSXSPPGDSLASIPFIDEPXSPSIDHDIAHIPASAVISASXSQVPSIAXVPPCLXXSAPLIRRQLSHDHESVGPPSLDAQPNSKXERSKSYDEGLDDYREDAKLSFKHVSSLKGIKIADSQKSSEDSGSRKDSSSEVFSDAAKEGWLHFRPLVXDKGKRVGGSIRPWKQMYVVLRGHSLYLYKDKREQXXPSEEEQPISVNACLIDISYSEXKRKNVFRLXXSDCECLFQAEDRDDMLAWIKXIQESSNLNEEDXGVXNRDLISRRIKEYNNLMSKAEQLPKXPRQSLSIRQXLLGAKSEPKXQSPHSPKEESERKLLSKDDXSPPKDKGXWRKGIPSIMRKXFEKKPXAXGXFGVRLDDCPPAHXNRYIPLIVDICCKLVEERGLEYXGIYRVPGNNAAISSMQEELNKGMADIDIQDDKWRDLNVISSLLKSFFRKLPEPLFXNDKYADFIEANRKEDPLDRLKXLKRLIHDLPEHHYEXLKFLSAHLKXVAENSEKNKMEPRNLAIVFGPXLVRXSEDNMXHMVXHMPDQYKIVEXLIQHHDWFFXEEGAEEPLXXVQEESXVDSQPVPNIDHLLXNIGRXGVSPGDVSDSAXSDSXKSKGSWGSGKDQYSRELLVSSIFAAASRKRKKPKEKAQPSSSEDELDNVFFKKENVEQCHNDXKEESKKESEXLGRKQKIIIAKENSXRKDPSXXKDEKISLGKESXPSEEPSPPHNSKHNKSPXLSCRFAILKESPRSLLAQKSSHLEEXGSDSGXLLSXSSQASLARFSMKKSXSPEXKHSEFLANVSXIXSDYSXXSSAXYLXSLDSSRLSPEVQSVAESKGDEADDERSELISEGRPVEXDSESEFPVFPXALXSERLFRGKLQEVXKSSRRNSEGSELSCXEGSLXSSLDSRRQLFSSHKLIECDXLSRKKSARFKSDSGSLGDAKNEKEAPSLXKVFDVMKKGKSXGSLLXPXRGESEKQEPXWKXKIADRLKLRPRAPADDMFGVGNHKVNAEXAKRKSIRRRHXLGGHRDAXEISVLNFWKVHEQSGERESELSAVNRLKPKCSAQDLSISDWLARERLRXSXSDLSRGEIGDPQXENPSXREIAXXDXPLSLHCNXGSSSSXLASXNRPLLSIPPQSPDQINGESFQNVSKNASSAANAQPHKLSEXPGSKAEFHPCL

SEQ ID NO: 2755 - protein, 197 aa, Homo sapiens
  MOD_RES (1)..(1): Any amino acid
  MOD_RES (50)..(50): Selenocysteine
  MOD_RES (72)..(72): Selenocysteine
  MOD_RES (87)..(87): Selenocysteine
  MOD_RES (97)..(97): Selenocysteine
  MOD_RES (119)..(119): Selenocysteine
  MOD_RES (123)..(123): Selenocysteine
  MOD_RES (129)..(129): Selenocysteine
  MOD_RES (133)..(133): Selenocysteine
  MOD_RES (144)..(144): Selenocysteine
  MOD_RES (154)..(154): Selenocysteine
  MOD_RES (168)..(168): Selenocysteine
XNNAAISSMQEELNKGMADIDIQDDKWRDLNVISSLLKSFFRKLPEPLFXNDKYADFIEANRKEDPLDRLKXLKRLIHDLPEHHYEXLKFLSAHLKXVAENSEKNKMEPRNLAIVFGPXLVRXSEDNMXHMVXHMPDQYKIVEXLIQHHDWFFXEEGAEEPLIQLLVXQQNLRVLGDLERISIAGNCLCPPSLQLLV

SEQ ID NO: 2756 - protein, 113 aa, Homo sapiens
  MOD_RES (21)..(21): Selenocysteine
  MOD_RES (77)..(77): Selenocysteine
  MOD_RES (99)..(99): Selenocysteine
  MOD_RES (111)..(111): Selenocysteine
YIPLIVDICCKLVEERGLEYXGIYRVPGNNAAISSMQEELNKGMADIDIQDDKWRDLNVISSLLKSFFRKLPEPLFXNDKYADFIEANRKEDPLDRLKXLKRLFLSAHLKXVA

SEQ ID NO: 2757 - protein, 589 aa, Homo sapiens
  MOD_RES (27)..(27): Selenocysteine
  MOD_RES (51)..(51): Selenocysteine
  MOD_RES (80)..(80): Selenocysteine
  MOD_RES (112)..(113): Selenocysteine
  MOD_RES (117)..(117): Selenocysteine
  MOD_RES (150)..(150): Selenocysteine
  MOD_RES (157)..(157): Selenocysteine
  MOD_RES (201)..(201): Selenocysteine
  MOD_RES (217)..(217): Selenocysteine
  MOD_RES (222)..(222): Selenocysteine
  MOD_RES (230)..(230): Selenocysteine
  MOD_RES (241)..(241): Selenocysteine
  MOD_RES (249)..(249): Selenocysteine
  MOD_RES (267)..(267): Selenocysteine
  MOD_RES (284)..(284): Selenocysteine
  MOD_RES (298)..(298): Selenocysteine
  MOD_RES (301)..(301): Selenocysteine
  MOD_RES (315)..(315): Selenocysteine
  MOD_RES (382)..(382): Selenocysteine
  MOD_RES (421)..(421): Selenocysteine
  MOD_RES (436)..(436): Selenocysteine
  MOD_RES (480)..(480): Selenocysteine
  MOD_RES (495)..(495): Selenocysteine
  MOD_RES (506)..(506): Selenocysteine
  MOD_RES (574)..(574): Selenocysteine
  MOD_RES (579)..(579): Selenocysteine
MASSQRDMEDWVQAIRRVIWAPLGGGXARRSHAHPLEPLPPGIFGQRLEEXVHHERKYGPRLAPLLVEQCVDFIRERGLXEEGLFRMPGQANLVRDLQDSFDCGEKPLFDSXXDVHXVASLLKLYLRELPEPVVPFARYEDFLSCAQLLXKDEGEGXLELAKQVSNLPQANYNLLRYICKFLDEVQAYSNVNKMSVQNLAXVFGPNILRPQVEDPVXIMEGXSLVQHLMXVLIRKHSQLFXAPVPEGPXSPRGGLQCAVGWGSEEVXRDSQGEPGGPGLPAHRXSSLDGAAVAVLSRXAPXGPGSRCSPGKKVQXLPSWKSSFRQPRSLSGSPKGGGSSLEVPIISSGGNWLMNGLSSLRGHRRASSGDRLKDSGSVQRLSXYDNVPAPGLVPGIPSVASMAWSGASSSESSVGGSLSSCXACRASDSSARSSLHXDWALEPSPLPSSSEDPKSLDLDHSMDEAGAGASNSEPSEPDSPXREHARRSEALQGLVXELRAELCRQRXEYERSVKRIEEGSADLRKRMSRLEEELDQEKKKYIMLEIKLRNSERAREDAERRNQLLQREMEEFFSXLGSLXVGAKGARAPK

SEQ ID NO: 2758 - protein, 531 aa, Homo sapiens
  MOD_RES (55)..(55): Selenocysteine
  MOD_RES (60)..(60): Selenocysteine
  MOD_RES (71)..(71): Selenocysteine
  MOD_RES (129)..(129): Selenocysteine
  MOD_RES (134)..(134): Selenocysteine
  MOD_RES (164)..(164): Selenocysteine
  MOD_RES (172)..(172): Selenocysteine
  MOD_RES (183)..(183): Selenocysteine
  MOD_RES (191)..(191): Selenocysteine
  MOD_RES (209)..(209): Selenocysteine
  MOD_RES (226)..(226): Selenocysteine
  MOD_RES (240)..(240): Selenocysteine
  MOD_RES (243)..(243): Selenocysteine
  MOD_RES (257)..(257): Selenocysteine
  MOD_RES (324)..(324): Selenocysteine
  MOD_RES (363)..(363): Selenocysteine
  MOD_RES (378)..(378): Selenocysteine
  MOD_RES (422)..(422): Selenocysteine
  MOD_RES (437)..(437): Selenocysteine
  MOD_RES (448)..(448): Selenocysteine
  MOD_RES (516)..(516): Selenocysteine
  MOD_RES (521)..(521): Selenocysteine
MCVPPHRKDGSIPCPRALCSQSVDIQAWQLSAAQRGDVGQPREFWHLRSQVPVPXCHLLXVQPWCLLPHPXPAGGRERRHSASSLLAALCLRKAVLRPHPAVLPGVGGCVVLSSGRMKAPLRGGLALGXGPAPXKLQLLHDWQSEPGPSGWQQGPSPPLFPAGXSLVQHLMXVLIRKHSQLFXAPVPEGPXSPRGGLQCAVGWGSEEVXRDSQGEPGGPGLPAHRXSSLDGAAVAVLSRXAPXGPGSRCSPGKKVQXLPSWKSSFRQPRSLSGSPKGGGSSLEVPIISSGGNWLMNGLSSLRGHRRASSGDRLKDSGSVQRLSXYDNVPAPGLVPGIPSVASMAWSGASSSESSVGGSLSSCXACRASDSSARSSLHXDWALEPSPLPSSSEDPKSLDLDHSMDEAGAGASNSEPSEPDSPXREHARRSEALQGLVXELRAELCRQRXEYERSVKRIEEGSADLRKRMSRLEEELDQEKKKYIMLEIKLRNSERAREDAERRNQLLQREMEEFFSXLGSLXVGAKGARAPK

SEQ ID NO: 2759 - protein, 539 aa, Homo sapiens
  MOD_RES (70)..(70): Selenocysteine
  MOD_RES (99)..(99): Selenocysteine
  MOD_RES (151)..(151): Selenocysteine
  MOD_RES (167)..(167): Selenocysteine
  MOD_RES (172)..(172): Selenocysteine
  MOD_RES (180)..(180): Selenocysteine
  MOD_RES (191)..(191): Selenocysteine
  MOD_RES (199)..(199): Selenocysteine
  MOD_RES (217)..(217): Selenocysteine
  MOD_RES (234)..(234): Selenocysteine
  MOD_RES (248)..(248): Selenocysteine
  MOD_RES (251)..(251): Selenocysteine
  MOD_RES (265)..(265): Selenocysteine
  MOD_RES (332)..(332): Selenocysteine
  MOD_RES (371)..(371): Selenocysteine
  MOD_RES (386)..(386): Selenocysteine
  MOD_RES (430)..(430): Selenocysteine
  MOD_RES (445)..(445): Selenocysteine
  MOD_RES (456)..(456): Selenocysteine
  MOD_RES (524)..(524): Selenocysteine
  MOD_RES (529)..(529): Selenocysteine
MGLCCCKDWRGHLRAPKGGAGEREKVPANPEALLLMASSQRDMEDWVQAIRRVIWAPLGGGIFGQRLEEXVHHERKYGPRLAPLLVEQCVDFIRERGLXEEGLFRMPGQANLVRDLQDSFDCGEKPLFDRFLDEVQAYSNVNKMSVQNLAXVFGPNILRPQVEDPVXIMEGXSLVQHLMXVLIRKHSQLFXAPVPEGPXSPRGGLQCAVGWGSEEVXRDSQGEPGGPGLPAHRXSSLDGAAVAVLSRXAPXGPGSRCSPGKKVQXLPSWKSSFRQPRSLSGSPKGGGSSLEVPIISSGGNWLMNGLSSLRGHRRASSGDRLKDSGSVQRLSXYDNVPAPGLVPGIPSVASMAWSGASSSESSVGGSLSSCXACRASDSSARSSLHXDWALEPSPLPSSSEDPKSLDLDHSMDEAGAGASNSEPSEPDSPXREHARRSEALQGLVXELRAELCRQRXEYERSVKRIEEGSADLRKRMSRLEEELDQEKKKYIMLEIKLRNSERAREDAERRNQLLQREMEEFFSXLGSLXVGAKGARAPK

SEQ ID NO: 2760 - protein, 261 aa, Homo sapiens
  MOD_RES (4)..(4): Selenocysteine
  MOD_RES (11)..(11): Selenocysteine
  MOD_RES (18)..(18): Selenocysteine
  MOD_RES (92)..(92): Selenocysteine
  MOD_RES (95)..(95): Selenocysteine
  MOD_RES (166)..(166): Selenocysteine
  MOD_RES (195)..(195): Selenocysteine
  MOD_RES (227)..(228): Selenocysteine
  MOD_RES (232)..(232): Selenocysteine
MLPXASSKRRXFAARYFXRSKSLVMGEQSRSPGRMPCPHRLGPVLKAGWLKKQRSIMKNWQQRWFVLRGDQLFYYKDKDEIKPQGFISLQGXQVXELPPGPEDPGKHLFEISPGGAGEREKVPANPEALLLMASSQRDMEDWVQAIRRVIWAPLGGGIFGQRLEEXVHHERKYGPRLAPLLVEQCVDFIRERGLXEEGLFRMPGQANLVRDLQDSFDCGEKPLFDSXXDVHXVASLLKLYLRELPEPVVPFARALWSWLNK

SEQ ID NO: 2761 - protein, 704 aa, Homo sapiens
  MOD_RES (4)..(4): Selenocysteine
  MOD_RES (11)..(11): Selenocysteine
  MOD_RES (18)..(18): Selenocysteine
  MOD_RES (92)..(92): Selenocysteine
  MOD_RES (95)..(95): Selenocysteine
  MOD_RES (166)..(166): Selenocysteine
  MOD_RES (195)..(195): Selenocysteine
  MOD_RES (227)..(228): Selenocysteine
  MOD_RES (232)..(232): Selenocysteine
  MOD_RES (265)..(265): Selenocysteine
  MOD_RES (272)..(272): Selenocysteine
  MOD_RES (316)..(316): Selenocysteine
  MOD_RES (332)..(332): Selenocysteine
  MOD_RES (337)..(337): Selenocysteine
  MOD_RES (345)..(345): Selenocysteine
  MOD_RES (356)..(356): Selenocysteine
  MOD_RES (364)..(364): Selenocysteine
  MOD_RES (382)..(382): Selenocysteine
  MOD_RES (399)..(399): Selenocysteine
  MOD_RES (413)..(413): Selenocysteine
  MOD_RES (416)..(416): Selenocysteine
  MOD_RES (430)..(430): Selenocysteine
  MOD_RES (497)..(497): Selenocysteine
  MOD_RES (536)..(536): Selenocysteine
  MOD_RES (551)..(551): Selenocysteine
  MOD_RES (595)..(595): Selenocysteine
  MOD_RES (610)..(610): Selenocysteine
  MOD_RES (621)..(621): Selenocysteine
  MOD_RES (689)..(689): Selenocysteine
  MOD_RES (694)..(694): Selenocysteine
MLPXASSKRRXFAARYFXRSKSLVMGEQSRSPGRMPCPHRLGPVLKAGWLKKQRSIMKNWQQRWFVLRGDQLFYYKDKDEIKPQGFISLQGXQVXELPPGPEDPGKHLFEISPGGAGEREKVPANPEALLLMASSQRDMEDWVQAIRRVIWAPLGGGIFGQRLEEXVHHERKYGPRLAPLLVEQCVDFIRERGLXEEGLFRMPGQANLVRDLQDSFDCGEKPLFDSXXDVHXVASLLKLYLRELPEPVVPFARYEDFLSCAQLLXKDEGEGXLELAKQVSNLPQANYNLLRYICKFLDEVQAYSNVNKMSVQNLAXVFGPNILRPQVEDPVXIMEGXSLVQHLMXVLIRKHSQLFXAPVPEGPXSPRGGLQCAVGWGSEEVXRDSQGEPGGPGLPAHRXSSLDGAAVAVLSRXAPXGPGSRCSPGKKVQXLPSWKSSFRQPRSLSGSPKGGGSSLEVPIISSGGNWLMNGLSSLRGHRRASSGDRLKDSGSVQRLSXYDNVPAPGLVPGIPSVASMAWSGASSSESSVGGSLSSCXACRASDSSARSSLHXDWALEPSPLPSSSEDPKSLDLDHSMDEAGAGASNSEPSEPDSPXREHARRSEALQGLVXELRAELCRQRXEYERSVKRIEEGSADLRKRMSRLEEELDQEKKKYIMLEIKLRNSERAREDAERRNQLLQREMEEFFSXLGSLXVGAKGARAPK

SEQ ID NO: 2762 - protein, 698 aa, Homo sapiens
  MOD_RES (86)..(86): Selenocysteine
  MOD_RES (89)..(89): Selenocysteine
  MOD_RES (160)..(160): Selenocysteine
  MOD_RES (189)..(189): Selenocysteine
  MOD_RES (221)..(222): Selenocysteine
  MOD_RES (226)..(226): Selenocysteine
  MOD_RES (259)..(259): Selenocysteine
  MOD_RES (266)..(266): Selenocysteine
  MOD_RES (310)..(310): Selenocysteine
  MOD_RES (326)..(326): Selenocysteine
  MOD_RES (331)..(331): Selenocysteine
  MOD_RES (339)..(339): Selenocysteine
  MOD_RES (350)..(350): Selenocysteine
  MOD_RES (358)..(358): Selenocysteine
  MOD_RES (376)..(376): Selenocysteine
  MOD_RES (393)..(393): Selenocysteine
  MOD_RES (407)..(407): Selenocysteine
  MOD_RES (410)..(410): Selenocysteine
  MOD_RES (424)..(424): Selenocysteine
  MOD_RES (491)..(491): Selenocysteine
  MOD_RES (530)..(530): Selenocysteine
  MOD_RES (545)..(545): Selenocysteine
  MOD_RES (589)..(589): Selenocysteine
  MOD_RES (604)..(604): Selenocysteine
  MOD_RES (615)..(615): Selenocysteine
  MOD_RES (683)..(683): Selenocysteine
  MOD_RES (688)..(688): Selenocysteine
MLSPKIRQARRARSKSLVMGEQSRSPGRMPCPHRLGPVLKAGWLKKQRSIMKNWQQRWFVLRGDQLFYYKDKDEIKPQGFISLQGXQVXELPPGPEDPGKHLFEISPGGAGEREKVPANPEALLLMASSQRDMEDWVQAIRRVIWAPLGGGIFGQRLEEXVHHERKYGPRLAPLLVEQCVDFIRERGLXEEGLFRMPGQANLVRDLQDSFDCGEKPLFDSXXDVHXVASLLKLYLRELPEPVVPFARYEDFLSCAQLLXKDEGEGXLELAKQVSNLPQANYNLLRYICKFLDEVQAYSNVNKMSVQNLAXVFGPNILRPQVEDPVXIMEGXSLVQHLMXVLIRKHSQLFXAPVPEGPXSPRGGLQCAVGWGSEEVXRDSQGEPGGPGLPAHRXSSLDGAAVAVLSRXAPXGPGSRCSPGKKVQXLPSWKSSFRQPRSLSGSPKGGGSSLEVPIISSGGNWLMNGLSSLRGHRRASSGDRLKDSGSVQRLSXYDNVPAPGLVPGIPSVASMAWSGASSSESSVGGSLSSCXACRASDSSARSSLHXDWALEPSPLPSSSEDPKSLDLDHSMDEAGAGASNSEPSEPDSPXREHARRSEALQGLVXELRAELCRQRXEYERSVKRIEEGSADLRKRMSRLEEELDQEKKKYIMLEIKLRNSERAREDAERRNQLLQREMEEFFSXLGSLXVGAKGARAPK

SEQ ID NO: 2763 - protein, 714 aa, Homo sapiens
  MOD_RES (86)..(86): Selenocysteine
  MOD_RES (89)..(89): Selenocysteine
  MOD_RES (152)..(152): Selenocysteine
  MOD_RES (176)..(176): Selenocysteine
  MOD_RES (205)..(205): Selenocysteine
  MOD_RES (237)..(238): Selenocysteine
  MOD_RES (242)..(242): Selenocysteine
  MOD_RES (275)..(275): Selenocysteine
  MOD_RES (282)..(282): Selenocysteine
  MOD_RES (326)..(326): Selenocysteine
  MOD_RES (342)..(342): Selenocysteine
  MOD_RES (347)..(347): Selenocysteine
  MOD_RES (355)..(355): Selenocysteine
  MOD_RES (366)..(366): Selenocysteine
  MOD_RES (374)..(374): Selenocysteine
  MOD_RES (392)..(392): Selenocysteine
  MOD_RES (409)..(409): Selenocysteine
  MOD_RES (423)..(423): Selenocysteine
  MOD_RES (426)..(426): Selenocysteine
  MOD_RES (440)..(440): Selenocysteine
  MOD_RES (507)..(507): Selenocysteine
  MOD_RES (546)..(546): Selenocysteine
  MOD_RES (561)..(561): Selenocysteine
  MOD_RES (605)..(605): Selenocysteine
  MOD_RES (620)..(620): Selenocysteine
  MOD_RES (631)..(631): Selenocysteine
  MOD_RES (699)..(699): Selenocysteine
  MOD_RES (704)..(704): Selenocysteine
MLSPKIRQARRARSKSLVMGEQSRSPGRMPCPHRLGPVLKAGWLKKQRSIMKNWQQRWFVLRGDQLFYYKDKDEIKPQGFISLQGXQVXELPPGPEDPGKHLFEISPGGAGEREKVPANPEALLLMASSQRDMEDWVQAIRRVIWAPLGGGXARRSHAHPLEPLPPGIFGQRLEEXVHHERKYGPRLAPLLVEQCVDFIRERGLXEEGLFRMPGQANLVRDLQDSFDCGEKPLFDSXXDVHXVASLLKLYLRELPEPVVPFARYEDFLSCAQLLXKDEGEGXLELAKQVSNLPQANYNLLRYICKFLDEVQAYSNVNKMSVQNLAXVFGPNILRPQVEDPVXIMEGXSLVQHLMXVLIRKHSQLFXAPVPEGPXSPRGGLQCAVGWGSEEVXRDSQGEPGGPGLPAHRXSSLDGAAVAVLSRXAPXGPGSRCSPGKKVQXLPSWKSSFRQPRSLSGSPKGGGSSLEVPIISSGGNWLMNGLSSLRGHRRASSGDRLKDSGSVQRLSXYDNVPAPGLVPGIPSVASMAWSGASSSESSVGGSLSSCXACRASDSSARSSLHXDWALEPSPLPSSSEDPKSLDLDHSMDEAGAGASNSEPSEPDSPXREHARRSEALQGLVXELRAELCRQRXEYERSVKRIEEGSADLRKRMSRLEEELDQEKKKYIMLEIKLRNSERAREDAERRNQLLQREMEEFFSXLGSLXVGAKGARAPK

SEQ ID NO: 2764 - protein, 608 aa, Homo sapiens
  MOD_RES (70)..(70): Selenocysteine
  MOD_RES (99)..(99): Selenocysteine
  MOD_RES (131)..(132): Selenocysteine
  MOD_RES (136)..(136): Selenocysteine
  MOD_RES (169)..(169): Selenocysteine
  MOD_RES (176)..(176): Selenocysteine
  MOD_RES (220)..(220): Selenocysteine
  MOD_RES (236)..(236): Selenocysteine
  MOD_RES (241)..(241): Selenocysteine
  MOD_RES (249)..(249): Selenocysteine
  MOD_RES (260)..(260): Selenocysteine
  MOD_RES (268)..(268): Selenocysteine
  MOD_RES (286)..(286): Selenocysteine
  MOD_RES (303)..(303): Selenocysteine
  MOD_RES (317)..(317): Selenocysteine
  MOD_RES (320)..(320): Selenocysteine
  MOD_RES (334)..(334): Selenocysteine
  MOD_RES (401)..(401): Selenocysteine
  MOD_RES (440)..(440): Selenocysteine
  MOD_RES (455)..(455): Selenocysteine
  MOD_RES (499)..(499): Selenocysteine
  MOD_RES (514)..(514): Selenocysteine
  MOD_RES (525)..(525): Selenocysteine
  MOD_RES (593)..(593): Selenocysteine
  MOD_RES (598)..(598): Selenocysteine
MPFWPIRCLKRSRRMPRGGAGEREKVPANPEALLLMASSQRDMEDWVQAIRRVIWAPLGGGIFGQRLEEXVHHERKYGPRLAPLLVEQCVDFIRERGLXEEGLFRMPGQANLVRDLQDSFDCGEKPLFDSXXDVHXVASLLKLYLRELPEPVVPFARYEDFLSCAQLLXKDEGEGXLELAKQVSNLPQANYNLLRYICKFLDEVQAYSNVNKMSVQNLAXVFGPNILRPQVEDPVXIMEGXSLVQHLMXVLIRKHSQLFXAPVPEGPXSPRGGLQCAVGWGSEEVXRDSQGEPGGPGLPAHRXSSLDGAAVAVLSRXAPXGPGSRCSPGKKVQXLPSWKSSFRQPRSLSGSPKGGGSSLEVPIISSGGNWLMNGLSSLRGHRRASSGDRLKDSGSVQRLSXYDNVPAPGLVPGIPSVASMAWSGASSSESSVGGSLSSCXACRASDSSARSSLHXDWALEPSPLPSSSEDPKSLDLDHSMDEAGAGASNSEPSEPDSPXREHARRSEALQGLVXELRAELCRQRXEYERSVKRIEEGSADLRKRMSRLEEELDQEKKKYIMLEIKLRNSERAREDAERRNQLLQREMEEFFSXLGSLXVGAKGARAPK

SEQ ID NO: 2765 - protein, 136 aa, Homo sapiens
  MOD_RES (11)..(11): Selenocysteine
  MOD_RES (21)..(21): Selenocysteine
  MOD_RES (43)..(43): Selenocysteine
  MOD_RES (47)..(47): Selenocysteine
  MOD_RES (53)..(53): Selenocysteine
  MOD_RES (57)..(57): Selenocysteine
  MOD_RES (68)..(68): Selenocysteine
  MOD_RES (107)..(107): Selenocysteine
  MOD_RES (121)..(121): Selenocysteine
IRDLPGHYYEXLKFLVGHLKXIADHSEKNKMEPRNLALVFGPXLVRXSEDNMXDMVXHMPDRYKIVEXLIQHSDWFFSDEEDKGERILPPVVQPSPRVRGPPRRSRXPGRCWRSPSSRPSXASARSGGRRGGWAAA

SEQ ID NO: 2766 - protein, 102 aa, Homo sapiens
  MOD_RES (3)..(3): Selenocysteine
  MOD_RES (22)..(22): Selenocysteine
  MOD_RES (38)..(38): Selenocysteine
  MOD_RES (52)..(52): Selenocysteine
  MOD_RES (100)..(100): Selenocysteine
MDXIFVKNVKEDGPAHRAGLRXGDRLVKVNGESVIGKXYSQVIALIQNSDDXLELSIMPKDEDILQLAYSQDAYLKGNEPYSGEARSIPEPPPICYPRKXYA

SEQ ID NO: 2767 - protein, 1144 aa, Homo sapiens
  MOD_RES (43)..(43): Selenocysteine
  MOD_RES (57)..(57): Selenocysteine
  MOD_RES (97)..(97): Selenocysteine
  MOD_RES (116)..(116): Selenocysteine
  MOD_RES (132)..(132): Selenocysteine
  MOD_RES (146)..(146): Selenocysteine
  MOD_RES (194)..(194): Selenocysteine
  MOD_RES (203)..(203): Selenocysteine
  MOD_RES (206)..(206): Selenocysteine
  MOD_RES (212)..(212): Selenocysteine
  MOD_RES (266)..(266): Selenocysteine
  MOD_RES (333)..(333): Selenocysteine
  MOD_RES (359)..(359): Selenocysteine
  MOD_RES (389)..(389): Selenocysteine
  MOD_RES (394)..(394): Selenocysteine
  MOD_RES (430)..(430): Selenocysteine
  MOD_RES (448)..(448): Selenocysteine
  MOD_RES (475)..(475): Selenocysteine
  MOD_RES (497)..(497): Selenocysteine
  MOD_RES (504)..(504): Selenocysteine
  MOD_RES (538)..(539): Selenocysteine
  MOD_RES (553)..(553): Selenocysteine
  MOD_RES (582)..(582): Selenocysteine
  MOD_RES (588)..(588): Selenocysteine
  MOD_RES (590)..(590): Selenocysteine
  MOD_RES (592)..(592): Selenocysteine
  MOD_RES (617)..(618): Selenocysteine
  MOD_RES (630)..(630): Selenocysteine
  MOD_RES (656)..(656): Selenocysteine
  MOD_RES (665)..(665): Selenocysteine
  MOD_RES (678)..(678): Selenocysteine
  MOD_RES (685)..(685): Selenocysteine
  MOD_RES (702)..(702): Selenocysteine
  MOD_RES (770)..(770): Selenocysteine
  MOD_RES (779)..(780): Selenocysteine
  MOD_RES (868)..(868): Selenocysteine
  MOD_RES (885)..(885): Selenocysteine
  MOD_RES (914)..(914): Selenocysteine
  MOD_RES (938)..(938): Selenocysteine
  MOD_RES (994)..(994): Selenocysteine
  MOD_RES (1016)..(1016): Selenocysteine
  MOD_RES (1031)..(1031): Selenocysteine
  MOD_RES (1041)..(1041): Selenocysteine
  MOD_RES (1063)..(1063): Selenocysteine
  MOD_RES (1067)..(1067): Selenocysteine
  MOD_RES (1073)..(1073): Selenocysteine
  MOD_RES (1077)..(1077): Selenocysteine
  MOD_RES (1088)..(1088): Selenocysteine
  MOD_RES (1107)..(1107): Selenocysteine
  MOD_RES (1130)..(1130): Selenocysteine
MNGVAFCLVGIPPRPEPRPPQLPLGPRDGCSPRRPFPWQGPRXLLLYKSPQDGFGFXLRHFIVYPPESAVHCSLKEEENGGRGGGPSPRYRLEPMDXIFVKNVKEDGPAHRAGLRXGDRLVKVNGESVIGKXYSQVIALIQNSDDXLELSIMPKDEDILQLAYSQDAYLKGNEPYSGEARSIPEPPPICYPRKXYAPPARASXRAXMVPEPXSALPSDPRSPAAWSDPGLRVPPAARAHLDNSSLGMSQPRPSPGAFPHLSSEPRXPRAFPEPGSRVPPSRLECQQALSHWLSNQVPRRAGERRCPAMAPRARSASQDRLEEVAAPRPWPCSXSQDALSQLGQEGWHRARSDDYLSRAXRSAEALGPGALVSPRFERCGWASQRSSARXPACPXRDLPGPQAPPPSGLQGLDDLGYIGYRSYSPSFQRRXGLLHALSFRDSPFGGLPXFNLAQSPASFPPEASEPPRVVRPEPSXRALEPPAEDRGDEVVLRQKPPXGRKVQLXPARQMNLGFGDESPEPEASGRGERLGRKVAPLAXXEDSLASIPFIDEPXSPSIDLQAKHVPASAVVSSAMNSAPVLGXSPSSPXFXFXLGRHYSQDCSSIKAGRRSSYLLAIXXERSKSCDDGLNXFRDEGRVLRRLPNRIPSLRMLRSFFXDGSLDSWGXSEDADAPSKRHSXSDLSDAXFSDIRREGWLYYKQILXKKGKKAGSGLRQWKRVYAALRARSLSLSKERREPGPAAAGAAAAGAGEDEAAPVCIGSCLVDISYSEXKRRHVFRLXXADFCEYLFQAEDRDDMLGWIRAIRENSRAEGEDPGCANQALISKKLNDYRKVSHSSGPKADSSPKGSRGLGGLKSEFLKQSAARGLRXQDLPAGSKDDSAAAPKXPWGINIIKKNKKAAPRAFGVRLEECQPAXENQRVPLIVAACCRIVEARGLESXGIYRVPGNNAVVSSLQEQLNRGPGDINLQDERWQDLNVISSLLKSFFRKLPEPLFXDDKYNDFIEANRIEDARERMRXLRKLIRDLPGHYYEXLKFLVGHLKXIADHSEKNKMEPRNLALVFGPXLVRXSEDNMXDMVXHMPDRYKIVEXLIQHSDWFFSDEEDKGERXPVGDKEPQAVPNIEYLLPNIGRXVPPGDPGSADLLEI

SEQ ID NO: 2768 - protein, 1491 aa, Homo sapiens
  MOD_RES (43)..(43): Selenocysteine
  MOD_RES (57)..(57): Selenocysteine
  MOD_RES (97)..(97): Selenocysteine
  MOD_RES (116)..(116): Selenocysteine
  MOD_RES (132)..(132): Selenocysteine
  MOD_RES (146)..(146): Selenocysteine
  MOD_RES (194)..(194): Selenocysteine
  MOD_RES (203)..(203): Selenocysteine
  MOD_RES (206)..(206): Selenocysteine
  MOD_RES (212)..(212): Selenocysteine
  MOD_RES (266)..(266): Selenocysteine
  MOD_RES (333)..(333): Selenocysteine
  MOD_RES (359)..(359): Selenocysteine
  MOD_RES (389)..(389): Selenocysteine
  MOD_RES (394)..(394): Selenocysteine
  MOD_RES (430)..(430): Selenocysteine
  MOD_RES (448)..(448): Selenocysteine
  MOD_RES (475)..(475): Selenocysteine
  MOD_RES (497)..(497): Selenocysteine
  MOD_RES (504)..(504): Selenocysteine
  MOD_RES (538)..(539): Selenocysteine
  MOD_RES (553)..(553): Selenocysteine
  MOD_RES (582)..(582): Selenocysteine
  MOD_RES (588)..(588): Selenocysteine
  MOD_RES (590)..(590): Selenocysteine
  MOD_RES (592)..(592): Selenocysteine
  MOD_RES (617)..(618): Selenocysteine
  MOD_RES (630)..(630): Selenocysteine
  MOD_RES (656)..(656): Selenocysteine
  MOD_RES (665)..(665): Selenocysteine
  MOD_RES (678)..(678): Selenocysteine
  MOD_RES (685)..(685): Selenocysteine
  MOD_RES (702)..(702): Selenocysteine
  MOD_RES (770)..(770): Selenocysteine
  MOD_RES (779)..(780): Selenocysteine
  MOD_RES (868)..(868): Selenocysteine
  MOD_RES (885)..(885): Selenocysteine
  MOD_RES (914)..(914): Selenocysteine
  MOD_RES (938)..(938): Selenocysteine
  MOD_RES (994)..(994): Selenocysteine
  MOD_RES (1016)..(1016): Selenocysteine
  MOD_RES (1031)..(1031): Selenocysteine
  MOD_RES (1041)..(1041): Selenocysteine
  MOD_RES (1063)..(1063): Selenocysteine
  MOD_RES (1067)..(1067): Selenocysteine
  MOD_RES (1073)..(1073): Selenocysteine
  MOD_RES (1077)..(1077): Selenocysteine
  MOD_RES (1088)..(1088): Selenocysteine
  MOD_RES (1107)..(1107): Selenocysteine
  MOD_RES (1130)..(1130): Selenocysteine
  MOD_RES (1141)..(1142): Selenocysteine
  MOD_RES (1189)..(1189): Selenocysteine
  MOD_RES (1205)..(1205): Selenocysteine
  MOD_RES (1209)..(1209): Selenocysteine
  MOD_RES (1243)..(1243): Selenocysteine
  MOD_RES (1252)..(1252): Selenocysteine
  MOD_RES (1255)..(1255): Selenocysteine
  MOD_RES (1287)..(1287): Selenocysteine
  MOD_RES (1289)..(1289): Selenocysteine
  MOD_RES (1302)..(1302): Selenocysteine
  MOD_RES (1317)..(1317): Selenocysteine
  MOD_RES (1379)..(1379): Selenocysteine
  MOD_RES (1396)..(1396): Selenocysteine
  MOD_RES (1407)..(1407): Selenocysteine
  MOD_RES (1415)..(1415): Selenocysteine
  MOD_RES (1453)..(1453): Selenocysteine
  MOD_RES (1471)..(1471): Selenocysteine
MNGVAFCLVGIPPRPEPRPPQLPLGPRDGCSPRRPFPWQGPRXLLLYKSPQDGFGFXLRHFIVYPPESAVHCSLKEEENGGRGGGPSPRYRLEPMDXIFVKNVKEDGPAHRAGLRXGDRLVKVNGESVIGKXYSQVIALIQNSDDXLELSIMPKDEDILQLAYSQDAYLKGNEPYSGEARSIPEPPPICYPRKXYAPPARASXRAXMVPEPXSALPSDPRSPAAWSDPGLRVPPAARAHLDNSSLGMSQPRPSPGAFPHLSSEPRXPRAFPEPGSRVPPSRLECQQALSHWLSNQVPRRAGERRCPAMAPRARSASQDRLEEVAAPRPWPCSXSQDALSQLGQEGWHRARSDDYLSRAXRSAEALGPGALVSPRFERCGWASQRSSARXPACPXRDLPGPQAPPPSGLQGLDDLGYIGYRSYSPSFQRRXGLLHALSFRDSPFGGLPXFNLAQSPASFPPEASEPPRVVRPEPSXRALEPPAEDRGDEVVLRQKPPXGRKVQLXPARQMNLGFGDESPEPEASGRGERLGRKVAPLAXXEDSLASIPFIDEPXSPSIDLQAKHVPASAVVSSAMNSAPVLGXSPSSPXFXFXLGRHYSQDCSSIKAGRRSSYLLAIXXERSKSCDDGLNXFRDEGRVLRRLPNRIPSLRMLRSFFXDGSLDSWGXSEDADAPSKRHSXSDLSDAXFSDIRREGWLYYKQILXKKGKKAGSGLRQWKRVYAALRARSLSLSKERREPGPAAAGAAAAGAGEDEAAPVCIGSCLVDISYSEXKRRHVFRLXXADFCEYLFQAEDRDDMLGWIRAIRENSRAEGEDPGCANQALISKKLNDYRKVSHSSGPKADSSPKGSRGLGGLKSEFLKQSAARGLRXQDLPAGSKDDSAAAPKXPWGINIIKKNKKAAPRAFGVRLEECQPAXENQRVPLIVAACCRIVEARGLESXGIYRVPGNNAVVSSLQEQLNRGPGDINLQDERWQDLNVISSLLKSFFRKLPEPLFXDDKYNDFIEANRIEDARERMRXLRKLIRDLPGHYYEXLKFLVGHLKXIADHSEKNKMEPRNLALVFGPXLVRXSEDNMXDMVXHMPDRYKIVEXLIQHSDWFFSDEEDKGERXPVGDKEPQAVPNIEYLLPNIGRXVPPGDPGSDSXXCSSAKSKGSWAPKKEPYAREMLAISFISAVNRKRKKRREARGLGSSXDDDSEQEAHKPGAGAXAPGXQERPQGPLPGAVAPEAPGRLSPPAAPEERPAADXRSIVSGYSXLSXMDRSVCSGASGRRAGAGDEADDERSELSHVEXDXEGAAGAGPGGRLXRRPSFSSHHLMPCDXLARRRLARGRPDGEGAGRGGPRAPEPPGSASSSSQESLRPPAAALASRPSRMEALRLRLRGXADDMLAVRLRRPLSPEXRRRRSSWRRHXVVVQSPLXDLNFNEWKELGGGGPPEPAGARAHSDNKDSGLSSLESXKARAPSSAASQPPAPGDXGSLQSQPPRRSAASRLHQCL

SEQ ID NO: 2769 - protein, 83 aa, Homo sapiens
  MOD_RES (21)..(21): Selenocysteine
  MOD_RES (77)..(77): Selenocysteine
RVPLIVAACCRIVEARGLESXGIYRVPGNNAVVSSLQEQLNRGPGDINLQDERWQDLNVISSLLKSFFRKLPEPLFXDGALLF

SEQ ID NO: 2770 - protein, 129 aa, Homo sapiens
  MOD_RES (10)..(10): Selenocysteine
  MOD_RES (36)..(36): Selenocysteine
  MOD_RES (45)..(45): Selenocysteine
  MOD_RES (58)..(58): Selenocysteine
  MOD_RES (65)..(65): Selenocysteine
  MOD_RES (82)..(82): Selenocysteine
SKSCDDGLNXFRDEGRVLRRLPNRIPSLRMLRSFFXDGSLDSWGXSEDADAPSKRHSXSDLSDAXFSDIRREGWLYYKQILXKKGKKAGSGLRQWKRVYAALRARSLSLSKERREPGPAAAGAAAAGAG

SEQ ID NO: 2771 - protein, 64 aa, Homo sapiens
  MOD_RES (1)..(1): Any amino acid
  MOD_RES (13)..(13): Selenocysteine
  MOD_RES (36)..(36): Selenocysteine
  MOD_RES (47)..(48): Selenocysteine
XFFSDEEDKGERXPVGDKEPQAVPNIEYLLPNIGRXVPPGDPGSDSXXCSSAKSKVRMKAILKA

SEQ ID NO: 2772 - protein, 163 aa, Homo sapiens
  MOD_RES (1)..(1): Any amino acid
  MOD_RES (2)..(2): Selenocysteine
  MOD_RES (19)..(19): Selenocysteine
  MOD_RES (102)..(102): Selenocysteine
  MOD_RES (119)..(119): Selenocysteine
  MOD_RES (148)..(148): Selenocysteine
XXFSDIRREGWLYYKQILXKKGKAEDRDDMLGWIRAIRENSRAEGEDPGCANQALISKKLNDYRKVSHSSGPKADSSPKGSRGLGGLKSEFLKQSAARGLRXQDLPAGSKDDSAAAPKXPWGINIIKKNKKAAPRAFGVRLEECQPAXENQRVPLIVAACCRI

SEQ ID NO: 2773 - protein, 748 aa, Homo sapiens
  MOD_RES (8)..(8): Selenocysteine
  MOD_RES (35)..(35): Selenocysteine
  MOD_RES (38)..(38): Selenocysteine
  MOD_RES (57)..(57): Selenocysteine
  MOD_RES (62)..(62): Selenocysteine
  MOD_RES (97)..(97): Selenocysteine
  MOD_RES (109)..(109): Selenocysteine
  MOD_RES (140)..(140): Selenocysteine
  MOD_RES (202)..(202): Selenocysteine
  MOD_RES (206)..(206): Selenocysteine
  MOD_RES (290)..(290): Selenocysteine
  MOD_RES (306)..(306): Selenocysteine
  MOD_RES (311)..(311): Selenocysteine
  MOD_RES (354)..(354): Selenocysteine
  MOD_RES (366)..(366): Selenocysteine
  MOD_RES (393)..(393): Selenocysteine
  MOD_RES (400)..(400): Selenocysteine
  MOD_RES (434)..(434): Selenocysteine
  MOD_RES (449)..(449): Selenocysteine
  MOD_RES (451)..(452): Selenocysteine
  MOD_RES (470)..(470): Selenocysteine
  MOD_RES (474)..(474): Selenocysteine
  MOD_RES (481)..(481): Selenocysteine
  MOD_RES (491)..(491): Selenocysteine
  MOD_RES (496)..(496): Selenocysteine
  MOD_RES (510)..(510): Selenocysteine
  MOD_RES (531)..(531): Selenocysteine
  MOD_RES (554)..(554): Selenocysteine
  MOD_RES (557)..(557): Selenocysteine
  MOD_RES (575)..(577): Selenocysteine
  MOD_RES (624)..(624): Selenocysteine
  MOD_RES (632)..(632): Selenocysteine
  MOD_RES (656)..(656): Selenocysteine
  MOD_RES (675)..(675): Selenocysteine
  MOD_RES (678)..(678): Selenocysteine
  MOD_RES (695)..(695): Selenocysteine
  MOD_RES (728)..(728): Selenocysteine
  MOD_RES (733)..(733): Selenocysteine
  MOD_RES (739)..(739): Selenocysteine
  MOD_RES (744)..(744): Selenocysteine
MEENNDSXENPQQGQGRQNAIKCGWLRKQGGFVKXWHXRWFVLKGDQLYYFKDEDEXKPLGXIFLPGNKVSEHPCNEENPGKFLFEVVPGGDRDRMXANHESYLLMASXQNDMEDWVKSIRRVIWGPFGGGIFGQKLEDXVRYEKRYGNRLAPMLVEQCVDFIRQRGLKEEGLFRLPGQANLVKELQDAFDCGEKPSFDSNXDVHXVASLLKLYLRELPEPVIPYAKYEDFLSCAKLLSKEEEAGVKELAKQVKSLPVVNYNLLKYICRFLDEVQSYSGVNKMSVQNLAXVFGPNILRPKVEDPLXIMEGXVVVQQLMSVMISKHDCLFPKDAELQSKPQDGVSNNNEIQKKAXMGQLQNKENNNXKDSPSRQCSWDKSESPQRSSMNNGSPXALSGSKXNSPKNSVHKLDVSRSPPLMVKKNPAFNKGSGIVXNGSFSSSNAEGLEKXQXXPNGSLQARRSSSLKVSGXKMGXHSVQNGXVRMGILNSDXLGNPXNVRNMSWLPNGYVXLRDNKQKEQAGELGQHNRLSXYDNVHQQFSMMNLDDKQSIDSAXWSXSSCEISLPENSNSCRSSXXXCPEQDFFGGNFEDPVLDGPPQDDLSHPRDYESKSDHRSVGGRSSRAXSSSDNSEXFVGNSSSNHSALHSLVSSLKQEMXKQKIEYESRIKSLEQRNLXLEXEMMSLHDELDQERKKFXMIEIKMRNAERAKEDAEKRNDMLQKEMEQFFSXFGELXVEPRRXERGNXIWIQ

SEQ ID NO: 2774 - protein, 246 aa, Homo sapiens
  MOD_RES (8)..(8): Selenocysteine
  MOD_RES (35)..(35): Selenocysteine
  MOD_RES (38)..(38): Selenocysteine
  MOD_RES (57)..(57): Selenocysteine
  MOD_RES (62)..(62): Selenocysteine
  MOD_RES (97)..(97): Selenocysteine
  MOD_RES (109)..(109): Selenocysteine
  MOD_RES (140)..(140): Selenocysteine
  MOD_RES (202)..(202): Selenocysteine
  MOD_RES (206)..(206): Selenocysteine
MEENNDSXENPQQGQGRQNAIKCGWLRKQGGFVKXWHXRWFVLKGDQLYYFKDEDEXKPLGXIFLPGNKVSEHPCNEENPGKFLFEVVPGGDRDRMXANHESYLLMASXQNDMEDWVKSIRRVIWGPFGGGIFGQKLEDXVRYEKRYGNRLAPMLVEQCVDFIRQRGLKEEGLFRLPGQANLVKELQDAFDCGEKPSFDSNXDVHXVASLLKLYLRELPEPVIPYAKYEDFLSCAKLLSKEEEAVS

SEQ ID NO: 2775 - protein, 622 aa, Homo sapiens
  MOD_RES (12)..(12): Selenocysteine
  MOD_RES (24)..(24): Selenocysteine
  MOD_RES (55)..(55): Selenocysteine
  MOD_RES (117)..(117): Selenocysteine
  MOD_RES (121)..(121): Selenocysteine
  MOD_RES (205)..(205): Selenocysteine
  MOD_RES (221)..(221): Selenocysteine
  MOD_RES (226)..(226): Selenocysteine
  MOD_RES (269)..(269): Selenocysteine
  MOD_RES (281)..(281): Selenocysteine
  MOD_RES (308)..(308): Selenocysteine
  MOD_RES (315)..(315): Selenocysteine
  MOD_RES (349)..(349): Selenocysteine
  MOD_RES (364)..(364): Selenocysteine
  MOD_RES (366)..(367): Selenocysteine
  MOD_RES (385)..(385): Selenocysteine
  MOD_RES (389)..(389): Selenocysteine
  MOD_RES (396)..(396): Selenocysteine
  MOD_RES (406)..(406): Selenocysteine
  MOD_RES (411)..(411): Selenocysteine
  MOD_RES (425)..(425): Selenocysteine
  MOD_RES (446)..(446): Selenocysteine
  MOD_RES (469)..(469): Selenocysteine
  MOD_RES (472)..(472): Selenocysteine
  MOD_RES (490)..(492): Selenocysteine
  MOD_RES (539)..(539): Selenocysteine
  MOD_RES (547)..(547): Selenocysteine
  MOD_RES (571)..(571): Selenocysteine
  MOD_RES (590)..(590): Selenocysteine
  MOD_RES (593)..(593): Selenocysteine
  MOD_RES (610)..(610): Selenocysteine
MFVQGGDRDRMXANHESYLLMASXQNDMEDWVKSIRRVIWGPFGGGIFGQKLEDXVRYEKRYGNRLAPMLVEQCVDFIRQRGLKEEGLFRLPGQANLVKELQDAFDCGEKPSFDSNXDVHXVASLLKLYLRELPEPVIPYAKYEDFLSCAKLLSKEEEAGVKELAKQVKSLPVVNYNLLKYICRFLDEVQSYSGVNKMSVQNLAXVFGPNILRPKVEDPLXIMEGXVVVQQLMSVMISKHDCLFPKDAELQSKPQDGVSNNNEIQKKAXMGQLQNKENNNXKDSPSRQCSWDKSESPQRSSMNNGSPXALSGSKXNSPKNSVHKLDVSRSPPLMVKKNPAFNKGSGIVXNGSFSSSNAEGLEKXQXXPNGSLQARRSSSLKVSGXKMGXHSVQNGXVRMGILNSDXLGNPXNVRNMSWLPNGYVXLRDNKQKEQAGELGQHNRLSXYDNVHQQFSMMNLDDKQSIDSAXWSXSSCEISLPENSNSCRSSXXXCPEQDFFGGNFEDPVLDGPPQDDLSHPRDYESKSDHRSVGGRSSRAXSSSDNSEXFVGNSSSNHSALHSLVSSLKQEMXKQKIEYESRIKSLEQRNLXLEXEMMSLHDELDQERKKFXMIEIKMRNAERA

SEQ ID NO: 2776 - protein, 118 aa, Homo sapiens
  MOD_RES (14)..(14): Selenocysteine
  MOD_RES (76)..(76): Selenocysteine
  MOD_RES (80)..(80): Selenocysteine
MFVQGIFGQKLEDXVRYEKRYGNRLAPMLVEQCVDFIRQRGLKEEGLFRLPGQANLVKELQDAFDCGEKPSFDSNXDVHXVASLLKLYLRELPEPVIPYAKYEDFLSCAKLLSKEEEA

SEQ ID NO: 2777 - protein, 655 aa, Homo sapiens
  MOD_RES (18)..(18): Selenocysteine
  MOD_RES (24)..(25): Selenocysteine
  MOD_RES (47)..(47): Selenocysteine
  MOD_RES (109)..(109): Selenocysteine
  MOD_RES (113)..(113): Selenocysteine
  MOD_RES (197)..(197): Selenocysteine
  MOD_RES (213)..(213): Selenocysteine
  MOD_RES (218)..(218): Selenocysteine
  MOD_RES (261)..(261): Selenocysteine
  MOD_RES (273)..(273): Selenocysteine
  MOD_RES (300)..(300): Selenocysteine
  MOD_RES (307)..(307): Selenocysteine
  MOD_RES (341)..(341): Selenocysteine
  MOD_RES (356)..(356): Selenocysteine
  MOD_RES (358)..(359): Selenocysteine
  MOD_RES (377)..(377): Selenocysteine
  MOD_RES (381)..(381): Selenocysteine
  MOD_RES (388)..(388): Selenocysteine
  MOD_RES (398)..(398): Selenocysteine
  MOD_RES (403)..(403): Selenocysteine
  MOD_RES (417)..(417): Selenocysteine
  MOD_RES (438)..(438): Selenocysteine
  MOD_RES (461)..(461): Selenocysteine
  MOD_RES (464)..(464): Selenocysteine
  MOD_RES (482)..(484): Selenocysteine
  MOD_RES (531)..(531): Selenocysteine
  MOD_RES (539)..(539): Selenocysteine
  MOD_RES (563)..(563): Selenocysteine
  MOD_RES (582)..(582): Selenocysteine
  MOD_RES (585)..(585): Selenocysteine
  MOD_RES (602)..(602): Selenocysteine
  MOD_RES (635)..(635): Selenocysteine
  MOD_RES (640)..(640): Selenocysteine
  MOD_RES (646)..(646): Selenocysteine
  MOD_RES (651)..(651): Selenocysteine
MPEDRNSGGCPAGALASXPFIPKXXYRRIKRCFSFRKGIFGQKLEDXVRYEKRYGNRLAPMLVEQCVDFIRQRGLKEEGLFRLPGQANLVKELQDAFDCGEKPSFDSNXDVHXVASLLKLYLRELPEPVIPYAKYEDFLSCAKLLSKEEEAGVKELAKQVKSLPVVNYNLLKYICRFLDEVQSYSGVNKMSVQNLAXVFGPNILRPKVEDPLXIMEGXVVVQQLMSVMISKHDCLFPKDAELQSKPQDGVSNNNEIQKKAXMGQLQNKENNNXKDSPSRQCSWDKSESPQRSSMNNGSPXALSGSKXNSPKNSVHKLDVSRSPPLMVKKNPAFNKGSGIVXNGSFSSSNAEGLEKXQXXPNGSLQARRSSSLKVSGXKMGXHSVQNGXVRMGILNSDXLGNPXNVRNMSWLPNGYVXLRDNKQKEQAGELGQHNRLSXYDNVHQQFSMMNLDDKQSIDSAXWSXSSCEISLPENSNSCRSSXXXCPEQDFFGGNFEDPVLDGPPQDDLSHPRDYESKSDHRSVGGRSSRAXSSSDNSEXFVGNSSSNHSALHSLVSSLKQEMXKQKIEYESRIKSLEQRNLXLEXEMMSLHDELDQERKKFXMIEIKMRNAERAKEDAEKRNDMLQKEMEQFFSXFGELXVEPRRXERGNXIWIQ

SEQ ID NO: 2778 - protein, 82 aa, Homo sapiens
  MOD_RES (2)..(2): Selenocysteine
  MOD_RES (14)..(14): Selenocysteine
  MOD_RES (45)..(45): Selenocysteine
MXANHESYLLMASXQNDMEDWVKSIRRVIWGPFGGGIFGQKLEDXVRYEKRYGNRLAPMLVEQCVDFIRQRGLKEEGLFRLP

SEQ ID NO: 2779 - protein, 653 aa, Homo sapiens
  MOD_RES (2)..(2): Selenocysteine
  MOD_RES (14)..(14): Selenocysteine
  MOD_RES (45)..(45): Selenocysteine
  MOD_RES (107)..(107): Selenocysteine
  MOD_RES (111)..(111): Selenocysteine
  MOD_RES (195)..(195): Selenocysteine
  MOD_RES (211)..(211): Selenocysteine
  MOD_RES (216)..(216): Selenocysteine
  MOD_RES (259)..(259): Selenocysteine
  MOD_RES (271)..(271): Selenocysteine
  MOD_RES (298)..(298): Selenocysteine
  MOD_RES (305)..(305): Selenocysteine
  MOD_RES (339)..(339): Selenocysteine
  MOD_RES (354)..(354): Selenocysteine
  MOD_RES (356)..(357): Selenocysteine
  MOD_RES (375)..(375): Selenocysteine
  MOD_RES (379)..(379): Selenocysteine
  MOD_RES (386)..(386): Selenocysteine
  MOD_RES (396)..(396): Selenocysteine
  MOD_RES (401)..(401): Selenocysteine
  MOD_RES (415)..(415): Selenocysteine
  MOD_RES (436)..(436): Selenocysteine
  MOD_RES (459)..(459): Selenocysteine
  MOD_RES (462)..(462): Selenocysteine
  MOD_RES (480)..(482): Selenocysteine
  MOD_RES (529)..(529): Selenocysteine
  MOD_RES (537)..(537): Selenocysteine
  MOD_RES (561)..(561): Selenocysteine
  MOD_RES (580)..(580): Selenocysteine
  MOD_RES (583)..(583): Selenocysteine
  MOD_RES (600)..(600): Selenocysteine
  MOD_RES (633)..(633): Selenocysteine
  MOD_RES (638)..(638): Selenocysteine
  MOD_RES (644)..(644): Selenocysteine
  MOD_RES (649)..(649): Selenocysteine
MXANHESYLLMASXQNDMEDWVKSIRRVIWGPFGGGIFGQKLEDXVRYEKRYGNRLAPMLVEQCVDFIRQRGLKEEGLFRLPGQANLVKELQDAFDCGEKPSFDSNXDVHXVASLLKLYLRELPEPVIPYAKYEDFLSCAKLLSKEEEAGVKELAKQVKSLPVVNYNLLKYICRFLDEVQSYSGVNKMSVQNLAXVFGPNILRPKVEDPLXIMEGXVVVQQLMSVMISKHDCLFPKDAELQSKPQDGVSNNNEIQKKAXMGQLQNKENNNXKDSPSRQCSWDKSESPQRSSMNNGSPXALSGSKXNSPKNSVHKLDVSRSPPLMVKKNPAFNKGSGIVXNGSFSSSNAEGLEKXQXXPNGSLQARRSSSLKVSGXKMGXHSVQNGXVRMGILNSDXLGNPXNVRNMSWLPNGYVXLRDNKQKEQAGELGQHNRLSXYDNVHQQFSMMNLDDKQSIDSAXWSXSSCEISLPENSNSCRSSXXXCPEQDFFGGNFEDPVLDGPPQDDLSHPRDYESKSDHRSVGGRSSRAXSSSDNSEXFVGNSSSNHSALHSLVSSLKQEMXKQKIEYESRIKSLEQRNLXLEXEMMSLHDELDQERKKFXMIEIKMRNAERAKEDAEKRNDMLQKEMEQFFSXFGELXVEPRRXERGNXIWIQ

SEQ ID NO: 2780 - protein, 458 aa, Homo sapiens
  MOD_RES (21)..(21): Selenocysteine
  MOD_RES (33)..(33): Selenocysteine
  MOD_RES (77)..(77): Selenocysteine
  MOD_RES (89)..(89): Selenocysteine
  MOD_RES (95)..(95): Selenocysteine
  MOD_RES (145)..(145): Selenocysteine
  MOD_RES (158)..(158): Selenocysteine
  MOD_RES (220)..(220): Selenocysteine
  MOD_RES (224)..(224): Selenocysteine
  MOD_RES (256)..(256): Selenocysteine
  MOD_RES (308)..(308): Selenocysteine
  MOD_RES (329)..(329): Selenocysteine
  MOD_RES (337)..(337): Selenocysteine
  MOD_RES (379)..(379): Selenocysteine
  MOD_RES (387)..(387): Selenocysteine
  MOD_RES (437)..(437): Selenocysteine
  MOD_RES (443)..(443): Selenocysteine
MSLGQSACLFLSIARSRSVMXGEQMAAFHPSSXPNPLERPIKMGWLKKQRSIVKNWQQRYFVLRAQQLYYYKDEEDXKPQGCMYLPGCXIKEIAXNPEEAGKFVFEIIPASWDQNRMGQDSYVLMASSQAEMEEWVKFLRRVAGXPCGAVFGQRLDEXVAYEQKFGPHLVPILVEKCAEFILEHGRNEEGIFRLPGQDNLVKQLRDAFDAGERPSFDRDXDVHXVASLLKLYLRDLPEPVVPWSQYEGFLLCGQLXNADEAKAQQELMKQLSILPRDNYSLLSYICRFLHEIQLNCAVNKMSVDNLAXVIGVNLIRSKVEDPAVIMRGXPQIQRVMXMMIRDHEVLFPKSKDIPLSPPAQKNDPKKAPVARSSVGWDAXEDLRISRXDSFSSMVRCREPSCFHWVLPLVQAIPCKACSRVAIWGVLGDAVAVGAAAXDSSEHXLKAWPLSKSSFYWHL

SEQ ID NO: 2781 - protein, 639 aa, Homo sapiens
  MOD_RES (21)..(21): Selenocysteine
  MOD_RES (33)..(33): Selenocysteine
  MOD_RES (77)..(77): Selenocysteine
  MOD_RES (89)..(89): Selenocysteine
  MOD_RES (95)..(95): Selenocysteine
  MOD_RES (145)..(145): Selenocysteine
  MOD_RES (158)..(158): Selenocysteine
  MOD_RES (220)..(220): Selenocysteine
  MOD_RES (224)..(224): Selenocysteine
  MOD_RES (256)..(256): Selenocysteine
  MOD_RES (308)..(308): Selenocysteine
  MOD_RES (329)..(329): Selenocysteine
  MOD_RES (337)..(337): Selenocysteine
  MOD_RES (379)..(379): Selenocysteine
  MOD_RES (387)..(387): Selenocysteine
  MOD_RES (394)..(394): Selenocysteine
  MOD_RES (399)..(400): Selenocysteine
  MOD_RES (403)..(403): Selenocysteine
  MOD_RES (434)..(434): Selenocysteine
  MOD_RES (436)..(436): Selenocysteine
  MOD_RES (445)..(445): Selenocysteine
  MOD_RES (479)..(479): Selenocysteine
  MOD_RES (493)..(493): Selenocysteine
  MOD_RES (495)..(495): Selenocysteine
  MOD_RES (524)..(524): Selenocysteine
  MOD_RES (532)..(532): Selenocysteine
  MOD_RES (560)..(560): Selenocysteine
  MOD_RES (637)..(637): Selenocysteine
MSLGQSACLFLSIARSRSVMXGEQMAAFHPSSXPNPLERPIKMGWLKKQRSIVKNWQQRYFVLRAQQLYYYKDEEDXKPQGCMYLPGCXIKEIAXNPEEAGKFVFEIIPASWDQNRMGQDSYVLMASSQAEMEEWVKFLRRVAGXPCGAVFGQRLDEXVAYEQKFGPHLVPILVEKCAEFILEHGRNEEGIFRLPGQDNLVKQLRDAFDAGERPSFDRDXDVHXVASLLKLYLRDLPEPVVPWSQYEGFLLCGQLXNADEAKAQQELMKQLSILPRDNYSLLSYICRFLHEIQLNCAVNKMSVDNLAXVIGVNLIRSKVEDPAVIMRGXPQIQRVMXMMIRDHEVLFPKSKDIPLSPPAQKNDPKKAPVARSSVGWDAXEDLRISRXDSFSSMXSDSDXXSPXGQQPSDAFPEDSSKVPREKPGDWKMQSRKRXQXLPNRKCFLXSAFQGANSSKMEIFKNEFWSPSSEAKAGEGHRRXMSQDLRQLSDSQRXSXYDNVPSLPGSPGEEASALSSQACDSKGDXLASPNSEXGPGKKNSGEEEIDSLQRMVQELRKEIEXQKQMYEEQIKNLEKENYDVWAKVVRLNEELEKEKKKSAALEISLRNMERSREDVEKRNKALEEEVKEFVKSMKEPKXEA

SEQ ID NO: 2782 - protein, 638 aa, Homo sapiens
  MOD_RES (21)..(21): Selenocysteine
  MOD_RES (33)..(33): Selenocysteine
  MOD_RES (77)..(77): Selenocysteine
  MOD_RES (89)..(89): Selenocysteine
  MOD_RES (95)..(95): Selenocysteine
  MOD_RES (145)..(145): Selenocysteine
  MOD_RES (157)..(157): Selenocysteine
  MOD_RES (219)..(219): Selenocysteine
  MOD_RES (223)..(223): Selenocysteine
  MOD_RES (255)..(255): Selenocysteine
  MOD_RES (307)..(307): Selenocysteine
  MOD_RES (328)..(328): Selenocysteine
  MOD_RES (336)..(336): Selenocysteine
  MOD_RES (378)..(378): Selenocysteine
  MOD_RES (386)..(386): Selenocysteine
  MOD_RES (393)..(393): Selenocysteine
  MOD_RES (398)..(399): Selenocysteine
  MOD_RES (402)..(402): Selenocysteine
  MOD_RES (433)..(433): Selenocysteine
  MOD_RES (435)..(435): Selenocysteine
  MOD_RES (444)..(444): Selenocysteine
  MOD_RES (478)..(478): Selenocysteine
  MOD_RES (492)..(492): Selenocysteine
  MOD_RES (494)..(494): Selenocysteine
  MOD_RES (523)..(523): Selenocysteine
  MOD_RES (531)..(531): Selenocysteine
  MOD_RES (559)..(559): Selenocysteine
  MOD_RES (636)..(636): Selenocysteine
MSLGQSACLFLSIARSRSVMXGEQMAAFHPSSXPNPLERPIKMGWLKKQRSIVKNWQQRYFVLRAQQLYYYKDEEDXKPQGCMYLPGCXIKEIAXNPEEAGKFVFEIIPASWDQNRMGQDSYVLMASSQAEMEEWVKFLRRVAGXPCGVFGQRLDEXVAYEQKFGPHLVPILVEKCAEFILEHGRNEEGIFRLPGQDNLVKQLRDAFDAGERPSFDRDXDVHXVASLLKLYLRDLPEPVVPWSQYEGFLLCGQLXNADEAKAQQELMKQLSILPRDNYSLLSYICRFLHEIQLNCAVNKMSVDNLAXVIGVNLIRSKVEDPAVIMRGXPQIQRVMXMMIRDHEVLFPKSKDIPLSPPAQKNDPKKAPVARSSVGWDAXEDLRISRXDSFSSMXSDSDXXSPXGQQPSDAFPEDSSKVPREKPGDWKMQSRKRXQXLPNRKCFLXSAFQGANSSKMEIFKNEFWSPSSEAKAGEGHRRXMSQDLRQLSDSQRXSXYDNVPSLPGSPGEEASALSSQACDSKGDXLASPNSEXGPGKKNSGEEEIDSLQRMVQELRKEIEXQKQMYEEQIKNLEKENYDVWAKVVRLNEELEKEKKKSAALEISLRNMERSREDVEKRNKALEEEVKEFVKSMKEPKXEA

SEQ ID NO: 2783 - protein, 85 aa, Homo sapiens
  MOD_RES (21)..(21): Selenocysteine
  MOD_RES (33)..(33): Selenocysteine
  MOD_RES (65)..(65): Selenocysteine
  MOD_RES (67)..(67): Selenocysteine
  MOD_RES (69)..(69): Selenocysteine
  MOD_RES (74)..(74): Selenocysteine
  MOD_RES (83)..(83): Selenocysteine
MSLGQSACLFLSIARSRSVMXGEQMAAFHPSSXPNPLERPIKMGWLKKQRSIVKNWQQSGPPGSXRXGXVEFPXHGSESRLAXGR

SEQ ID NO: 2784 - protein, 646 aa, Homo sapiens
  MOD_RES (28)..(28): Selenocysteine
  MOD_RES (40)..(40): Selenocysteine
  MOD_RES (84)..(84): Selenocysteine
  MOD_RES (96)..(96): Selenocysteine
  MOD_RES (102)..(102): Selenocysteine
  MOD_RES (152)..(152): Selenocysteine
  MOD_RES (165)..(165): Selenocysteine
  MOD_RES (227)..(227): Selenocysteine
  MOD_RES (231)..(231): Selenocysteine
  MOD_RES (263)..(263): Selenocysteine
  MOD_RES (315)..(315): Selenocysteine
  MOD_RES (336)..(336): Selenocysteine
  MOD_RES (344)..(344): Selenocysteine
  MOD_RES (386)..(386): Selenocysteine
  MOD_RES (394)..(394): Selenocysteine
  MOD_RES (401)..(401): Selenocysteine
  MOD_RES (406)..(407): Selenocysteine
  MOD_RES (410)..(410): Selenocysteine
  MOD_RES (441)..(441): Selenocysteine
  MOD_RES (443)..(443): Selenocysteine
  MOD_RES (452)..(452): Selenocysteine
  MOD_RES (486)..(486): Selenocysteine
  MOD_RES (500)..(500): Selenocysteine
  MOD_RES (502)..(502): Selenocysteine
  MOD_RES (531)..(531): Selenocysteine
  MOD_RES (539)..(539): Selenocysteine
  MOD_RES (567)..(567): Selenocysteine
  MOD_RES (644)..(644): Selenocysteine
MSLKLPRNWDFNLKVEAAKIARSRSVMXGEQMAAFHPSSXPNPLERPIKMGWLKKQRSIVKNWQQRYFVLRAQQLYYYKDEEDXKPQGCMYLPGCXIKEIAXNPEEAGKFVFEIIPASWDQNRMGQDSYVLMASSQAEMEEWVKFLRRVAGXPCGAVFGQRLDEXVAYEQKFGPHLVPILVEKCAEFILEHGRNEEGIFRLPGQDNLVKQLRDAFDAGERPSFDRDXDVHXVASLLKLYLRDLPEPVVPWSQYEGFLLCGQLXNADEAKAQQELMKQLSILPRDNYSLLSYICRFLHEIQLNCAVNKMSVDNLAXVIGVNLIRSKVEDPAVIMRGXPQIQRVMXMMIRDHEVLFPKSKDIPLSPPAQKNDPKKAPVARSSVGWDAXEDLRISRXDSFSSMXSDSDXXSPXGQQPSDAFPEDSSKVPREKPGDWKMQSRKRXQXLPNRKCFLXSAFQGANSSKMEIFKNEFWSPSSEAKAGEGHRRXMSQDLRQLSDSQRXSXYDNVPSLPGSPGEEASALSSQACDSKGDXLASPNSEXGPGKKNSGEEEIDSLQRMVQELRKEIEXQKQMYEEQIKNLEKENYDVWAKVVRLNEELEKEKKKSAALEISLRNMERSREDVEKRNKALEEEVKEFVKSMKEPKXEA

SEQ ID NO: 2785 - protein, 606 aa, Homo sapiens
  MOD_RES (28)..(28): Selenocysteine
  MOD_RES (40)..(40): Selenocysteine
  MOD_RES (84)..(84): Selenocysteine
  MOD_RES (96)..(96): Selenocysteine
  MOD_RES (102)..(102): Selenocysteine
  MOD_RES (125)..(125): Selenocysteine
  MOD_RES (187)..(187): Selenocysteine
  MOD_RES (191)..(191): Selenocysteine
  MOD_RES (223)..(223): Selenocysteine
  MOD_RES (275)..(275): Selenocysteine
  MOD_RES (296)..(296): Selenocysteine
  MOD_RES (304)..(304): Selenocysteine
  MOD_RES (346)..(346): Selenocysteine
  MOD_RES (354)..(354): Selenocysteine
  MOD_RES (361)..(361): Selenocysteine
  MOD_RES (366)..(367): Selenocysteine
  MOD_RES (370)..(370): Selenocysteine
  MOD_RES (401)..(401): Selenocysteine
  MOD_RES (403)..(403): Selenocysteine
  MOD_RES (412)..(412): Selenocysteine
  MOD_RES (446)..(446): Selenocysteine
  MOD_RES (460)..(460): Selenocysteine
  MOD_RES (462)..(462): Selenocysteine
  MOD_RES (491)..(491): Selenocysteine
  MOD_RES (499)..(499): Selenocysteine
  MOD_RES (527)..(527): Selenocysteine
  MOD_RES (604)..(604): Selenocysteine
MSLKLPRNWDFNLKVEAAKIARSRSVMXGEQMAAFHPSSXPNPLERPIKMGWLKKQRSIVKNWQQRYFVLRAQQLYYYKDEEDXKPQGCMYLPGCXIKEIAXNPEEAGKFVFEIIPVFGQRLDEXVAYEQKFGPHLVPILVEKCAEFILEHGRNEEGIFRLPGQDNLVKQLRDAFDAGERPSFDRDXDVHXVASLLKLYLRDLPEPVVPWSQYEGFLLCGQLXNADEAKAQQELMKQLSILPRDNYSLLSYICRFLHEIQLNCAVNKMSVDNLAXVIGVNLIRSKVEDPAVIMRGXPQIQRVMXMMIRDHEVLFPKSKDIPLSPPAQKNDPKKAPVARSSVGWDAXEDLRISRXDSFSSMXSDSDXXSPXGQQPSDAFPEDSSKVPREKPGDWKMQSRKRXQXLPNRKCFLXSAFQGANSSKMEIFKNEFWSPSSEAKAGEGHRRXMSQDLRQLSDSQRXSXYDNVPSLPGSPGEEASALSSQACDSKGDXLASPNSEXGPGKKNSGEEEIDSLQRMVQELRKEIEXQKQMYEEQIKNLEKENYDVWAKVVRLNEELEKEKKKSAALEISLRNMERSREDVEKRNKALEEEVKEFVKSMKEPKXEA

SEQ ID NO: 2786 - protein, 139 aa, Homo sapiens
  MOD_RES (28)..(28): Selenocysteine
  MOD_RES (40)..(40): Selenocysteine
  MOD_RES (84)..(84): Selenocysteine
  MOD_RES (123)..(123): Selenocysteine
  MOD_RES (137)..(138): Selenocysteine
MSLKLPRNWDFNLKVEAAKIARSRSVMXGEQMAAFHPSSXPNPLERPIKMGWLKKQRSIVKNWQQRYFVLRAQQLYYYKDEEDXKPQQCLASAWMRLWPMNRNSAPIWCPSWWRNVQSSSWSXAGMKRASSVCLGRXXW

SEQ ID NO: 2787 - protein, 339 aa, Homo sapiens
  MOD_RES (8)..(8): Selenocysteine
  MOD_RES (29)..(29): Selenocysteine
  MOD_RES (37)..(37): Selenocysteine
  MOD_RES (79)..(79): Selenocysteine
  MOD_RES (87)..(87): Selenocysteine
  MOD_RES (94)..(94): Selenocysteine
  MOD_RES (99)..(100): Selenocysteine
  MOD_RES (103)..(103): Selenocysteine
  MOD_RES (134)..(134): Selenocysteine
  MOD_RES (136)..(136): Selenocysteine
  MOD_RES (145)..(145): Selenocysteine
  MOD_RES (179)..(179): Selenocysteine
  MOD_RES (193)..(193): Selenocysteine
  MOD_RES (195)..(195): Selenocysteine
  MOD_RES (224)..(224): Selenocysteine
  MOD_RES (232)..(232): Selenocysteine
  MOD_RES (260)..(260): Selenocysteine
  MOD_RES (337)..(337): Selenocysteine
MSVDNLAXVIGVNLIRSKVEDPAVIMRGXPQIQRVMXMMIRDHEVLFPKSKDIPLSPPAQKNDPKKAPVARSSVGWDAXEDLRISRXDSFSSMXSDSDXXSPXGQQPSDAFPEDSSKVPREKPGDWKMQSRKRXQXLPNRKCFLXSAFQGANSSKMEIFKNEFWSPSSEAKAGEGHRRXMSQDLRQLSDSQRXSXYDNVPSLPGSPGEEASALSSQACDSKGDXLASPNSEXGPGKKNSGEEEIDSLQRMVQELRKEIEXQKQMYEEQIKNLEKENYDVWAKVVRLNEELEKEKKKSAALEISLRNMERSREDVEKRNKALEEEVKEFVKSMKEPKXEA

SEQ ID NO: 2788 - protein, 283 aa, Homo sapiens
  MOD_RES (2)..(2): Selenocysteine
  MOD_RES (14)..(14): Selenocysteine
  MOD_RES (58)..(58): Selenocysteine
  MOD_RES (70)..(70): Selenocysteine
  MOD_RES (76)..(76): Selenocysteine
  MOD_RES (126)..(126): Selenocysteine
  MOD_RES (139)..(139): Selenocysteine
  MOD_RES (201)..(201): Selenocysteine
  MOD_RES (205)..(205): Selenocysteine
  MOD_RES (237)..(237): Selenocysteine
MXGEQMAAFHPSSXPNPLERPIKMGWLKKQRSIVKNWQQRYFVLRAQQLYYYKDEEDXKPQGCMYLPGCXIKEIAXNPEEAGKFVFEIIPASWDQNRMGQDSYVLMASSQAEMEEWVKFLRRVAGXPCGAVFGQRLDEXVAYEQKFGPHLVPILVEKCAEFILEHGRNEEGIFRLPGQDNLVKQLRDAFDAGERPSFDRDXDVHXVASLLKLYLRDLPEPVVPWSQYEGFLLCGQLXNADEAKNYRNRNDCQSVVSAQIHQFCPRVSLLAHGQAHLLVNDLLV

SEQ ID NO: 2789 - protein, 505 aa, Homo sapiens
  MOD_RES (1)..(1): Any amino acid
  MOD_RES (24)..(24): Selenocysteine
  MOD_RES (86)..(86): Selenocysteine
  MOD_RES (90)..(90): Selenocysteine
  MOD_RES (122)..(122): Selenocysteine
  MOD_RES (174)..(174): Selenocysteine
  MOD_RES (195)..(195): Selenocysteine
  MOD_RES (203)..(203): Selenocysteine
  MOD_RES (245)..(245): Selenocysteine
  MOD_RES (253)..(253): Selenocysteine
  MOD_RES (260)..(260): Selenocysteine
  MOD_RES (265)..(266): Selenocysteine
  MOD_RES (269)..(269): Selenocysteine
  MOD_RES (300)..(300): Selenocysteine
  MOD_RES (302)..(302): Selenocysteine
  MOD_RES (311)..(311): Selenocysteine
  MOD_RES (345)..(345): Selenocysteine
  MOD_RES (359)..(359): Selenocysteine
  MOD_RES (361)..(361): Selenocysteine
  MOD_RES (390)..(390): Selenocysteine
  MOD_RES (398)..(398): Selenocysteine
  MOD_RES (426)..(426): Selenocysteine
  MOD_RES (503)..(503): Selenocysteine
XAQNDGQVLFALSSAVFGQRLDEXVAYEQKFGPHLVPILVEKCAEFILEHGRNEEGIFRLPGQDNLVKQLRDAFDAGERPSFDRDXDVHXVASLLKLYLRDLPEPVVPWSQYEGFLLCGQLXNADEAKAQQELMKQLSILPRDNYSLLSYICRFLHEIQLNCAVNKMSVDNLAXVIGVNLIRSKVEDPAVIMRGXPQIQRVMXMMIRDHEVLFPKSKDIPLSPPAQKNDPKKAPVARSSVGWDAXEDLRISRXDSFSSMXSDSDXXSPXGQQPSDAFPEDSSKVPREKPGDWKMQSRKRXQXLPNRKCFLXSAFQGANSSKMEIFKNEFWSPSSEAKAGEGHRRXMSQDLRQLSDSQRXSXYDNVPSLPGSPGEEASALSSQACDSKGDXLASPNSEXGPGKKNSGEEEIDSLQRMVQELRKEIEXQKQMYEEQIKNLEKENYDVWAKVVRLNEELEKEKKKSAALEISLRNMERSREDVEKRNKALEEEVKEFVKSMKEPKXEA

SEQ ID NO: 2790 - protein, 97 aa, Homo sapiens
  MOD_RES (55)..(55): Selenocysteine
  MOD_RES (76)..(76): Selenocysteine
  MOD_RES (85)..(85): Selenocysteine
AKLENQESRVSEIHSLVHRLPEKNRQMLQLLMNHLAKYAGGLGKKCVKCSLQWRXAANARWPSQRMLGKCSCNQAXKQSFQGDFXYGDQGQIGVCCP

SEQ ID NO: 2791 - protein, 127 aa, Homo sapiens
  MOD_RES (16)..(16): Selenocysteine
  MOD_RES (23)..(23): Selenocysteine
  MOD_RES (48)..(48): Selenocysteine
  MOD_RES (52)..(52): Selenocysteine
  MOD_RES (56)..(56): Selenocysteine
  MOD_RES (104)..(104): Selenocysteine
IVIEILIENHEKIFNXVPDMPLXNAQLHLSRKKSSDSKPPSCSERPLXLFHXVQSXEKQEQRNSIINSSLESVSSNPNSILNSSSSLQPNMNSSDPDLAVVKPXRPNSLVQPPRQLCSLPSKPALAF

SEQ ID NO: 2792 - protein, 166 aa, Homo sapiens
  MOD_RES (12)..(12): Selenocysteine
  MOD_RES (49)..(49): Selenocysteine
  MOD_RES (64)..(64): Selenocysteine
  MOD_RES (86)..(86): Selenocysteine
  MOD_RES (110)..(110): Selenocysteine
MEPLAPSPRIWXCVFYFGIESEEDLSSAKRKFADSLNEFKFQCIGDAEXDDEMCIARSLQEFAXVLRNLEDERIRMIENASEVLIXPLEKFRKEQIGAAKEAKKKYDKEXEKYCGILEKHLNLSSKKKESQLQEADSQVDLVRQHFYEVSLEYVFKVQEVQERKMF

SEQ ID NO: 2793 - protein, 759 aa, Homo sapiens
  MOD_RES (21)..(21): Selenocysteine
  MOD_RES (32)..(32): Selenocysteine
  MOD_RES (77)..(77): Selenocysteine
  MOD_RES (92)..(92): Selenocysteine
  MOD_RES (114)..(114): Selenocysteine
  MOD_RES (138)..(138): Selenocysteine
  MOD_RES (209)..(209): Selenocysteine
  MOD_RES (226)..(226): Selenocysteine
  MOD_RES (229)..(229): Selenocysteine
  MOD_RES (235)..(235): Selenocysteine
  MOD_RES (242)..(242): Selenocysteine
  MOD_RES (262)..(262): Selenocysteine
  MOD_RES (267)..(267): Selenocysteine
  MOD_RES (282)..(282): Selenocysteine
  MOD_RES (290)..(290): Selenocysteine
  MOD_RES (299)..(299): Selenocysteine
  MOD_RES (323)..(323): Selenocysteine
  MOD_RES (327)..(327): Selenocysteine
  MOD_RES (348)..(348): Selenocysteine
  MOD_RES (382)..(382): Selenocysteine
  MOD_RES (402)..(402): Selenocysteine
  MOD_RES (432)..(432): Selenocysteine
  MOD_RES (436)..(436): Selenocysteine
  MOD_RES (438)..(438): Selenocysteine
  MOD_RES (448)..(448): Selenocysteine
  MOD_RES (450)..(450): Selenocysteine
  MOD_RES (455)..(455): Selenocysteine
  MOD_RES (524)..(524): Selenocysteine
  MOD_RES (535)..(535): Selenocysteine
  MOD_RES (543)..(543): Selenocysteine
  MOD_RES (570)..(570): Selenocysteine
  MOD_RES (577)..(577): Selenocysteine
  MOD_RES (602)..(602): Selenocysteine
  MOD_RES (606)..(606): Selenocysteine
  MOD_RES (610)..(610): Selenocysteine
  MOD_RES (658)..(658): Selenocysteine
  MOD_RES (670)..(670): Selenocysteine
  MOD_RES (689)..(689): Selenocysteine
  MOD_RES (692)..(692): Selenocysteine
  MOD_RES (701)..(701): Selenocysteine
  MOD_RES (723)..(723): Selenocysteine
  MOD_RES (726)..(726): Selenocysteine
  MOD_RES (743)..(743): Selenocysteine
  MOD_RES (748)..(748): Selenocysteine
MGLPALEFSDCCLDSPHFREXLKSHEAELDKXNKFIKELIKDGKSLISALKNLSSAKRKFADSLNEFKFQCIGDAEXDDEMCIARSLQEFAXVLRNLEDERIRMIENASEVLIXPLEKFRKEQIGAAKEAKKKYDKEXEKYCGILEKHLNLSSKKKESQLQEADSQVDLVRQHFYEVSLEYVFKVQEVQERKMFEFVEPLLAFLQGLFXFYHHGYELAKDFGDFKXQLXISIQNXRNRFEGXRSEVESLMKKMKENPLEHKXISPYXMEGYLYVQEKRHFGXSWVKHYCXYQRDSKQIXMVPFDQKSGGKGGEDESVILKSCXRRKXDSIEKRFCFDVEAVDRPGVIXMQALSEEDRRLWMEAMDGREPVYNSNKDSQSEGXAQLDSIGFSIIRKCIHAVEXRGINEQGLYRIVGVNSRVQKLLSVLMDPKXASEXEXDICAEWEIKXIXSALKXYLRMLPGPLMMYQFQRSFIKAAKLENQESRVSEIHSLVHRLPEKNRQMLQLLMNHLANVANNHKQNLMXVANLGVVFGPXLLRPQEEXVAAIMDIKFQNIVIEILIENHEKIFNXVPDMPLXNAQLHLSRKKSSDSKPPSCSERPLXLFHXVQSXEKQEQRNSIINSSLESVSSNPNSILNSSSSLQPNMNSSDPDLAVVKPXRPNSLPPNPSPXSPLSPSWPMFSAPSSPMPXSSXSSDSSPVSXPFRKAKALYACKAEHDSELSFXAGXVFDNVHPSQEPGWLEGXLNGKXGLIPENYVEFL

SEQ ID NO: 2794 - protein, 814 aa, Homo sapiens
  MOD_RES (21)..(21): Selenocysteine
  MOD_RES (32)..(32): Selenocysteine
  MOD_RES (77)..(77): Selenocysteine
  MOD_RES (92)..(92): Selenocysteine
  MOD_RES (114)..(114): Selenocysteine
  MOD_RES (138)..(138): Selenocysteine
  MOD_RES (209)..(209): Selenocysteine
  MOD_RES (226)..(226): Selenocysteine
  MOD_RES (229)..(229): Selenocysteine
  MOD_RES (235)..(235): Selenocysteine
  MOD_RES (242)..(242): Selenocysteine
  MOD_RES (262)..(262): Selenocysteine
  MOD_RES (267)..(267): Selenocysteine
  MOD_RES (282)..(282): Selenocysteine
  MOD_RES (290)..(290): Selenocysteine
  MOD_RES (299)..(299): Selenocysteine
  MOD_RES (323)..(323): Selenocysteine
  MOD_RES (327)..(327): Selenocysteine
  MOD_RES (348)..(348): Selenocysteine
  MOD_RES (382)..(382): Selenocysteine
  MOD_RES (402)..(402): Selenocysteine
  MOD_RES (432)..(432): Selenocysteine
  MOD_RES (436)..(436): Selenocysteine
  MOD_RES (438)..(438): Selenocysteine
  MOD_RES (448)..(448): Selenocysteine
  MOD_RES (450)..(450): Selenocysteine
  MOD_RES (455)..(455): Selenocysteine
  MOD_RES (524)..(524): Selenocysteine
  MOD_RES (535)..(535): Selenocysteine
  MOD_RES (543)..(543): Selenocysteine
  MOD_RES (570)..(570): Selenocysteine
  MOD_RES (577)..(577): Selenocysteine
  MOD_RES (602)..(602): Selenocysteine
  MOD_RES (606)..(606): Selenocysteine
  MOD_RES (610)..(610): Selenocysteine
  MOD_RES (658)..(658): Selenocysteine
  MOD_RES (670)..(670): Selenocysteine
  MOD_RES (689)..(689): Selenocysteine
  MOD_RES (692)..(692): Selenocysteine
  MOD_RES (756)..(756): Selenocysteine
  MOD_RES (778)..(778): Selenocysteine
  MOD_RES (781)..(781): Selenocysteine
  MOD_RES (798)..(798): Selenocysteine
  MOD_RES (803)..(803): Selenocysteine
MGLPALEFSDCCLDSPHFREXLKSHEAELDKXNKFIKELIKDGKSLISALKNLSSAKRKFADSLNEFKFQCIGDAEXDDEMCIARSLQEFAXVLRNLEDERIRMIENASEVLIXPLEKFRKEQIGAAKEAKKKYDKEXEKYCGILEKHLNLSSKKKESQLQEADSQVDLVRQHFYEVSLEYVFKVQEVQERKMFEFVEPLLAFLQGLFXFYHHGYELAKDFGDFKXQLXISIQNXRNRFEGXRSEVESLMKKMKENPLEHKXISPYXMEGYLYVQEKRHFGXSWVKHYCXYQRDSKQIXMVPFDQKSGGKGGEDESVILKSCXRRKXDSIEKRFCFDVEAVDRPGVIXMQALSEEDRRLWMEAMDGREPVYNSNKDSQSEGXAQLDSIGFSIIRKCIHAVEXRGINEQGLYRIVGVNSRVQKLLSVLMDPKXASEXEXDICAEWEIKXIXSALKXYLRMLPGPLMMYQFQRSFIKAAKLENQESRVSEIHSLVHRLPEKNRQMLQLLMNHLANVANNHKQNLMXVANLGVVFGPXLLRPQEEXVAAIMDIKFQNIVIEILIENHEKIFNXVPDMPLXNAQLHLSRKKSSDSKPPSCSERPLXLFHXVQSXEKQEQRNSIINSSLESVSSNPNSILNSSSSLQPNMNSSDPDLAVVKPXRPNSLPPNPSPXSPLSPSWPMFSAPSSPMPXSSXSSDSSPVRSVAGFVWFSVAAVVLSLARSSLHAVFSLLVNFVPCHPNLHLLFDRPEEAVHEDSSXPFRKAKALYACKAEHDSELSFXAGXVFDNVHPSQEPGWLEGXLNGKXGLIPENYVEFL

SEQ ID NO: 2795 - protein, 91 aa, Homo sapiens
  MOD_RES (24)..(24): Selenocysteine
  MOD_RES (28)..(28): Selenocysteine
  MOD_RES (49)..(49): Selenocysteine
  MOD_RES (83)..(83): Selenocysteine
MVPFDQKSGGKGGEDESVILKSCXRRKXDSIEKRFCFDVEAVDRPGVIXMQALSEEDRRLWMEAMDGREPVYNSNKDSQSEGXAQLDSIGF

SEQ ID NO: 2796 - protein, 127 aa, Homo sapiens
  MOD_RES (15)..(15): Selenocysteine
  MOD_RES (22)..(22): Selenocysteine
  MOD_RES (47)..(47): Selenocysteine
  MOD_RES (51)..(51): Selenocysteine
  MOD_RES (55)..(55): Selenocysteine
  MOD_RES (103)..(103): Selenocysteine
  MOD_RES (120)..(120): Selenocysteine
VIEILIENHEKIFNXVPDMPLXNAQLHLSRKKSSDSKPPSCSERPLXLFHXVQSXEKQEQRNSIINSSLESVSSNPNSILNSSSSLQPNMNSSDPDLAVVKPXRPNSLHWGFGMCLEGCXEVQSPAS

SEQ ID NO: 2797 - protein, 388 aa, Homo sapiens
  MOD_RES (1)..(1): Any amino acid
  MOD_RES (21)..(21): Selenocysteine
  MOD_RES (51)..(51): Selenocysteine
  MOD_RES (55)..(55): Selenocysteine
  MOD_RES (57)..(57): Selenocysteine
  MOD_RES (67)..(67): Selenocysteine
  MOD_RES (69)..(69): Selenocysteine
  MOD_RES (74)..(74): Selenocysteine
  MOD_RES (143)..(143): Selenocysteine
  MOD_RES (154)..(154): Selenocysteine
  MOD_RES (162)..(162): Selenocysteine
  MOD_RES (189)..(189): Selenocysteine
  MOD_RES (196)..(196): Selenocysteine
  MOD_RES (221)..(221): Selenocysteine
  MOD_RES (225)..(225): Selenocysteine
  MOD_RES (229)..(229): Selenocysteine
  MOD_RES (277)..(277): Selenocysteine
  MOD_RES (289)..(289): Selenocysteine
  MOD_RES (308)..(308): Selenocysteine
  MOD_RES (311)..(311): Selenocysteine
  MOD_RES (330)..(330): Selenocysteine
  MOD_RES (352)..(352): Selenocysteine
  MOD_RES (355)..(355): Selenocysteine
  MOD_RES (372)..(372): Selenocysteine
  MOD_RES (377)..(377): Selenocysteine
XAQLDSIGFSIIRKCIHAVEXRGINEQGLYRIVGVNSRVQKLLSVLMDPKXASEXEXDICAEWEIKXIXSALKXYLRMLPGPLMMYQFQRSFIKAAKLENQESRVSEIHSLVHRLPEKNRQMLQLLMNHLANVANNHKQNLMXVANLGVVFGPXLLRPQEEXVAAIMDIKFQNIVIEILIENHEKIFNXVPDMPLXNAQLHLSRKKSSDSKPPSCSERPLXLFHXVQSXEKQEQRNSIINSSLESVSSNPNSILNSSSSLQPNMNSSDPDLAVVKPXRPNSLPPNPSPXSPLSPSWPMFSAPSSPMPXSSXSSDSSPVRPEEAVHEDSSXPFRKAKALYACKAEHDSELSFXAGXVFDNVHPSQEPGWLEGXLNGKXGLIPENYVEFL

SEQ ID NO: 2798 - protein, 294 aa, Homo sapiens
  MOD_RES (1)..(1): Any amino acid
  MOD_RES (4)..(4): Selenocysteine
  MOD_RES (8)..(8): Selenocysteine
  MOD_RES (10)..(10): Selenocysteine
  MOD_RES (20)..(20): Selenocysteine
  MOD_RES (22)..(22): Selenocysteine
  MOD_RES (27)..(27): Selenocysteine
  MOD_RES (96)..(96): Selenocysteine
  MOD_RES (107)..(107): Selenocysteine
  MOD_RES (115)..(115): Selenocysteine
  MOD_RES (142)..(142): Selenocysteine
  MOD_RES (149)..(149): Selenocysteine
  MOD_RES (174)..(174): Selenocysteine
  MOD_RES (178)..(178): Selenocysteine
  MOD_RES (182)..(182): Selenocysteine
  MOD_RES (230)..(230): Selenocysteine
  MOD_RES (236)..(236): Selenocysteine
  MOD_RES (258)..(258): Selenocysteine
  MOD_RES (261)..(261): Selenocysteine
  MOD_RES (278)..(278): Selenocysteine
  MOD_RES (283)..(283): Selenocysteine
XPKXASEXEXDICAEWEIKXIXSALKXYLRMLPGPLMMYQFQRSFIKAAKLENQESRVSEIHSLVHRLPEKNRQMLQLLMNHLANVANNHKQNLMXVANLGVVFGPXLLRPQEEXVAAIMDIKFQNIVIEILIENHEKIFNXVPDMPLXNAQLHLSRKKSSDSKPPSCSERPLXLFHXVQSXEKQEQRNSIINSSLESVSSNPNSILNSSSSLQPNMNSSDPDLAVVKPXRPNSLXPFRKAKALYACKAEHDSELSFXAGXVFDNVHPSQEPGWLEGXLNGKXGLIPENYVEFL

SEQ ID NO: 2799 - protein, 98 aa, Homo sapiens
  MOD_RES (1)..(1): Any amino acid
  MOD_RES (7)..(7): Selenocysteine
  MOD_RES (26)..(26): Selenocysteine
  MOD_RES (29)..(29): Selenocysteine
  MOD_RES (38)..(38): Selenocysteine
  MOD_RES (60)..(60): Selenocysteine
  MOD_RES (63)..(63): Selenocysteine
  MOD_RES (75)..(75): Selenocysteine
  MOD_RES (79)..(79): Selenocysteine
  MOD_RES (81)..(81): Selenocysteine
  MOD_RES (91)..(91): Selenocysteine
XPNPSPXSPLSPSWPMFSAPSSPMPXSSXSSDSSPVSXPFRKAKALYACKAEHDSELSFXAGXVFDNAECPSASXAIFXAXPKLRAPPPLXWALPLAA

SEQ ID NO: 2800 - protein, 154 aa, Homo sapiens
  MOD_RES (1)..(1): Any amino acid
  MOD_RES (8)..(8): Selenocysteine
  MOD_RES (27)..(27): Selenocysteine
  MOD_RES (30)..(30): Selenocysteine
  MOD_RES (94)..(94): Selenocysteine
  MOD_RES (116)..(116): Selenocysteine
  MOD_RES (119)..(119): Selenocysteine
  MOD_RES (131)..(131): Selenocysteine
  MOD_RES (135)..(135): Selenocysteine
  MOD_RES (137)..(137): Selenocysteine
  MOD_RES (147)..(147): Selenocysteine
XPPNPSPXSPLSPSWPMFSAPSSPMPXSSXSSDSSPVRSVAGFVWFSVAAVVLSLARSSLHAVFSLLVNFVPCHPNLHLLFDRPEEAVHEDSSXPFRKAKALYACKAEHDSELSFXAGXVFDNAECPSASXAIFXAXPKLRAPPPLXWALPLAA

SEQ ID NO: 2801 - protein, 867 aa, Homo sapiens
  MOD_RES (20)..(20): Selenocysteine
  MOD_RES (42)..(42): Selenocysteine
  MOD_RES (103)..(103): Selenocysteine
  MOD_RES (130)..(130): Selenocysteine
  MOD_RES (238)..(238): Selenocysteine
  MOD_RES (254)..(254): Selenocysteine
  MOD_RES (256)..(256): Selenocysteine
  MOD_RES (260)..(260): Selenocysteine
  MOD_RES (270)..(270): Selenocysteine
  MOD_RES (273)..(274): Selenocysteine
  MOD_RES (290)..(290): Selenocysteine
  MOD_RES (303)..(303): Selenocysteine
  MOD_RES (323)..(323): Selenocysteine
  MOD_RES (326)..(326): Selenocysteine
  MOD_RES (358)..(358): Selenocysteine
  MOD_RES (361)..(361): Selenocysteine
  MOD_RES (368)..(368): Selenocysteine
  MOD_RES (387)..(387): Selenocysteine
  MOD_RES (391)..(392): Selenocysteine
  MOD_RES (409)..(409): Selenocysteine
  MOD_RES (413)..(413): Selenocysteine
  MOD_RES (461)..(461): Selenocysteine
  MOD_RES (472)..(472): Selenocysteine
  MOD_RES (474)..(474): Selenocysteine
  MOD_RES (484)..(484): Selenocysteine
  MOD_RES (486)..(486): Selenocysteine
  MOD_RES (503)..(503): Selenocysteine
  MOD_RES (511)..(511): Selenocysteine
  MOD_RES (518)..(518): Selenocysteine
  MOD_RES (532)..(532): Selenocysteine
  MOD_RES (536)..(536): Selenocysteine
  MOD_RES (543)..(543): Selenocysteine
  MOD_RES (580)..(580): Selenocysteine
  MOD_RES (658)..(658): Selenocysteine
  MOD_RES (718)..(718): Selenocysteine
  MOD_RES (746)..(746): Selenocysteine
  MOD_RES (799)..(799): Selenocysteine
  MOD_RES (831)..(831): Selenocysteine
  MOD_RES (840)..(840): Selenocysteine
  MOD_RES (845)..(845): Selenocysteine
MAADVVGDVYVLVEHPFEYXGKDGRRVAIRPNERYRLLRRSXEHWWHVRREPGGRPFYLPAQYVRELPALGNPAAAAPPGPHPSPAAPEPLAYDYRFVSAAAXAGPDGAPEESGGRASSLCGPAQRGAAXQRSSLAPGLPACLYLRPAAPVRPAQSLNDLACAAVSPPAGLLGSSGSFKACSVAGSWVCPRPLARSDSENVYEVIQDLHVPPPEESAEQVDDPPEPVYANIERQPRAXSPGAAAAPLPSPVWEXHXDAGXGRPYYYNPDXGVXXWESPFEAAEGAASPAXSPASVDSHVSLEXEWGQYWDEESRRVFFYNPLXGEXAWEDEAENEPEEELEMQPGLSPGSPGDPRPPXPEXDYPESLXSYPEEDYSPVGSFGEPGPXSPLXXPPGWSCHVSQDKQMLYXNHFXQEQWVRLEDPHGKPYFYNPEDSSVRWELPQVPVPAPRSIHKSSQDGDXPAQASPPEEKXKXLDKAGVLHRXKXADKGKRLRKKHWSASWXVLEGGVLXFFKDSKXSAAGGLRQPSKFSXPEYXVELRGAXLSWAPKDKSSRKNVLELRSRDGSEYLIQHDSEAIISXWHKAIAQGIQELSAELPPEESESSRVDFGSSERLGSWQEKEEDARPNAAAPALGPVGLESDLSKVRHKLRKFLQRRPXLQSLREKGYIKDQVFGCALAALCERERSRVPRFVQQCIRAVEARGLDIDGLYRISGNLAXIQKLRYKVDHDERLDLDDGRWEDVHVIXGALKLFFRELPEPLFPFSHFRQFIAAIKLQDQARRSRCVRDLVRSLPAPNHDXLRMLFQHLCRVIEHGEQNRMSVQSVAIVFGPXLLRPEVEEXSMPMXMVFQNQVVELILQQCADIFPPH

SEQ ID NO: 2802 - protein, 889 aa, Homo sapiens
  MOD_RES (20)..(20): Selenocysteine
  MOD_RES (42)..(42): Selenocysteine
  MOD_RES (103)..(103): Selenocysteine
  MOD_RES (130)..(130): Selenocysteine
  MOD_RES (238)..(238): Selenocysteine
  MOD_RES (254)..(254): Selenocysteine
  MOD_RES (256)..(256): Selenocysteine
  MOD_RES (260)..(260): Selenocysteine
  MOD_RES (270)..(270): Selenocysteine
  MOD_RES (273)..(274): Selenocysteine
  MOD_RES (290)..(290): Selenocysteine
  MOD_RES (303)..(303): Selenocysteine
  MOD_RES (323)..(323): Selenocysteine
  MOD_RES (326)..(326): Selenocysteine
  MOD_RES (358)..(358): Selenocysteine
  MOD_RES (361)..(361): Selenocysteine
  MOD_RES (368)..(368): Selenocysteine
  MOD_RES (387)..(387): Selenocysteine
  MOD_RES (391)..(392): Selenocysteine
  MOD_RES (409)..(409): Selenocysteine
  MOD_RES (413)..(413): Selenocysteine
  MOD_RES (461)..(461): Selenocysteine
  MOD_RES (489)..(489): Selenocysteine
  MOD_RES (494)..(494): Selenocysteine
  MOD_RES (496)..(496): Selenocysteine
  MOD_RES (506)..(506): Selenocysteine
  MOD_RES (508)..(508): Selenocysteine
  MOD_RES (525)..(525): Selenocysteine
  MOD_RES (533)..(533): Selenocysteine
  MOD_RES (540)..(540): Selenocysteine
  MOD_RES (554)..(554): Selenocysteine
  MOD_RES (558)..(558): Selenocysteine
  MOD_RES (565)..(565): Selenocysteine
  MOD_RES (602)..(602): Selenocysteine
  MOD_RES (680)..(680): Selenocysteine
  MOD_RES (740)..(740): Selenocysteine
  MOD_RES (768)..(768): Selenocysteine
  MOD_RES (821)..(821): Selenocysteine
  MOD_RES (853)..(853): Selenocysteine
  MOD_RES (862)..(862): Selenocysteine
  MOD_RES (867)..(867): Selenocysteine
MAADVVGDVYVLVEHPFEYXGKDGRRVAIRPNERYRLLRRSXEHWWHVRREPGGRPFYLPAQYVRELPALGNPAAAAPPGPHPSPAAPEPLAYDYRFVSAAAXAGPDGAPEESGGRASSLCGPAQRGAAXQRSSLAPGLPACLYLRPAAPVRPAQSLNDLACAAVSPPAGLLGSSGSFKACSVAGSWVCPRPLARSDSENVYEVIQDLHVPPPEESAEQVDDPPEPVYANIERQPRAXSPGAAAAPLPSPVWEXHXDAGXGRPYYYNPDXGVXXWESPFEAAEGAASPAXSPASVDSHVSLEXEWGQYWDEESRRVFFYNPLXGEXAWEDEAENEPEEELEMQPGLSPGSPGDPRPPXPEXDYPESLXSYPEEDYSPVGSFGEPGPXSPLXXPPGWSCHVSQDKQMLYXNHFXQEQWVRLEDPHGKPYFYNPEDSSVRWELPQVPVPAPRSIHKSSQDGDXPAQASPPEEKVPAELDEVGSWEEVSPAXAAVRXKXLDKAGVLHRXKXADKGKRLRKKHWSASWXVLEGGVLXFFKDSKXSAAGGLRQPSKFSXPEYXVELRGAXLSWAPKDKSSRKNVLELRSRDGSEYLIQHDSEAIISXWHKAIAQGIQELSAELPPEESESSRVDFGSSERLGSWQEKEEDARPNAAAPALGPVGLESDLSKVRHKLRKFLQRRPXLQSLREKGYIKDQVFGCALAALCERERSRVPRFVQQCIRAVEARGLDIDGLYRISGNLAXIQKLRYKVDHDERLDLDDGRWEDVHVIXGALKLFFRELPEPLFPFSHFRQFIAAIKLQDQARRSRCVRDLVRSLPAPNHDXLRMLFQHLCRVIEHGEQNRMSVQSVAIVFGPXLLRPEVEEXSMPMXMVFQNQVVELILQQCADIFPPH

SEQ ID NO: 2803 - protein, 263 aa, Homo sapiens
  MOD_RES (20)..(20): Selenocysteine
  MOD_RES (42)..(42): Selenocysteine
  MOD_RES (103)..(103): Selenocysteine
  MOD_RES (130)..(130): Selenocysteine
  MOD_RES (239)..(239): Selenocysteine
  MOD_RES (246)..(246): Selenocysteine
MAADVVGDVYVLVEHPFEYXGKDGRRVAIRPNERYRLLRRSXEHWWHVRREPGGRPFYLPAQYVRELPALGNPAAAAPPGPHPSPAAPEPLAYDYRFVSAAAXAGPDGAPEESGGRASSLCGPAQRGAAXQRSSLAPGLPACLYLRPAAPVRPAQSLNDLACAAVSPPAGLLGSSGSFKACSVAGSWVCPRPLARSDSENVYEVIQDLHVPPPEESAEQVPPRALGRGGGWRARDRARXEPGRKEXRSAQRRARRPPLSEDFG

SEQ ID NO: 2804 - protein, 867 aa, Homo sapiens
  MOD_RES (20)..(20): Selenocysteine
  MOD_RES (42)..(42): Selenocysteine
  MOD_RES (103)..(103): Selenocysteine
  MOD_RES (117)..(117): Selenocysteine
  MOD_RES (130)..(130): Selenocysteine
  MOD_RES (238)..(238): Selenocysteine
  MOD_RES (254)..(254): Selenocysteine
  MOD_RES (256)..(256): Selenocysteine
  MOD_RES (260)..(260): Selenocysteine
  MOD_RES (270)..(270): Selenocysteine
  MOD_RES (273)..(274): Selenocysteine
  MOD_RES (290)..(290): Selenocysteine
  MOD_RES (303)..(303): Selenocysteine
  MOD_RES (323)..(323): Selenocysteine
  MOD_RES (326)..(326): Selenocysteine
  MOD_RES (358)..(358): Selenocysteine
  MOD_RES (361)..(361): Selenocysteine
  MOD_RES (368)..(368): Selenocysteine
  MOD_RES (387)..(387): Selenocysteine
  MOD_RES (391)..(392): Selenocysteine
  MOD_RES (409)..(409): Selenocysteine
  MOD_RES (413)..(413): Selenocysteine
  MOD_RES (461)..(461): Selenocysteine
  MOD_RES (472)..(472): Selenocysteine
  MOD_RES (474)..(474): Selenocysteine
  MOD_RES (484)..(484): Selenocysteine
  MOD_RES (486)..(486): Selenocysteine
  MOD_RES (503)..(503): Selenocysteine
  MOD_RES (511)..(511): Selenocysteine
  MOD_RES (518)..(518): Selenocysteine
  MOD_RES (532)..(532): Selenocysteine
  MOD_RES (536)..(536): Selenocysteine
  MOD_RES (543)..(543): Selenocysteine
  MOD_RES (580)..(580): Selenocysteine
  MOD_RES (658)..(658): Selenocysteine
  MOD_RES (718)..(718): Selenocysteine
  MOD_RES (746)..(746): Selenocysteine
  MOD_RES (799)..(799): Selenocysteine
  MOD_RES (831)..(831): Selenocysteine
  MOD_RES (840)..(840): Selenocysteine
  MOD_RES (845)..(845): Selenocysteine
MAADVVGDVYVLVEHPFEYXGKDGRRVAIRPNERYRLLRRSXEHWWHVRREPGGRPFYLPAQYVRELPALGNPAAAAPPGPHPSPAAPEPLAYDYRFVSAAAXAGPDGAPEESGGRXSSLCGPAQRGAAXQRSSLAPGLPACLYLRPAAPVRPAQSLNDLACAAVSPPAGLLGSSGSFKACSVAGSWVCPRPLARSDSENVYEVIQDLHVPPREESAEQVDDPPEPVYANIERQPRAXSPGAAAAPLPSPVWEXHXDAGXGRPYYYNPDXGVXXWESPFEAAEGAASPAXSPASVDSHVSLEXEWGQYWDEESRRVFFYNPLXGEXAWEDEAENEPEEELEMQPGLSPGSPGDPRPPXPEXDYPESLXSYPEEDYSPVGSFGEPGPXSPLXXPPGWSCHVSQDKQMLYXNHFXQEQWVRLEDPHGKPYFYNPEDSSVRWELPQVPVPAPRSIHKSSQDGDXPAQASPPEEKXKXLDKAGVLHRXKXADKGKRLRKKHWSASWXVLEGGVLXFFKDSKXSAAGGLRQPSKFSXPEYXVELRGAXLSWAPKDKSSRKNVLELRSRDGSEYLIQHDSEAIISXWHKAIAQGIQELSAELPPEESESSRVDFGSSERLGSWQEKEEDARPNAAAPALGPVGLESDLSKVRHKLRKFLQRRPXLQSLREKGYIKDQVFGCALAALCERERSRVPRFVQQCIRAVEARGLDIDGLYRISGNLAXIQKLRYKVDHDERLDLDDGRWEDVHVIXGALKLFFRELPEPLFPFSHFRQFIAAIKLQDQARRSRCVRDLVRSLPAPNHDXLRMLFQHLCRVIEHGEQNRMSVQSVAIVFGPXLLRPEVEEXSMPMXMVFQNQVVELILQQCADIFPPH

SEQ ID NO: 2805 - protein, 889 aa, Homo sapiens
  MOD_RES (20)..(20): Selenocysteine
  MOD_RES (42)..(42): Selenocysteine
  MOD_RES (103)..(103): Selenocysteine
  MOD_RES (117)..(117): Selenocysteine
  MOD_RES (130)..(130): Selenocysteine
  MOD_RES (238)..(238): Selenocysteine
  MOD_RES (254)..(254): Selenocysteine
  MOD_RES (256)..(256): Selenocysteine
  MOD_RES (260)..(260): Selenocysteine
  MOD_RES (270)..(270): Selenocysteine
  MOD_RES (273)..(274): Selenocysteine
  MOD_RES (290)..(290): Selenocysteine
  MOD_RES (303)..(303): Selenocysteine
  MOD_RES (323)..(323): Selenocysteine
  MOD_RES (326)..(326): Selenocysteine
  MOD_RES (358)..(358): Selenocysteine
  MOD_RES (361)..(361): Selenocysteine
  MOD_RES (368)..(368): Selenocysteine
  MOD_RES (387)..(387): Selenocysteine
  MOD_RES (391)..(392): Selenocysteine
  MOD_RES (409)..(409): Selenocysteine
  MOD_RES (413)..(413): Selenocysteine
  MOD_RES (461)..(461): Selenocysteine
  MOD_RES (489)..(489): Selenocysteine
  MOD_RES (494)..(494): Selenocysteine
  MOD_RES (496)..(496): Selenocysteine
  MOD_RES (506)..(506): Selenocysteine
  MOD_RES (508)..(508): Selenocysteine
  MOD_RES (525)..(525): Selenocysteine
  MOD_RES (533)..(533): Selenocysteine
  MOD_RES (540)..(540): Selenocysteine
  MOD_RES (554)..(554): Selenocysteine
  MOD_RES (558)..(558): Selenocysteine
  MOD_RES (565)..(565): Selenocysteine
  MOD_RES (602)..(602): Selenocysteine
  MOD_RES (680)..(680): Selenocysteine
  MOD_RES (740)..(740): Selenocysteine
  MOD_RES (768)..(768): Selenocysteine
  MOD_RES (821)..(821): Selenocysteine
  MOD_RES (853)..(853): Selenocysteine
  MOD_RES (862)..(862): Selenocysteine
  MOD_RES (867)..(867): Selenocysteine
MAADVVGDVYVLVEHPFEYXGKDGRRVAIRPNERYRLLRRSXEHWWHVRREPGGRPFYLPAQYVRELPALGNPAAAAPPGPHPSPAAPEPLAYDYRFVSAAAXAGPDGAPEESGGRXSSLCGPAQRGAAXQRSSLAPGLPACLYLRPAAPVRPAQSLNDLACAAVSPPAGLLGSSGSFKACSVAGSWVCPRPLARSDSENVYEVIQDLHVPPREESAEQVDDPPEPVYANIERQPRAXSPGAAAAPLPSPVWEXHXDAGXGRPYYYNPDXGVXXWESPFEAAEGAASPAXSPASVDSHVSLEXEWGQYWDEESRRVFFYNPLXGEXAWEDEAENEPEEELEMQPGLSPGSPGDPRPPXPEXDYPESLXSYPEEDYSPVGSFGEPGPXSPLXXPPGWSCHVSQDKQMLYXNHFXQEQWVRLEDPHGKPYFYNPEDSSVRWELPQVPVPAPRSIHKSSQDGDXPAQASPPEEKVPAELDEVGSWEEVSPAXAAVRXKXLDKAGVLHRXKXADKGKRLRKKHWSASWXVLEGGVLXFFKDSKXSAAGGLRQPSKFSXPEYXVELRGAXLSWAPKDKSSRKNVLELRSRDGSEYLIQHDSEAIISXWHKAIAQGIQELSAELPPEESESSRVDFGSSERLGSWQEKEEDARPNAAAPALGPVGLESDLSKVRHKLRKFLQRRPXLQSLREKGYIKDQVFGCALAALCERERSRVPRFVQQCIRAVEARGLDIDGLYRISGNLAXIQKLRYKVDHDERLDLDDGRWEDVHVIXGALKLFFRELPEPLFPFSHFRQFIAAIKLQDQARRSRCVRDLVRSLPAPNHDXLRMLFQHLCRVIEHGEQNRMSVQSVAIVFGPXLLRPEVEEXSMPMXMVFQNQVVELILQQCADIFPPH

SEQ ID NO: 2806 - protein, 263 aa, Homo sapiens
  MOD_RES (20)..(20): Selenocysteine
  MOD_RES (42)..(42): Selenocysteine
  MOD_RES (103)..(103): Selenocysteine
  MOD_RES (117)..(117): Selenocysteine
  MOD_RES (130)..(130): Selenocysteine
  MOD_RES (239)..(239): Selenocysteine
  MOD_RES (246)..(246): Selenocysteine
MAADVVGDVYVLVEHPFEYXGKDGRRVAIRPNERYRLLRRSXEHWWHVRREPGGRPFYLPAQYVRELPALGNPAAAAPPGPHPSPAAPEPLAYDYRFVSAAAXAGPDGAPEESGGRXSSLCGPAQRGAAXQRSSLAPGLPACLYLRPAAPVRPAQSLNDLACAAVSPPAGLLGSSGSFKACSVAGSWVCPRPLARSDSENVYEVIQDLHVPPREESAEQVPPRALGRGGGWRARDRARXEPGRKEXRSAQRRARRPPLSEDFG

SEQ ID NO: 2807 - protein, 521 aa, Homo sapiens
  MOD_RES (17)..(17): Selenocysteine
  MOD_RES (20)..(20): Selenocysteine
  MOD_RES (27)..(27): Selenocysteine
  MOD_RES (46)..(46): Selenocysteine
  MOD_RES (50)..(51): Selenocysteine
  MOD_RES (68)..(68): Selenocysteine
  MOD_RES (72)..(72): Selenocysteine
  MOD_RES (93)..(93): Selenocysteine
  MOD_RES (121)..(121): Selenocysteine
  MOD_RES (126)..(126): Selenocysteine
  MOD_RES (128)..(128): Selenocysteine
  MOD_RES (138)..(138): Selenocysteine
  MOD_RES (140)..(140): Selenocysteine
  MOD_RES (157)..(157): Selenocysteine
  MOD_RES (165)..(165): Selenocysteine
  MOD_RES (172)..(172): Selenocysteine
  MOD_RES (186)..(186): Selenocysteine
  MOD_RES (190)..(190): Selenocysteine
  MOD_RES (197)..(197): Selenocysteine
  MOD_RES (234)..(234): Selenocysteine
  MOD_RES (312)..(312): Selenocysteine
  MOD_RES (372)..(372): Selenocysteine
  MOD_RES (400)..(400): Selenocysteine
  MOD_RES (453)..(453): Selenocysteine
  MOD_RES (485)..(485): Selenocysteine
  MOD_RES (494)..(494): Selenocysteine
  MOD_RES (499)..(499): Selenocysteine
MQPGLSPGSPGDPRPPXPEXDYPESLXSYPEEDYSPVGSFGEPGPXSPLXXPPGWSCHVSQDKQMLYXNHFXQEQVPVPAPRSIHKSSQDGDXPAQASPPEEKVPAELDEVGSWEEVSPAXAAVRXKXLDKAGVLHRXKXADKGKRLRKKHWSASWXVLEGGVLXFFKDSKXSAAGGLRQPSKFSXPEYXVELRGAXLSWAPKDKSSRKNVLELRSRDGSEYLIQHDSEAIISXWHKAIAQGIQELSAELPPEESESSRVDFGSSERLGSWQEKEEDARPNAAAPALGPVGLESDLSKVRHKLRKFLQRRPXLQSLREKGYIKDQVFGCALAALCERERSRVPRFVQQCIRAVEARGLDIDGLYRISGNLAXIQKLRYKVDHDERLDLDDGRWEDVHVIXGALKLFFRELPEPLFPFSHFRQFIAAIKLQDQARRSRCVRDLVRSLPAPNHDXLRMLFQHLCRVIEHGEQNRMSVQSVAIVFGPXLLRPEVEEXSMPMXMVFQNQVVELILQQCADIFPPH

SEQ ID NO: 2808 - protein, 548 aa, Homo sapiens
  MOD_RES (17)..(17): Selenocysteine
  MOD_RES (20)..(20): Selenocysteine
  MOD_RES (27)..(27): Selenocysteine
  MOD_RES (46)..(46): Selenocysteine
  MOD_RES (50)..(51): Selenocysteine
  MOD_RES (68)..(68): Selenocysteine
  MOD_RES (72)..(72): Selenocysteine
  MOD_RES (120)..(120): Selenocysteine
  MOD_RES (148)..(148): Selenocysteine
  MOD_RES (153)..(153): Selenocysteine
  MOD_RES (155)..(155): Selenocysteine
  MOD_RES (165)..(165): Selenocysteine
  MOD_RES (167)..(167): Selenocysteine
  MOD_RES (184)..(184): Selenocysteine
  MOD_RES (192)..(192): Selenocysteine
  MOD_RES (199)..(199): Selenocysteine
  MOD_RES (213)..(213): Selenocysteine
  MOD_RES (217)..(217): Selenocysteine
  MOD_RES (224)..(224): Selenocysteine
  MOD_RES (261)..(261): Selenocysteine
  MOD_RES (339)..(339): Selenocysteine
  MOD_RES (399)..(399): Selenocysteine
  MOD_RES (427)..(427): Selenocysteine
  MOD_RES (480)..(480): Selenocysteine
  MOD_RES (512)..(512): Selenocysteine
  MOD_RES (521)..(521): Selenocysteine
  MOD_RES (526)..(526): Selenocysteine
MQPGLSPGSPGDPRPPXPEXDYPESLXSYPEEDYSPVGSFGEPGPXSPLXXPPGWSCHVSQDKQMLYXNHFXQEQWVRLEDPHGKPYFYNPEDSSVRWELPQVPVPAPRSIHKSSQDGDXPAQASPPEEKVPAELDEVGSWEEVSPAXAAVRXKXLDKAGVLHRXKXADKGKRLRKKHWSASWXVLEGGVLXFFKDSKXSAAGGLRQPSKFSXPEYXVELRGAXLSWAPKDKSSRKNVLELRSRDGSEYLIQHDSEAIISXWHKAIAQGIQELSAELPPEESESSRVDFGSSERLGSWQEKEEDARPNAAAPALGPVGLESDLSKVRHKLRKFLQRRPXLQSLREKGYIKDQVFGCALAALCERERSRVPRFVQQCIRAVEARGLDIDGLYRISGNLAXIQKLRYKVDHDERLDLDDGRWEDVHVIXGALKLFFRELPEPLFPFSHFRQFIAAIKLQDQARRSRCVRDLVRSLPAPNHDXLRMLFQHLCRVIEHGEQNRMSVQSVAIVFGPXLLRPEVEEXSMPMXMVFQNQVVELILQQCADIFPPH

SEQ ID NO: 2809 - protein, 77 aa, Homo sapiens
  MOD_RES (17)..(17): Selenocysteine
  MOD_RES (20)..(20): Selenocysteine
  MOD_RES (27)..(27): Selenocysteine
MQPGLSPGSPGDPRPPXPEXDYPESLXSYPEEDYSPVGSFVGEAGGPPREAILLQSRGLLCSMGAAPGPCPCPSKHP

SEQ ID NO: 2810 - protein, 214 aa, Homo sapiens
  MOD_RES (9)..(9): Selenocysteine
  MOD_RES (38)..(38): Selenocysteine
  MOD_RES (54)..(54): Selenocysteine
  MOD_RES (56)..(56): Selenocysteine
  MOD_RES (60)..(60): Selenocysteine
  MOD_RES (70)..(70): Selenocysteine
  MOD_RES (73)..(74): Selenocysteine
  MOD_RES (90)..(90): Selenocysteine
  MOD_RES (101)..(101): Selenocysteine
  MOD_RES (104)..(104): Selenocysteine
  MOD_RES (111)..(111): Selenocysteine
  MOD_RES (130)..(130): Selenocysteine
  MOD_RES (134)..(135): Selenocysteine
  MOD_RES (152)..(152): Selenocysteine
  MOD_RES (156)..(156): Selenocysteine
  MOD_RES (204)..(204): Selenocysteine
MVDIIAKVXRRQSRALPAQVDDPPEPVYANIERQPRAXSPGAAAAPLPSPVWEXHXDAGXGRPYYYNPDXGVXXWESPFEAAEGAASPAXSPASVDSHPPXPEXDYPESLXSYPEEDYSPVGSFGEPGPXSPLXXPPGWSCHVSQDKQMLYXNHFXQEQWVRLEDPHGKPYFYNPEDSSVRWELPQVPVPAPRSIHKSSQDGDXPAQASPPEEK

SEQ ID NO: 2811 - protein, 667 aa, Homo sapiens
  MOD_RES (9)..(9): Selenocysteine
  MOD_RES (38)..(38): Selenocysteine
  MOD_RES (54)..(54): Selenocysteine
  MOD_RES (56)..(56): Selenocysteine
  MOD_RES (60)..(60): Selenocysteine
  MOD_RES (70)..(70): Selenocysteine
  MOD_RES (73)..(74): Selenocysteine
  MOD_RES (90)..(90): Selenocysteine
  MOD_RES (103)..(103): Selenocysteine
  MOD_RES (123)..(123): Selenocysteine
  MOD_RES (126)..(126): Selenocysteine
  MOD_RES (158)..(158): Selenocysteine
  MOD_RES (161)..(161): Selenocysteine
  MOD_RES (168)..(168): Selenocysteine
  MOD_RES (187)..(187): Selenocysteine
  MOD_RES (191)..(192): Selenocysteine
  MOD_RES (209)..(209): Selenocysteine
  MOD_RES (213)..(213): Selenocysteine
  MOD_RES (261)..(261): Selenocysteine
  MOD_RES (272)..(272): Selenocysteine
  MOD_RES (274)..(274): Selenocysteine
  MOD_RES (284)..(284): Selenocysteine
  MOD_RES (286)..(286): Selenocysteine
  MOD_RES (303)..(303): Selenocysteine
  MOD_RES (311)..(311): Selenocysteine
  MOD_RES (318)..(318): Selenocysteine
  MOD_RES (332)..(332): Selenocysteine
  MOD_RES (336)..(336): Selenocysteine
  MOD_RES (343)..(343): Selenocysteine
  MOD_RES (380)..(380): Selenocysteine
  MOD_RES (458)..(458): Selenocysteine
  MOD_RES (518)..(518): Selenocysteine
  MOD_RES (546)..(546): Selenocysteine
  MOD_RES (599)..(599): Selenocysteine
  MOD_RES (631)..(631): Selenocysteine
  MOD_RES (640)..(640): Selenocysteine
  MOD_RES (645)..(645): Selenocysteine
MVDIIAKVXRRQSRALPAQVDDPPEPVYANIERQPRAXSPGAAAAPLPSPVWEXHXDAGXGRPYYYNPDXGVXXWESPFEAAEGAASPAXSPASVDSHVSLEXEWGQYWDEESRRVFFYNPLXGEXAWEDEAENEPEEELEMQPGLSPGSPGDPRPPXPEXDYPESLXSYPEEDYSPVGSFGEPGPXSPLXXPPGWSCHVSQDKQMLYXNHFXQEQWVRLEDPHGKPYFYNPEDSSVRWELPQVPVPAPRSIHKSSQDGDXPAQASPPEEKXKXLDKAGVLHRXKXADKGKRLRKKHWSASWXVLEGGVLXFFKDSKXSAAGGLRQPSKFSXPEYXVELRGAXLSWAPKDKSSRKNVLELRSRDGSEYLIQHDSEAIISXWHKAIAQGIQELSAELPPEESESSRVDFGSSERLGSWQEKEEDARPNAAAPALGPVGLESDLSKVRHKLRKFLQRRPXLQSLREKGYIKDQVFGCALAALCERERSRVPRFVQQCIRAVEARGLDIDGLYRISGNLAXIQKLRYKVDHDERLDLDDGRWEDVHVIXGALKLFFRELPEPLFPFSHFRQFIAAIKLQDQARRSRCVRDLVRSLPAPNHDXLRMLFQHLCRVIEHGEQNRMSVQSVAIVFGPXLLRPEVEEXSMPMXMVFQNQVVELILQQCADIFPPH

SEQ ID NO: 2812 - protein, 202 aa, Homo sapiens
  MOD_RES (15)..(15): Selenocysteine
  MOD_RES (30)..(30): Selenocysteine
  MOD_RES (46)..(46): Selenocysteine
  MOD_RES (105)..(105): Selenocysteine
  MOD_RES (153)..(153): Selenocysteine
  MOD_RES (174)..(174): Selenocysteine
  MOD_RES (198)..(198): Selenocysteine
EDMKKIRHLSLIELXAFFDAFGIQLKRNKXEKVKGRDNGIFGVPLXVLLDGDRKKDPGVKVPLVLQKQYREELDAKFNADKFKWDKMCHREAAVMLKAFFRELPXSLFPVEYIPAFISLMERGPHVKVQFQALHLMVMALPDANRDAAQALMXFFNKVIANESKNRMSLWNISXVMAPNLFFSRSKHSDYEELLLANXAAHI

SEQ ID NO: 2813 - protein, 729 aa, Homo sapiens
  MOD_RES (12)..(12): Selenocysteine
  MOD_RES (105)..(105): Selenocysteine
  MOD_RES (124)..(124): Selenocysteine
  MOD_RES (140)..(140): Selenocysteine
  MOD_RES (142)..(142): Selenocysteine
  MOD_RES (144)..(144): Selenocysteine
  MOD_RES (155)..(155): Selenocysteine
  MOD_RES (157)..(157): Selenocysteine
  MOD_RES (159)..(159): Selenocysteine
  MOD_RES (185)..(185): Selenocysteine
  MOD_RES (190)..(190): Selenocysteine
  MOD_RES (196)..(196): Selenocysteine
  MOD_RES (208)..(208): Selenocysteine
  MOD_RES (221)..(222): Selenocysteine
  MOD_RES (247)..(247): Selenocysteine
  MOD_RES (297)..(297): Selenocysteine
  MOD_RES (318)..(318): Selenocysteine
  MOD_RES (325)..(325): Selenocysteine
  MOD_RES (330)..(330): Selenocysteine
  MOD_RES (352)..(352): Selenocysteine
  MOD_RES (367)..(367): Selenocysteine
  MOD_RES (383)..(383): Selenocysteine
  MOD_RES (426)..(426): Selenocysteine
  MOD_RES (468)..(468): Selenocysteine
  MOD_RES (516)..(516): Selenocysteine
  MOD_RES (537)..(537): Selenocysteine
  MOD_RES (561)..(561): Selenocysteine
  MOD_RES (585)..(585): Selenocysteine
  MOD_RES (594)..(594): Selenocysteine
  MOD_RES (612)..(612): Selenocysteine
  MOD_RES (617)..(617): Selenocysteine
  MOD_RES (622)..(622): Selenocysteine
  MOD_RES (663)..(663): Selenocysteine
MEVEDSGGVVLXAYHSYARAQPPNAESRCAPRAAASHPLSRKSIPRCRRINRMLSNESLHPPAFSRSNSEASVDSASMEDFWREIESIKDSSMGGQEEPPPAEVXPVDEGELEAEWLQDVGLSXLISGDEEEDGKALLSXLXRXQAAAVQKRYHXYXQXMRKKDKQSIRDVRDIFGVSESPPRDXCGNHXNQLDGXKEERELPRVIKXSGSMPDDASLNSXXLSDASQDKEGSFAVPRSDSVAILEXIPVLPVHSNGSPEPGQPVQNAISDDDFLEKNIPPEAEELSFEVSYSEMVXEALKRNKLKKSEIKKEDYVLXKFNVQKXRFGLXEAGDLSAEDMKKIRHLSLIELXAFFDAFGIQLKRNKXEKVKGRDNGIFGVPLXVLLDGDRKKDPGVKVPLVLQKFFEKVEESGLESEGIFRLSGCXAKVKQYREELDAKFNADKFKWDKMCHREAAVMLKAFFRELPXSLFPVEYIPAFISLMERGPHVKVQFQALHLMVMALPDANRDAAQALMXFFNKVIANESKNRMSLWNISXVMAPNLFFSRSKHSDYEELLLANXAAHIIRLMLKYQKILWKVPSFLIXQVRRMNEAXMLLKKQLPSVRKLLRRKXLEREXASPKXSKVLQKSPSARRMSDVPEGVIRVHAPLLSKVSMAIQLNNQXKAKDILAKFQYENSHGSSECIKIQNQRLYEIGGNIGEHCLDPDAYILDVYRINPQAEWVIKPQQSS

SEQ ID NO: 2814 - protein, 117 aa, Homo sapiens
  MOD_RES (53)..(53): Selenocysteine
  MOD_RES (72)..(72): Selenocysteine
  MOD_RES (88)..(88): Selenocysteine
  MOD_RES (90)..(90): Selenocysteine
  MOD_RES (92)..(92): Selenocysteine
  MOD_RES (103)..(103): Selenocysteine
  MOD_RES (105)..(105): Selenocysteine
  MOD_RES (107)..(107): Selenocysteine
MLSNESLHPPAFSRSNSEASVDSASMEDFWREIESIKDSSMGGQEEPPPAEVXPVDEGELEAEWLQDVGLSXLISGDEEEDGKALLSXLXRXQAAAVQKRYHXYXQXMRKKDKQSIR

SEQ ID NO: 2815 - protein, 670 aa, Homo sapiens
  MOD_RES (53)..(53): Selenocysteine
  MOD_RES (72)..(72): Selenocysteine
  MOD_RES (88)..(88): Selenocysteine
  MOD_RES (90)..(90): Selenocysteine
  MOD_RES (92)..(92): Selenocysteine
  MOD_RES (103)..(103): Selenocysteine
  MOD_RES (105)..(105): Selenocysteine
  MOD_RES (107)..(107): Selenocysteine
  MOD_RES (133)..(133): Selenocysteine
  MOD_RES (138)..(138): Selenocysteine
  MOD_RES (144)..(144): Selenocysteine
  MOD_RES (156)..(156): Selenocysteine
  MOD_RES (169)..(170): Selenocysteine
  MOD_RES (195)..(195): Selenocysteine
  MOD_RES (245)..(245): Selenocysteine
  MOD_RES (266)..(266): Selenocysteine
  MOD_RES (273)..(273): Selenocysteine
  MOD_RES (278)..(278): Selenocysteine
  MOD_RES (300)..(300): Selenocysteine
  MOD_RES (315)..(315): Selenocysteine
  MOD_RES (331)..(331): Selenocysteine
  MOD_RES (374)..(374): Selenocysteine
  MOD_RES (416)..(416): Selenocysteine
  MOD_RES (464)..(464): Selenocysteine
  MOD_RES (485)..(485): Selenocysteine
  MOD_RES (509)..(509): Selenocysteine
  MOD_RES (533)..(533): Selenocysteine
  MOD_RES (542)..(542): Selenocysteine
  MOD_RES (560)..(560): Selenocysteine
  MOD_RES (565)..(565): Selenocysteine
  MOD_RES (570)..(570): Selenocysteine
  MOD_RES (611)..(611): Selenocysteine
  MOD_RES (650)..(650): Selenocysteine
  MOD_RES (652)..(652): Selenocysteine
  MOD_RES (663)..(663): Selenocysteine
  MOD_RES (670)..(670): Selenocysteine
MLSNESLHPPAFSRSNSEASVDSASMEDFWREIESIKDSSMGGQEEPPPAEVXPVDEGELEAEWLQDVGLSXLISGDEEEDGKALLSXLXRXQAAAVQKRYHXYXQXMRKKDKQSIRDVRDIFGVSESPPRDXCGNHXNQLDGXKEERELPRVIKXSGSMPDDASLNSXXLSDASQDKEGSFAVPRSDSVAILEXIPVLPVHSNGSPEPGQPVQNAISDDDFLEKNIPPEAEELSFEVSYSEMVXEALKRNKLKKSEIKKEDYVLXKFNVQKXRFGLXEAGDLSAEDMKKIRHLSLIELXAFFDAFGIQLKRNKXEKVKGRDNGIFGVPLXVLLDGDRKKDPGVKVPLVLQKFFEKVEESGLESEGIFRLSGCXAKVKQYREELDAKFNADKFKWDKMCHREAAVMLKAFFRELPXSLFPVEYIPAFISLMERGPHVKVQFQALHLMVMALPDANRDAAQALMXFFNKVIANESKNRMSLWNISXVMAPNLFFSRSKHSDYEELLLANXAAHIIRLMLKYQKILWKVPSFLIXQVRRMNEAXMLLKKQLPSVRKLLRRKXLEREXASPKXSKVLQKSPSARRMSDVPEGVIRVHAPLLSKVSMAIQLNNQXKAKDILAKFQYENRILHWQRAALSFLNGKWVKKEREESXEXNRSPKHVFLFXIGLDISX

SEQ ID NO: 2816 - protein, 545 aa, Homo sapiens
  MOD_RES (8)..(8): Selenocysteine
  MOD_RES (13)..(13): Selenocysteine
  MOD_RES (19)..(19): Selenocysteine
  MOD_RES (31)..(31): Selenocysteine
  MOD_RES (44)..(45): Selenocysteine
  MOD_RES (70)..(70): Selenocysteine
  MOD_RES (120)..(120): Selenocysteine
  MOD_RES (141)..(141): Selenocysteine
  MOD_RES (148)..(148): Selenocysteine
  MOD_RES (153)..(153): Selenocysteine
  MOD_RES (175)..(175): Selenocysteine
  MOD_RES (190)..(190): Selenocysteine
  MOD_RES (206)..(206): Selenocysteine
  MOD_RES (249)..(249): Selenocysteine
  MOD_RES (291)..(291): Selenocysteine
  MOD_RES (339)..(339): Selenocysteine
  MOD_RES (360)..(360): Selenocysteine
  MOD_RES (384)..(384): Selenocysteine
  MOD_RES (408)..(408): Selenocysteine
  MOD_RES (417)..(417): Selenocysteine
  MOD_RES (435)..(435): Selenocysteine
  MOD_RES (440)..(440): Selenocysteine
  MOD_RES (445)..(445): Selenocysteine
  MOD_RES (486)..(486): Selenocysteine
  MOD_RES (525)..(525): Selenocysteine
  MOD_RES (527)..(527): Selenocysteine
  MOD_RES (538)..(538): Selenocysteine
  MOD_RES (545)..(545): Selenocysteine
MNELPRDXCGNHXNQLDGXKEERELPRVIKXSGSMPDDASLNSXXLSDASQDKEGSFAVPRSDSVAILEXIPVLPVHSNGSPEPGQPVQNAISDDDFLEKNIPPEAEELSFEVSYSEMVXEALKRNKLKKSEIKKEDYVLXKFNVQKXRFGLXEAGDLSAEDMKKIRHLSLIELXAFFDAFGIQLKRNKXEKVKGRDNGIFGVPLXVLLDGDRKKDPGVKVPLVLQKFFEKVEESGLESEGIFRLSGCXAKVKQYREELDAKFNADKFKWDKMCHREAAVMLKAFFRELPXSLFPVEYIPAFISLMERGPHVKVQFQALHLMVMALPDANRDAAQALMXFFNKVIANESKNRMSLWNISXVMAPNLFFSRSKHSDYEELLLANXAAHIIRLMLKYQKILWKVPSFLIXQVRRMNEAXMLLKKQLPSVRKLLRRKXLEREXASPKXSKVLQKSPSARRMSDVPEGVIRVHAPLLSKVSMAIQLNNQXKAKDILAKFQYENRILHWQRAALSFLNGKWVKKEREESXEXNRSPKHVFLFXIGLDISX

SEQ ID NO: 2817 - protein, 73 aa, Homo sapiens
  MOD_RES (70)..(70): Selenocysteine
MNLIQGKSIPRCRRINRMLSNESLHPPAFSRSNSEASVDSASMEDFWREIESIKDSSMGGQEEPPPAEVXPVD

SEQ ID NO: 2818 - protein, 565 aa, Homo sapiens
  MOD_RES (26)..(26): Selenocysteine
  MOD_RES (31)..(31): Selenocysteine
  MOD_RES (37)..(37): Selenocysteine
  MOD_RES (49)..(49): Selenocysteine
  MOD_RES (57)..(58): Selenocysteine
  MOD_RES (83)..(83): Selenocysteine
  MOD_RES (133)..(133): Selenocysteine
  MOD_RES (154)..(154): Selenocysteine
  MOD_RES (161)..(161): Selenocysteine
  MOD_RES (166)..(166): Selenocysteine
  MOD_RES (188)..(188): Selenocysteine
  MOD_RES (203)..(203): Selenocysteine
  MOD_RES (219)..(219): Selenocysteine
  MOD_RES (262)..(262): Selenocysteine
  MOD_RES (304)..(304): Selenocysteine
  MOD_RES (352)..(352): Selenocysteine
  MOD_RES (373)..(373): Selenocysteine
  MOD_RES (397)..(397): Selenocysteine
  MOD_RES (421)..(421): Selenocysteine
  MOD_RES (430)..(430): Selenocysteine
  MOD_RES (448)..(448): Selenocysteine
  MOD_RES (453)..(453): Selenocysteine
  MOD_RES (458)..(458): Selenocysteine
  MOD_RES (499)..(499): Selenocysteine
MRKKDKQSIRDVRDIFGVSESPPRDXCGNHXNQLDGXKEERELPRVIKXNDASLNSXXLSDASQDKEGSFAVPRSDSVAILEXIPVLPVHSNGSPEPGQPVQNAISDDDFLEKNIPPEAEELSFEVSYSEMVXEALKRNKLKKSEIKKEDYVLXKFNVQKXRFGLXEAGDLSAEDMKKIRHLSLIELXAFFDAFGIQLKRNKXEKVKGRDNGIFGVPLXVLLDGDRKKDPGVKVPLVLQKFFEKVEESGLESEGIFRLSGCXAKVKQYREELDAKFNADKFKWDKMCHREAAVMLKAFFRELPXSLFPVEYIPAFISLMERGPHVKVQFQALHLMVMALPDANRDAAQALMXFFNKVIANESKNRMSLWNISXVMAPNLFFSRSKHSDYEELLLANXAAHIIRLMLKYQKILWKVPSFLIXQVRRMNEAXMLLKKQLPSVRKLLRRKXLEREXASPKXSKVLQKSPSARRMSDVPEGVIRVHAPLLSKVSMAIQLNNQXKAKDILAKFQYENSHGSSECIKIQNQRLYEIGGNIGEHCLDPDAYILDVYRINPQAEWVIKPQQSS

SEQ ID NO: 2819 - protein, 111 aa, Homo sapiens
  MOD_RES (26)..(26): Selenocysteine
  MOD_RES (31)..(31): Selenocysteine
  MOD_RES (37)..(37): Selenocysteine
  MOD_RES (49)..(49): Selenocysteine
  MOD_RES (62)..(63): Selenocysteine
  MOD_RES (88)..(88): Selenocysteine
MRKKDKQSIRDVRDIFGVSESPPRDXCGNHXNQLDGXKEERELPRVIKXSGSMPDDASLNSXXLSDASQDKEGSFAVPRSDSVAILEXIPVLPVHSNGSPEPGQPVQNAIS

SEQ ID NO: 2820 - protein, 570 aa, Homo sapiens
  MOD_RES (26)..(26): Selenocysteine
  MOD_RES (31)..(31): Selenocysteine
  MOD_RES (37)..(37): Selenocysteine
  MOD_RES (49)..(49): Selenocysteine
  MOD_RES (62)..(63): Selenocysteine
  MOD_RES (88)..(88): Selenocysteine
  MOD_RES (138)..(138): Selenocysteine
  MOD_RES (159)..(159): Selenocysteine
  MOD_RES (166)..(166): Selenocysteine
  MOD_RES (171)..(171): Selenocysteine
  MOD_RES (193)..(193): Selenocysteine
  MOD_RES (208)..(208): Selenocysteine
  MOD_RES (224)..(224): Selenocysteine
  MOD_RES (267)..(267): Selenocysteine
  MOD_RES (309)..(309): Selenocysteine
  MOD_RES (357)..(357): Selenocysteine
  MOD_RES (378)..(378): Selenocysteine
  MOD_RES (402)..(402): Selenocysteine
  MOD_RES (426)..(426): Selenocysteine
  MOD_RES (435)..(435): Selenocysteine
  MOD_RES (453)..(453): Selenocysteine
  MOD_RES (458)..(458): Selenocysteine
  MOD_RES (463)..(463): Selenocysteine
  MOD_RES (504)..(504): Selenocysteine
MRKKDKQSIRDVRDIFGVSESPPRDXCGNHXNQLDGXKEERELPRVIKXSGSMPDDASLNSXXLSDASQDKEGSFAVPRSDSVAILEXIPVLPVHSNGSPEPGQPVQNAISDDDFLEKNIPPEAEELSFEVSYSEMVXEALKRNKLKKSEIKKEDYVLXKFNVQKXRFGLXEAGDLSAEDMKKIRHLSLIELXAFFDAFGIQLKRNKXEKVKGRDNGIFGVPLXVLLDGDRKKDPGVKVPLVLQKFFEKVEESGLESEGIFRLSGCXAKVKQYREELDAKFNADKFKWDKMCHREAAVMLKAFFRELPXSLFPVEYIPAFISLMERGPHVKVQFQALHLMVMALPDANRDAAQALMXFFNKVIANESKNRMSLWNISXVMAPNLFFSRSKHSDYEELLLANXAAHIIRLMLKYQKILWKVPSFLIXQVRRMNEAXMLLKKQLPSVRKLLRRKXLEREXASPKXSKVLQKSPSARRMSDVPEGVIRVHAPLLSKVSMAIQLNNQXKAKDILAKFQYENSHGSSECIKIQNQRLYEIGGNIGEHCLDPDAYILDVYRINPQAEWVIKPQQSS

SEQ ID NO: 2821 - protein, 57 aa, Homo sapiens
  MOD_RES (26)..(26): Selenocysteine
  MOD_RES (31)..(31): Selenocysteine
  MOD_RES (37)..(37): Selenocysteine
  MOD_RES (49)..(49): Selenocysteine
MRKKDKQSIRDVRDIFGVSESPPRDXCGNHXNQLDGXKEERELPRVIKXSGSMYYPV

SEQ ID NO: 2822 - protein, 137 aa, Homo sapiens
  MOD_RES (72)..(72): Selenocysteine
  MOD_RES (74)..(74): Selenocysteine
  MOD_RES (76)..(76): Selenocysteine
  MOD_RES (87)..(87): Selenocysteine
  MOD_RES (89)..(89): Selenocysteine
  MOD_RES (91)..(91): Selenocysteine
  MOD_RES (117)..(117): Selenocysteine
  MOD_RES (122)..(122): Selenocysteine
  MOD_RES (128)..(128): Selenocysteine
MSEPGVLCIVFDWRKSIPRCRRINRMLSNESLHPPAFSRSNSEASVDSASMEDFWREIESDEEEDGKALLSXLXRXQAAAVQKRYHXYXQXMRKKDKQSIRDVRDIFGVSESPPRDXCGNHXNQLDGXKEERELPRV

SEQ ID NO: 2823 - protein, 393 aa, Homo sapiens
  MOD_RES (9)..(9): Selenocysteine
  MOD_RES (22)..(22): Selenocysteine
  MOD_RES (25)..(26): Selenocysteine
  MOD_RES (109)..(109): Selenocysteine
  MOD_RES (118)..(118): Selenocysteine
  MOD_RES (138)..(138): Selenocysteine
  MOD_RES (142)..(142): Selenocysteine
  MOD_RES (148)..(148): Selenocysteine
  MOD_RES (169)..(169): Selenocysteine
  MOD_RES (202)..(202): Selenocysteine
  MOD_RES (214)..(214): Selenocysteine
  MOD_RES (219)..(219): Selenocysteine
  MOD_RES (237)..(237): Selenocysteine
  MOD_RES (247)..(247): Selenocysteine
  MOD_RES (249)..(249): Selenocysteine
  MOD_RES (264)..(264): Selenocysteine
  MOD_RES (280)..(280): Selenocysteine
  MOD_RES (383)..(383): Selenocysteine
MIAHKQKKXKKKRAWASGQLSXDIXXSEMGLKSLSSNSIFDPDYIKELVNDIRKFSHMLLYLKEAIFSDCFKEVIHIRLEELLRVLKSIMNKHQNLNSVDLQNAAEMLXAKVKAVNFXEVNEENKNDLFQEVFSSIEXLAFXFGNILXNFLMGDVGNDSLLRLPVSREXKSFENVSVESVDSSSEKGNFSPLELDNVLLKNXDSIELALSYAKXWSKYXKNIVSWVEKKLNLELESXRNMVKLAEAXRXNIGIQEFMPLQSLFXNALLNDIESSHLLQQXIAALQANKFVQPLLGRKNEMEKQRKEIKELWKQEQNKMLEAENALKKAKLLCMQRQDEYEKAKSSMFRAEEEHLSSSGGLAKNLNKQLEKKRRLEEEALQKVXIFFFFICKLN

SEQ ID NO: 2824 - protein, 1035 aa, Homo sapiens
  MOD_RES (9)..(9): Selenocysteine
  MOD_RES (22)..(22): Selenocysteine
  MOD_RES (25)..(26): Selenocysteine
  MOD_RES (109)..(109): Selenocysteine
  MOD_RES (118)..(118): Selenocysteine
  MOD_RES (138)..(138): Selenocysteine
  MOD_RES (142)..(142): Selenocysteine
  MOD_RES (148)..(148): Selenocysteine
  MOD_RES (169)..(169): Selenocysteine
  MOD_RES (202)..(202): Selenocysteine
  MOD_RES (214)..(214): Selenocysteine
  MOD_RES (219)..(219): Selenocysteine
  MOD_RES (237)..(237): Selenocysteine
  MOD_RES (247)..(247): Selenocysteine
  MOD_RES (249)..(249): Selenocysteine
  MOD_RES (264)..(264): Selenocysteine
  MOD_RES (280)..(280): Selenocysteine
  MOD_RES (394)..(394): Selenocysteine
  MOD_RES (406)..(406): Selenocysteine
  MOD_RES (416)..(416): Selenocysteine
  MOD_RES (424)..(424): Selenocysteine
  MOD_RES (429)..(429): Selenocysteine
  MOD_RES (470)..(470): Selenocysteine
  MOD_RES (473)..(473): Selenocysteine
  MOD_RES (525)..(525): Selenocysteine
  MOD_RES (534)..(534): Selenocysteine
  MOD_RES (544)..(544): Selenocysteine
  MOD_RES (570)..(570): Selenocysteine
  MOD_RES (575)..(575): Selenocysteine
  MOD_RES (593)..(593): Selenocysteine
  MOD_RES (600)..(600): Selenocysteine
  MOD_RES (604)..(604): Selenocysteine
  MOD_RES (612)..(612): Selenocysteine
  MOD_RES (622)..(622): Selenocysteine
  MOD_RES (674)..(674): Selenocysteine
  MOD_RES (715)..(715): Selenocysteine
  MOD_RES (779)..(779): Selenocysteine
  MOD_RES (856)..(857): Selenocysteine
  MOD_RES (861)..(861): Selenocysteine
  MOD_RES (880)..(880): Selenocysteine
  MOD_RES (936)..(936): Selenocysteine
  MOD_RES (948)..(948): Selenocysteine
  MOD_RES (991)..(991): Selenocysteine
  MOD_RES (1003)..(1003): Selenocysteine
  MOD_RES (1010)..(1010): Selenocysteine
  MOD_RES (1013)..(1013): Selenocysteine
  MOD_RES (1019)..(1019): Selenocysteine
MIAHKQKKXKKKRAWASGQLSXDIXXSEMGLKSLSSNSIFDPDYIKELVNDIRKFSHMLLYLKEAIFSDCFKEVIHIRLEELLRVLKSIMNKHQNLNSVDLQNAAEMLXAKVKAVNFXEVNEENKNDLFQEVFSSIEXLAFXFGNILXNFLMGDVGNDSLLRLPVSREXKSFENVSVESVDSSSEKGNFSPLELDNVLLKNXDSIELALSYAKXWSKYXKNIVSWVEKKLNLELESXRNMVKLAEAXRXNIGIQEFMPLQSLFXNALLNDIESSHLLQQXIAALQANKFVQPLLGRKNEMEKQRKEIKELWKQEQNKMLEAENALKKAKLLCMQRQDEYEKAKSSMFRAEEEHLSSSGGLAKNLNKQLEKKRRLEEEALQKVEEANELYKVCVXNVEERRNDLENXKREILAQLRXLVFQCDLXLKAVXVNLFHMQHLQAASLADSLQSLCDSAKLYDPGQEYSEFVKAXNSXEEEKVDGNVNKHLNSSQPSGFGPANSLEDVVRLPDSSNKIEEDRCSNSADIXGPSFIRSWXFGMFSDSESXGGSSESRSLDSESISPGDFHRKLPRXPSSGXMSSADDLDEREPPSPSEXGPNSLGXFKKXLMSKAALXHKFRKLRSPXKCRDCEGIVVFQGVECEECLLVCHRKCLENLVIICGHQKLPGKIHLFGAEFXQVAKKEPDGIPFILKICASEIENRALCLQGIYRVCGNKIKXEKLCQALENGMHLVDISEFSSHDICDVLKLYLRQLPEPFILFRLYKEFIDLAKEIQHVNEEQEXKKNSLEDKKWPNMCIEINRILLKSKDLLRQLPASNFNSLHFLIVHLKRVVDHAEENKMNSKNLGVIFGPSLIRPRPXXAPIXISSLAEYSNQARLVEFLIXYSQKIFDGSLQPQDVMCSIGVVDQGCFPKPLLSPEERDIERSMKSLFFSSKEDIHXSESESKIFERAXSFEESERKQNALGKCDACLSDKAQLLLDQEAESASQKIEDGKXPKPLSLKSDRSXNNVERHXPRXKIRPEXLIQNYRVLHLQYVFCC

SEQ ID NO: 2825 - protein, 1261 aa, Homo sapiens
  MOD_RES (9)..(9): Selenocysteine
  MOD_RES (22)..(22): Selenocysteine
  MOD_RES (25)..(26): Selenocysteine
  MOD_RES (109)..(109): Selenocysteine
  MOD_RES (118)..(118): Selenocysteine
  MOD_RES (138)..(138): Selenocysteine
  MOD_RES (142)..(142): Selenocysteine
  MOD_RES (148)..(148): Selenocysteine
  MOD_RES (169)..(169): Selenocysteine
  MOD_RES (202)..(202): Selenocysteine
  MOD_RES (214)..(214): Selenocysteine
  MOD_RES (219)..(219): Selenocysteine
  MOD_RES (237)..(237): Selenocysteine
  MOD_RES (247)..(247): Selenocysteine
  MOD_RES (249)..(249): Selenocysteine
  MOD_RES (264)..(264): Selenocysteine
  MOD_RES (280)..(280): Selenocysteine
  MOD_RES (394)..(394): Selenocysteine
  MOD_RES (406)..(406): Selenocysteine
  MOD_RES (416)..(416): Selenocysteine
  MOD_RES (424)..(424): Selenocysteine
  MOD_RES (429)..(429): Selenocysteine
  MOD_RES (470)..(470): Selenocysteine
  MOD_RES (473)..(473): Selenocysteine
  MOD_RES (525)..(525): Selenocysteine
  MOD_RES (534)..(534): Selenocysteine
  MOD_RES (544)..(544): Selenocysteine
  MOD_RES (570)..(570): Selenocysteine
  MOD_RES (575)..(575): Selenocysteine
  MOD_RES (593)..(593): Selenocysteine
  MOD_RES (600)..(600): Selenocysteine
  MOD_RES (604)..(604): Selenocysteine
  MOD_RES (612)..(612): Selenocysteine
  MOD_RES (622)..(622): Selenocysteine
  MOD_RES (674)..(674): Selenocysteine
  MOD_RES (715)..(715): Selenocysteine
  MOD_RES (779)..(779): Selenocysteine
  MOD_RES (856)..(857): Selenocysteine
  MOD_RES (861)..(861): Selenocysteine
  MOD_RES (880)..(880): Selenocysteine
  MOD_RES (936)..(936): Selenocysteine
  MOD_RES (948)..(948): Selenocysteine
  MOD_RES (991)..(991): Selenocysteine
  MOD_RES (1003)..(1003): Selenocysteine
  MOD_RES (1010)..(1010): Selenocysteine
  MOD_RES (1013)..(1013): Selenocysteine
  MOD_RES (1063)..(1064): Selenocysteine
  MOD_RES (1076)..(1076): Selenocysteine
  MOD_RES (1091)..(1091): Selenocysteine
  MOD_RES (1094)..(1095): Selenocysteine
  MOD_RES (1108)..(1109): Selenocysteine
  MOD_RES (1122)..(1122): Selenocysteine
  MOD_RES (1157)..(1157): Selenocysteine
  MOD_RES (1164)..(1165): Selenocysteine
  MOD_RES (1194)..(1194): Selenocysteine
  MOD_RES (1220)..(1220): Selenocysteine
MIAHKQKKXKKKRAWASGQLSXDIXXSEMGLKSLSSNSIFDPDYIKELVNDIRKFSHMLLYLKEAIFSDCFKEVIHIRLEELLRVLKSIMNKHQNLNSVDLQNAAEMLXAKVKAVNFXEVNEENKNDLFQEVFSSIEXLAFXFGNILXNFLMGDVGNDSLLRLPVSREXKSFENVSVESVDSSSEKGNFSPLELDNVLLKNXDSIELALSYAKXWSKYXKNIVSWVEKKLNLELESXRNMVKLAEAXRXNIGIQEFMPLQSLFXNALLNDIESSHLLQQXIAALQANKFVQPLLGRKNEMEKQRKEIKELWKQEQNKMLEAENALKKAKLLCMQRQDEYEKAKSSMFRAEEEHLSSSGGLAKNLNKQLEKKRRLEEEALQKVEEANELYKVCVXNVEERRNDLENXKREILAQLRXLVFQCDLXLKAVXVNLFHMQHLQAASLADSLQSLCDSAKLYDPGQEYSEFVKAXNSXEEEKVDGNVNKHLNSSQPSGFGPANSLEDVVRLPDSSNKIEEDRCSNSADIXGPSFIRSWXFGMFSDSESXGGSSESRSLDSESISPGDFHRKLPRXPSSGXMSSADDLDEREPPSPSEXGPNSLGXFKKXLMSKAALXHKFRKLRSPXKCRDCEGIVVFQGVECEECLLVCHRKCLENLVIICGHQKLPGKIHLFGAEFXQVAKKEPDGIPFILKICASEIENRALCLQGIYRVCGNKIKXEKLCQALENGMHLVDISEFSSHDICDVLKLYLRQLPEPFILFRLYKEFIDLAKEIQHVNEEQEXKKNSLEDKKWPNMCIEINRILLKSKDLLRQLPASNFNSLHFLIVHLKRVVDHAEENKMNSKNLGVIFGPSLIRPRPXXAPIXISSLAEYSNQARLVEFLIXYSQKIFDGSLQPQDVMCSIGVVDQGCFPKPLLSPEERDIERSMKSLFFSSKEDIHXSESESKIFERAXSFEESERKQNALGKCDACLSDKAQLLLDQEAESASQKIEDGKXPKPLSLKSDRSXNNVERHXPRXKIRPVSLPVDRLLLASPPNERNGRNMGNVNLDKFCKNPAFEGVNRKDAAXXVCSKFNGFDQQXLQKIQDKQYEQNSLXAKXXMIMPSALQEKGVXXSLQISGDHSINAXQPSKPYAEPVRSVREASERRSSDSYPLAPVRAPRXLQPQHWXXFYKPHAPIISIRGNEEKPASPSAAVPPGXDHDPHGLVVKSMPDPDKASACPGQAXGQPKEDSEELGLPDVNPMCQRPRLKRMQQFEDLEGEIPQFV

SEQ ID NO: 2826 - protein, 924 aa, Homo sapiens
  MOD_RES (14)..(14): Selenocysteine
  MOD_RES (32)..(32): Selenocysteine
  MOD_RES (58)..(58): Selenocysteine
  MOD_RES (94)..(94): Selenocysteine
  MOD_RES (125)..(125): Selenocysteine
  MOD_RES (144)..(144): Selenocysteine
  MOD_RES (205)..(205): Selenocysteine
  MOD_RES (211)..(211): Selenocysteine
  MOD_RES (248)..(248): Selenocysteine
  MOD_RES (267)..(267): Selenocysteine
  MOD_RES (504)..(504): Selenocysteine
  MOD_RES (524)..(524): Selenocysteine
  MOD_RES (536)..(536): Selenocysteine
  MOD_RES (566)..(566): Selenocysteine
  MOD_RES (650)..(650): Selenocysteine
  MOD_RES (683)..(683): Selenocysteine
  MOD_RES (750)..(750): Selenocysteine
  MOD_RES (797)..(797): Selenocysteine
  MOD_RES (833)..(833): Selenocysteine
  MOD_RES (841)..(841): Selenocysteine
  MOD_RES (843)..(843): Selenocysteine
  MOD_RES (845)..(845): Selenocysteine
  MOD_RES (856)..(856): Selenocysteine
  MOD_RES (914)..(914): Selenocysteine
MKSKDIEASGFNGXAAFMEVRVQSIVVEFILXHVDQLFGGAALSGGEVESGWRSLPGXRASGSPEDLMPRPLPYHLPSILQAGDGPPQMRPYHXIIEIAEHKRKGSLKVRKWRSIFNLGRSGHEXKRKLPRGAEDREDKSNKGXLRPAKSMDSLSAAAGASDEPEGLVGPSSPRPSPLLPESLENDSIEAAEGEQEPEAEALGGXNSEPGXPRAGRSAIRAGGSSRAERCAGVHISDPYNVNLPLHIXSILSVPPNIISNVSLARLXRGLECPALQHRPSPASGPGPGPGLGPGPPDEKLEASPASSPLADSGPDDLAPALEDSLSQEVQDSFSFLEDSSSSEPEWVGAEDGEVAQAEAAGAAFSPGEDDPGMGYLEELLGVGPQVEEFSVEPPLDDLSLDEAQFVLAPSCCSLDSAGPRPEVEEENGEEVFLSAYDDLSPLLGPKPPIWKGSGSLEGEAAGCGRQALGQGGEEQACWEVGEDKQAEPGGRLDIREEAEGSPEXKVEAGKASEDRGEAGGSQEXKVRLREGSREEXEAKEEKSKGQKKADSMEAKGVEEPGGDEYXDEKEKEIEREEDEQREEAQVEAGRDLEQGAQEDQVAEEKWEVVQKQEAEGVREDEDKGQREKGYHEARKDQGDGEDSRSPEAAXEGGAGEVSKERESGDGEAEGDQRAGGYYLEEDXLSEGSGVASLEVDCAKEGNPHSSEMEEVAPQPPQPEEMEPEGQPSPDGCLCPCSLGLGGVGMRLASXLVQVQQVRSVPVVPPKPQFAKMPSAMCSKIHVAPANPCPRPGRLDGXPGERAWGSRASRSSWRNGGSLSFDAAVALARDRQRXEAQGVRRXQXCXEGGDYCLIPRXSPCSMISAHSPRPLSCLELPSEGAEGSGSRSRLSLPPREPQVPDPLLSSQRRSYAFEXQANPGKGEGL

SEQ ID NO: 2827 - protein, 41 aa, Homo sapiens
  MOD_RES (41)..(41): Selenocysteine
MKSRQKGKKKGSAKERVFGCDLQEHLQHSGQEGGCRSAIGX

SEQ ID NO: 2828 - protein, 63 aa, Homo sapiens
  MOD_RES (38)..(38): Selenocysteine
MKSRQKGKKKGSAKERVFGCDLQEHLQHSGQEGSHSVXQQARVRLPAALASWAQVILPYQPPE

SEQ ID NO: 2829 - protein, 890 aa, Homo sapiens
  MOD_RES (107)..(107): Selenocysteine
  MOD_RES (144)..(144): Selenocysteine
  MOD_RES (162)..(162): Selenocysteine
  MOD_RES (191)..(191): Selenocysteine
  MOD_RES (209)..(209): Selenocysteine
  MOD_RES (235)..(235): Selenocysteine
  MOD_RES (271)..(271): Selenocysteine
  MOD_RES (302)..(302): Selenocysteine
  MOD_RES (321)..(321): Selenocysteine
  MOD_RES (382)..(382): Selenocysteine
  MOD_RES (388)..(388): Selenocysteine
  MOD_RES (425)..(425): Selenocysteine
  MOD_RES (444)..(444): Selenocysteine
  MOD_RES (678)..(678): Selenocysteine
  MOD_RES (716)..(716): Selenocysteine
  MOD_RES (763)..(763): Selenocysteine
  MOD_RES (799)..(799): Selenocysteine
  MOD_RES (807)..(807): Selenocysteine
  MOD_RES (809)..(809): Selenocysteine
  MOD_RES (811)..(811): Selenocysteine
  MOD_RES (822)..(822): Selenocysteine
  MOD_RES (880)..(880): Selenocysteine
MKSRQKGKKKGSAKERVFGCDLQEHLQHSGQEVPQVLKSCAEFVEEYGVVDGIYRLSGVSSNIQKLRQEFESERKPDLRRDVYLQDIHCVSSLCKAYFRELPDPLLXYRLYDKFAEAVGVQLEPERLVKILEVLRELPVPNYRXLEFLMRHLVHMASFSAQXNMHARNLAIVWAPNLLRSKDIEASGFNGXAAFMEVRVQSIVVEFILXHVDQLFGGAALSGGEVESGWRSLPGXRASGSPEDLMPRPLPYHLPSILQAGDGPPQMRPYHXIIEIAEHKRKGSLKVRKWRSIFNLGRSGHEXKRKLPRGAEDREDKSNKGXLRPAKSMDSLSAAAGASDEPEGLVGPSSPRPSPLLPESLENDSIEAAEGEQEPEAEALGGXNSEPGXPRAGRSAIRAGGSSRAERCAGVHISDPYNVNLPLHIXSILSVPPNIISNVSLARLXRGLECPALQHRPSPASGPGPGPGLGPGPPDEKLEASPASSPLADSGPDDLAPALEDSLSQEVQDSFSFLEDSSSSEPEWVGAEDGEVAQAEAAGAAFSPGEDDPGMGYLEELLGVGPQVEEFSVEPPLDDLSLDEAQFVLAPSCCSLDSAGPRPEVEEENGEEVFLSAYDDLSPLLGPKPPIWKGSGSLEGEAAGCGRQALGQGGEEQACWEVGEDKQAEPGGRLDIREEAEGXPQPPQPEEMEPEGQPSPDGCLCPCSLGLGGVGMRLASXLVQVQQVRSVPVVPPKPQFAKMPSAMCSKIHVAPANPCPRPGRLDGXPGERAWGSRASRSSWRNGGSLSFDAAVALARDRQRXEAQGVRRXQXCXEGGDYCLIPRXSPCSMISAHSPRPLSCLELPSEGAEGSGSRSRLSLPPREPQVPDPLLSSQRRSYAFEXQANPGKGEGL

SEQ ID NO: 2830 - protein, 1101 aa, Homo sapiens
  MOD_RES (107)..(107): Selenocysteine
  MOD_RES (144)..(144): Selenocysteine
  MOD_RES (162)..(162): Selenocysteine
  MOD_RES (191)..(191): Selenocysteine
  MOD_RES (209)..(209): Selenocysteine
  MOD_RES (235)..(235): Selenocysteine
  MOD_RES (271)..(271): Selenocysteine
  MOD_RES (302)..(302): Selenocysteine
  MOD_RES (321)..(321): Selenocysteine
  MOD_RES (382)..(382): Selenocysteine
  MOD_RES (388)..(388): Selenocysteine
  MOD_RES (425)..(425): Selenocysteine
  MOD_RES (444)..(444): Selenocysteine
  MOD_RES (681)..(681): Selenocysteine
  MOD_RES (701)..(701): Selenocysteine
  MOD_RES (713)..(713): Selenocysteine
  MOD_RES (743)..(743): Selenocysteine
  MOD_RES (827)..(827): Selenocysteine
  MOD_RES (860)..(860): Selenocysteine
  MOD_RES (927)..(927): Selenocysteine
  MOD_RES (974)..(974): Selenocysteine
  MOD_RES (1010)..(1010): Selenocysteine
  MOD_RES (1018)..(1018): Selenocysteine
  MOD_RES (1020)..(1020): Selenocysteine
  MOD_RES (1022)..(1022): Selenocysteine
  MOD_RES (1033)..(1033): Selenocysteine
  MOD_RES (1091)..(1091): Selenocysteine
MKSRQKGKKKGSAKERVFGCDLQEHLQHSGQEVPQVLKSCAEFVEEYGVVDGIYRLSGVSSNIQKLRQEFESERKPDLRRDVYLQDIHCVSSLCKAYFRELPDPLLXYRLYDKFAEAVGVQLEPERLVKILEVLRELPVPNYRXLEFLMRHLVHMASFSAQXNMHARNLAIVWAPNLLRSKDIEASGFNGXAAFMEVRVQSIVVEFILXHVDQLFGGAALSGGEVESGWRSLPGXRASGSPEDLMPRPLPYHLPSILQAGDGPPQMRPYHXIIEIAEHKRKGSLKVRKWRSIFNLGRSGHEXKRKLPRGAEDREDKSNKGXLRPAKSMDSLSAAAGASDEPEGLVGPSSPRPSPLLPESLENDSIEAAEGEQEPEAEALGGXNSEPGXPRAGRSAIRAGGSSRAERCAGVHISDPYNVNLPLHIXSILSVPPNIISNVSLARLXRGLECPALQHRPSPASGPGPGPGLGPGPPDEKLEASPASSPLADSGPDDLAPALEDSLSQEVQDSFSFLEDSSSSEPEWVGAEDGEVAQAEAAGAAFSPGEDDPGMGYLEELLGVGPQVEEFSVEPPLDDLSLDEAQFVLAPSCCSLDSAGPRPEVEEENGEEVFLSAYDDLSPLLGPKPPIWKGSGSLEGEAAGCGRQALGQGGEEQACWEVGEDKQAEPGGRLDIREEAEGSPEXKVEAGKASEDRGEAGGSQEXKVRLREGSREEXEAKEEKSKGQKKADSMEAKGVEEPGGDEYXDEKEKEIEREEDEQREEAQVEAGRDLEQGAQEDQVAEEKWEVVQKQEAEGVREDEDKGQREKGYHEARKDQGDGEDSRSPEAAXEGGAGEVSKERESGDGEAEGDQRAGGYYLEEDXLSEGSGVASLEVDCAKEGNPHSSEMEEVAPQPPQPEEMEPEGQPSPDGCLCPCSLGLGGVGMRLASXLVQVQQVRSVPVVPPKPQFAKMPSAMCSKIHVAPANPCPRPGRLDGXPGERAWGSRASRSSWRNGGSLSFDAAVALARDRQRXEAQGVRRXQXCXEGGDYCLIPRXSPCSMISAHSPRPLSCLELPSEGAEGSGSRSRLSLPPREPQVPDPLLSSQRRSYAFEXQANPGKGEGL

SEQ ID NO: 2831 - protein, 69 aa, Homo sapiens
MKSRQKGKKKGSAKERVFGCDLQEHLQHSGQEVPQVLKSCAEFVEEYGVVDGIYRLSGVSSNIQKLRRL

SEQ ID NO: 2832 - protein, 165 aa, Homo sapiens
  MOD_RES (18)..(18): Selenocysteine
  MOD_RES (32)..(32): Selenocysteine
  MOD_RES (51)..(51): Selenocysteine
  MOD_RES (79)..(79): Selenocysteine
  MOD_RES (87)..(87): Selenocysteine
  MOD_RES (116)..(116): Selenocysteine
  MOD_RES (134)..(134): Selenocysteine
  MOD_RES (158)..(158): Selenocysteine
MCHLVPYVLKSCAEFIEXHGIVDGIYRLSGVXSNIQRLRQEFGSDQCPDLXREVYLQDIHCVGSLCKLYFRELPNPLLXYELYEKFXEAVSHCPEEGQLARIQNVIQELPPSHYRXLEYLIRHLAHIASFSSKXNMHARNLALVWAPNLLRSKEIEAXGCNGDAA

SEQ ID NO: 2833 - protein, 1444 aa, Homo sapiens
  MOD_RES (24)..(24): Selenocysteine
  MOD_RES (47)..(47): Selenocysteine
  MOD_RES (61)..(61): Selenocysteine
  MOD_RES (80)..(80): Selenocysteine
  MOD_RES (108)..(108): Selenocysteine
  MOD_RES (116)..(116): Selenocysteine
  MOD_RES (145)..(145): Selenocysteine
  MOD_RES (163)..(163): Selenocysteine
  MOD_RES (187)..(187): Selenocysteine
  MOD_RES (237)..(237): Selenocysteine
  MOD_RES (260)..(260): Selenocysteine
  MOD_RES (282)..(282): Selenocysteine
  MOD_RES (286)..(286): Selenocysteine
  MOD_RES (340)..(340): Selenocysteine
  MOD_RES (360)..(360): Selenocysteine
  MOD_RES (367)..(367): Selenocysteine
  MOD_RES (369)..(370): Selenocysteine
  MOD_RES (378)..(378): Selenocysteine
  MOD_RES (383)..(383): Selenocysteine
  MOD_RES (385)..(385): Selenocysteine
  MOD_RES (392)..(392): Selenocysteine
  MOD_RES (446)..(446): Selenocysteine
  MOD_RES (456)..(456): Selenocysteine
  MOD_RES (467)..(467): Selenocysteine
  MOD_RES (504)..(504): Selenocysteine
  MOD_RES (507)..(507): Selenocysteine
  MOD_RES (511)..(511): Selenocysteine
  MOD_RES (546)..(546): Selenocysteine
  MOD_RES (569)..(569): Selenocysteine
  MOD_RES (589)..(589): Selenocysteine
  MOD_RES (625)..(625): Selenocysteine
  MOD_RES (679)..(679): Selenocysteine
  MOD_RES (713)..(713): Selenocysteine
  MOD_RES (719)..(719): Selenocysteine
  MOD_RES (727)..(727): Selenocysteine
  MOD_RES (732)..(732): Selenocysteine
  MOD_RES (768)..(768): Selenocysteine
  MOD_RES (789)..(789): Selenocysteine
  MOD_RES (795)..(795): Selenocysteine
  MOD_RES (815)..(815): Selenocysteine
  MOD_RES (840)..(840): Selenocysteine
  MOD_RES (865)..(865): Selenocysteine
  MOD_RES (879)..(879): Selenocysteine
  MOD_RES (893)..(893): Selenocysteine
  MOD_RES (895)..(895): Selenocysteine
  MOD_RES (915)..(915): Selenocysteine
  MOD_RES (922)..(922): Selenocysteine
  MOD_RES (960)..(960): Selenocysteine
  MOD_RES (966)..(966): Selenocysteine
  MOD_RES (980)..(980): Selenocysteine
  MOD_RES (997)..(997): Selenocysteine
  MOD_RES (1035)..(1035): Selenocysteine
  MOD_RES (1048)..(1048): Selenocysteine
  MOD_RES (1079)..(1079): Selenocysteine
  MOD_RES (1093)..(1093): Selenocysteine
  MOD_RES (1143)..(1143): Selenocysteine
  MOD_RES (1146)..(1146): Selenocysteine
  MOD_RES (1173)..(1173): Selenocysteine
  MOD_RES (1188)..(1188): Selenocysteine
  MOD_RES (1210)..(1210): Selenocysteine
  MOD_RES (1239)..(1239): Selenocysteine
  MOD_RES (1242)..(1243): Selenocysteine
  MOD_RES (1278)..(1278): Selenocysteine
  MOD_RES (1287)..(1287): Selenocysteine
  MOD_RES (1300)..(1300): Selenocysteine
  MOD_RES (1314)..(1314): Selenocysteine
  MOD_RES (1365)..(1365): Selenocysteine
  MOD_RES (1367)..(1367): Selenocysteine
  MOD_RES (1380)..(1380): Selenocysteine
  MOD_RES (1382)..(1382): Selenocysteine
  MOD_RES (1396)..(1396): Selenocysteine
  MOD_RES (1399)..(1399): Selenocysteine
  MOD_RES (1404)..(1404): Selenocysteine
  MOD_RES (1410)..(1410): Selenocysteine
  MOD_RES (1420)..(1420): Selenocysteine
  MOD_RES (1422)..(1422): Selenocysteine
MKNKGAKQKLKRKGAASAFGCDLXEYLESSGQDVPYVLKSCAEFIEXHGIVDGIYRLSGVXSNIQRLRQEFGSDQCPDLXREVYLQDIHCVGSLCKLYFRELPNPLLXYELYEKFXEAVSHCPEEGQLARIQNVIQELPPSHYRXLEYLIRHLAHIASFSSKXNMHARNLALVWAPNLLRSKEIEAXGCNGDAAFLAVRVQQVVIEFILNHVDQIFNNGAPGSLENDENRPIMKSLXLPALSLPMKLVSLEEAQARSLAXNHPARKERRENSLPEIVPPMGXLFHXVLELPDNKRKLSSKSKKWKSIFNLGRSGSDSKSKLSRNGSVFVRGQRLSVEKAXIRPAKSMDSLCSVPVEGKEXKGNFNRXVXXGGFFIPAXKMHSXGXGSSCDLXKQEGEWGQEGMPPGAEGGFDVSSDRSHLQGAQARPPPEQLKVFRPVEDPESEQXAPKMLGMFYXSNDSPSKSVFXSSLFQMEPSPRNQRKALNISEPFAVSVPLRVSAVISXNSXPCRXPPKELQSLSSLEEFSFHGSESGGWPEEEKPLGAEXSAASVPKKAGLEDAKAVPEAPGXVECSKGLSQEPGAHLEEKKXPESSLSSQHLNELEKRPNPEKVVEEGREAGEMESSXLQESPRARAEAVLLHEMDEDDLANALIWPEIQQELKIIESEEELSSLPPPALKXSPIQPILESSLGPFIPSEPPGSLPCGSFPAPVSXPLEVWXRDPANQSXQGASXAASREKPEPEQGLHPDLASLAPLEIVPFEKASPQAXVEVGGPGNLSPPLPPAPPPPXPLEESXPVLLSKGGPEREDSSRKLRXDLYIDQLKSQDSPEISSLCQGEEAXPRHSDKQNSKNAASEGKGCGFPSPXREVEIVSQEEEDVXHSVQEPSDCDEDDXVXDIAQHGLEMVEPWEEPQWVXSPLHSPXLKDAHKAQVQGLQGHQLEKRLSHRPSLRQSHSLDSKPXVKSQWXLEVPSSSSCANLEXERNSDPLQPQAPRREIXGWDEKALRSFREFSGLKGAEAPPNQKGPSGVQPNPAEXSPISLAEGKELGXHLGHSSPQIRQGGVPGPESSKESSPSVQDSXSPGEHPAKLQLKSXECGPPKGKNRPSSLNLDPAIPIADLFWFENVASFSSPGMQVSEPGDPKVXWMXSSYCKADPWRVYSQDPQDLDIVAHALXGRRNSAPVSVSAVRXSFMVKMCQARAVPVIPPKIQYXQIPQPLPSQSSGENGVQPLERSQEGPSSXSGXXQKPAKDDSPSSLESSKEEKPKQDPGAIKSSPVDAXAPCMCEGPXLSPEPGSSNLLSXQDAVVQCRKRMSEXEPSGDNLLSSKLERPSGGSKPFHRSRPGRPQSLILFSPPFPIMDHLPPSSXVXDSKVLLSPIRSPXQXVSPGLLCGELAENXWVXPEGVXLRNKMXIPKNGQRLEXSXSCFYQPQRRSVILDGRSGRQIE

SEQ ID NO: 2834 - protein, 946 aa, Homo sapiens
  MOD_RES (15)..(15): Selenocysteine
  MOD_RES (18)..(18): Selenocysteine
  MOD_RES (22)..(22): Selenocysteine
  MOD_RES (36)..(36): Selenocysteine
  MOD_RES (129)..(129): Selenocysteine
  MOD_RES (138)..(138): Selenocysteine
  MOD_RES (163)..(163): Selenocysteine
  MOD_RES (184)..(184): Selenocysteine
  MOD_RES (197)..(197): Selenocysteine
  MOD_RES (205)..(205): Selenocysteine
  MOD_RES (224)..(224): Selenocysteine
  MOD_RES (254)..(254): Selenocysteine
  MOD_RES (270)..(270): Selenocysteine
  MOD_RES (274)..(274): Selenocysteine
  MOD_RES (281)..(281): Selenocysteine
  MOD_RES (319)..(319): Selenocysteine
  MOD_RES (357)..(357): Selenocysteine
  MOD_RES (385)..(385): Selenocysteine
  MOD_RES (400)..(400): Selenocysteine
  MOD_RES (422)..(422): Selenocysteine
  MOD_RES (440)..(440): Selenocysteine
  MOD_RES (469)..(469): Selenocysteine
  MOD_RES (521)..(521): Selenocysteine
  MOD_RES (525)..(525): Selenocysteine
  MOD_RES (533)..(533): Selenocysteine
  MOD_RES (543)..(543): Selenocysteine
  MOD_RES (563)..(563): Selenocysteine
  MOD_RES (626)..(626): Selenocysteine
  MOD_RES (637)..(637): Selenocysteine
  MOD_RES (764)..(764): Selenocysteine
  MOD_RES (771)..(771): Selenocysteine
  MOD_RES (775)..(775): Selenocysteine
  MOD_RES (793)..(793): Selenocysteine
  MOD_RES (799)..(799): Selenocysteine
  MOD_RES (810)..(810): Selenocysteine
  MOD_RES (840)..(840): Selenocysteine
  MOD_RES (851)..(851): Selenocysteine
  MOD_RES (855)..(856): Selenocysteine
  MOD_RES (864)..(864): Selenocysteine
  MOD_RES (875)..(875): Selenocysteine
  MOD_RES (880)..(880): Selenocysteine
  MOD_RES (887)..(887): Selenocysteine
  MOD_RES (890)..(890): Selenocysteine
  MOD_RES (934)..(934): Selenocysteine
  MOD_RES (936)..(936): Selenocysteine
  MOD_RES (938)..(938): Selenocysteine
MARGADVPEIPGDLXLKXCGSXASMKVKHVKKLPFXKGHFPKMAECAHFHYENVEFGSIQLSLSEEQNEVMKNGCESKELVYLVQIACQGKSWIVKRSYEDFRVLDKHLHLCIYDRRFSQLSELPRSDXLKDSPESVXQMLMAYLSRLSAIAGNKINCGPALXWMEIDNKGNHLLVHEESSINXPAVGAAHVIKRYXARAPDELXLEVGDIVSVIDMPPKVLSXWWRGKHGFQVGLFPGHCVELINQKVPQSVXNSVPKPVSKKHGKLIXFLRXFMKSRPXKQKLKQRGILKERVFGCDLGEHLLNSGFEVPQVLQSCXAFIERYGIVDGIYRLSGVASNIQRLRHEFDSEHVPDLXKEPYVQDIHSVGSLCKLYFRELPNPLLXYQLYEKFSDAVSAAXDEERLIKIHDVIQQLPPPHYRXLEFLMRHLSLLADYCSIXNMHAKNLAIVWAPNLLRSKQIESACFSGXAAFMEVRIQSVVVEFILNHVDVLFSGRISMAMQEGAASLSRPKSLLVSSPSXKLLXLEEAQARXQAQVNSPIVXENKYIEVGEGPAALQGKFHXIIEFPLERKRPQNKMKKSPVGSWRSFFNLGKSSSVSKRKLQRNESEPSEMKAMALKGGRAEGXLRSAKSEESLXSLHAVDGDSKLFRPRRPRSSSDALSASFNGEMLGNRCNSYDNLPHDNESEEEGGLLHIPALMSPHSAEDVDLSPPDIGVASLDFDPMSFQCSPPKAESECLESGASFLDSPGYSKDKPSANKKDAEXGSSQCQXPGSXASSEPVSPLQEKLSPFFXLDLSPXEDKSSKPSSFXEKVVYAFSPKIGRKLSKSPSMSISEPISVXLPPRVSEVIGXVSNXXAQNASSSXWDKCVEERDAXNRSPXQIVKMKXNEXVAQEAYESEVQPLDQVAAEEVELPGKEDQSVSSSQSKAVASGQXQXGXVCFPPFFL

SEQ ID NO: 2835 - protein, 2087 aa, Homo sapiens
  MOD_RES (3)..(3): Selenocysteine
  MOD_RES (9)..(9): Selenocysteine
  MOD_RES (27)..(27): Selenocysteine
  MOD_RES (71)..(71): Selenocysteine
  MOD_RES (89)..(89): Selenocysteine
  MOD_RES (92)..(92): Selenocysteine
  MOD_RES (96)..(96): Selenocysteine
  MOD_RES (110)..(110): Selenocysteine
  MOD_RES (203)..(203): Selenocysteine
  MOD_RES (212)..(212): Selenocysteine
  MOD_RES (237)..(237): Selenocysteine
  MOD_RES (258)..(258): Selenocysteine
  MOD_RES (271)..(271): Selenocysteine
  MOD_RES (279)..(279): Selenocysteine
  MOD_RES (298)..(298): Selenocysteine
  MOD_RES (328)..(328): Selenocysteine
  MOD_RES (344)..(344): Selenocysteine
  MOD_RES (348)..(348): Selenocysteine
  MOD_RES (355)..(355): Selenocysteine
  MOD_RES (393)..(393): Selenocysteine
  MOD_RES (431)..(431): Selenocysteine
  MOD_RES (459)..(459): Selenocysteine
  MOD_RES (474)..(474): Selenocysteine
  MOD_RES (496)..(496): Selenocysteine
  MOD_RES (514)..(514): Selenocysteine
  MOD_RES (543)..(543): Selenocysteine
  MOD_RES (595)..(595): Selenocysteine
  MOD_RES (599)..(599): Selenocysteine
  MOD_RES (607)..(607): Selenocysteine
  MOD_RES (617)..(617): Selenocysteine
  MOD_RES (637)..(637): Selenocysteine
  MOD_RES (700)..(700): Selenocysteine
  MOD_RES (711)..(711): Selenocysteine
  MOD_RES (838)..(838): Selenocysteine
  MOD_RES (845)..(845): Selenocysteine
  MOD_RES (849)..(849): Selenocysteine
  MOD_RES (867)..(867): Selenocysteine
  MOD_RES (873)..(873): Selenocysteine
  MOD_RES (884)..(884): Selenocysteine
  MOD_RES (914)..(914): Selenocysteine
  MOD_RES (925)..(925): Selenocysteine
  MOD_RES (929)..(930): Selenocysteine
  MOD_RES (938)..(938): Selenocysteine
  MOD_RES (949)..(949): Selenocysteine
  MOD_RES (954)..(954): Selenocysteine
  MOD_RES (961)..(961): Selenocysteine
  MOD_RES (964)..(964): Selenocysteine
  MOD_RES (1008)..(1008): Selenocysteine
  MOD_RES (1010)..(1010): Selenocysteine
  MOD_RES (1014)..(1014): Selenocysteine
  MOD_RES (1056)..(1056): Selenocysteine
  MOD_RES (1064)..(1064): Selenocysteine
  MOD_RES (1070)..(1070): Selenocysteine
  MOD_RES (1079)..(1080): Selenocysteine
  MOD_RES (1100)..(1100): Selenocysteine
  MOD_RES (1124)..(1125): Selenocysteine
  MOD_RES (1127)..(1127): Selenocysteine
  MOD_RES (1131)..(1131): Selenocysteine
  MOD_RES (1135)..(1136): Selenocysteine
  MOD_RES (1148)..(1148): Selenocysteine
  MOD_RES (1167)..(1167): Selenocysteine
  MOD_RES (1194)..(1194): Selenocysteine
  MOD_RES (1236)..(1236): Selenocysteine
  MOD_RES (1256)..(1256): Selenocysteine
  MOD_RES (1258)..(1258): Selenocysteine
  MOD_RES (1260)..(1260): Selenocysteine
  MOD_RES (1262)..(1262): Selenocysteine
  MOD_RES (1265)..(1267): Selenocysteine
  MOD_RES (1270)..(1270): Selenocysteine
  MOD_RES (1275)..(1275): Selenocysteine
  MOD_RES (1287)..(1288): Selenocysteine
  MOD_RES (1295)..(1295): Selenocysteine
  MOD_RES (1299)..(1299): Selenocysteine
  MOD_RES (1302)..(1302): Selenocysteine
  MOD_RES (1328)..(1328): Selenocysteine
  MOD_RES (1376)..(1376): Selenocysteine
  MOD_RES (1416)..(1416): Selenocysteine
  MOD_RES (1435)..(1435): Selenocysteine
  MOD_RES (1445)..(1445): Selenocysteine
  MOD_RES (1449)..(1449): Selenocysteine
  MOD_RES (1471)..(1471): Selenocysteine
  MOD_RES (1482)..(1483): Selenocysteine
  MOD_RES (1497)..(1497): Selenocysteine
  MOD_RES (1536)..(1536): Selenocysteine
  MOD_RES (1568)..(1568): Selenocysteine
  MOD_RES (1579)..(1579): Selenocysteine
  MOD_RES (1602)..(1602): Selenocysteine
  MOD_RES (1635)..(1635): Selenocysteine
  MOD_RES (1675)..(1675): Selenocysteine
  MOD_RES (1716)..(1716): Selenocysteine
  MOD_RES (1738)..(1738): Selenocysteine
  MOD_RES (1740)..(1740): Selenocysteine
  MOD_RES (1777)..(1777): Selenocysteine
  MOD_RES (1801)..(1801): Selenocysteine
  MOD_RES (1848)..(1848): Selenocysteine
  MOD_RES (1914)..(1914): Selenocysteine
  MOD_RES (1974)..(1974): Selenocysteine
  MOD_RES (1994)..(1994): Selenocysteine
  MOD_RES (2018)..(2018): Selenocysteine
  MOD_RES (2047)..(2047): Selenocysteine
  MOD_RES (2060)..(2060): Selenocysteine
  MOD_RES (2063)..(2063): Selenocysteine
  MOD_RES (2082)..(2082): Selenocysteine
MEXESESSXLGDDSVFWLESEVIIQVXDCEEEEREEKFRKMKSSVHSEEDDFVPELHRNVHPRERPDWEEXLSAMARGADVPEIPGDLXLKXCGSXASMKVKHVKKLPFXKGHFPKMAECAHFHYENVEFGSIQLSLSEEQNEVMKNGCESKELVYLVQIACQGKSWIVKRSYEDFRVLDKHLHLCIYDRRFSQLSELPRSDXLKDSPESVXQMLMAYLSRLSAIAGNKINCGPALXWMEIDNKGNHLLVHEESSINXPAVGAAHVIKRYXARAPDELXLEVGDIVSVIDMPPKVLSXWWRGKHGFQVGLFPGHCVELINQKVPQSVXNSVPKPVSKKHGKLIXFLRXFMKSRPXKQKLKQRGILKERVFGCDLGEHLLNSGFEVPQVLQSCXAFIERYGIVDGIYRLSGVASNIQRLRHEFDSEHVPDLXKEPYVQDIHSVGSLCKLYFRELPNPLLXYQLYEKFSDAVSAAXDEERLIKIHDVIQQLPPPHYRXLEFLMRHLSLLADYCSIXNMHAKNLAIVWAPNLLRSKQIESACFSGXAAFMEVRIQSVVVEFILNHVDVLFSGRISMAMQEGAASLSRPKSLLVSSPSXKLLXLEEAQARXQAQVNSPIVXENKYIEVGEGPAALQGKFHXIIEFPLERKRPQNKMKKSPVGSWRSFFNLGKSSSVSKRKLQRNESEPSEMKAMALKGGRAEGXLRSAKSEESLXSLHAVDGDSKLFRPRRPRSSSDALSASFNGEMLGNRCNSYDNLPHDNESEEEGGLLHIPALMSPHSAEDVDLSPPDIGVASLDFDPMSFQCSPPKAESECLESGASFLDSPGYSKDKPSANKKDAEXGSSQCQXPGSXASSEPVSPLQEKLSPFFXLDLSPXEDKSSKPSSFXEKVVYAFSPKIGRKLSKSPSMSISEPISVXLPPRVSEVIGXVSNXXAQNASSSXWDKCVEERDAXNRSPXQIVKMKXNEXVAQEAYESEVQPLDQVAAEEVELPGKEDQSVSSSQSKAVASGQXQXGAVXHDPPQDSVPVSSVSLIPPPPPPKNVARMLALALAESAQQASXQSLKRPGXSQAGYXNYGDIAVAXXEDNLSSSYSAVALDKAYFQXDRPAEQFHLQNNAPGNCDHPLPEXXAXGDPXHSNXXESGEQHHQVDLXGNQPHQAYLSGDPEKARIXSVPLDSEKSDDHVSFPEDQSGKNSMPXVSFLDQDQSPPRFYSGDQPPSYLGASVDKLHHPLEFADKSPXPPNLPSDKIYPPSGSPEENXSXAXMXYMXXXPAXAQMSXKEASWDVAEQPXXADFAAAXLQRXHRXNRPLPPPPSQRSAEQPPVVGQVQAAXNIGLNNSHKVQGVVPVPERPPEPRAMDDPASAFISDSGAAAAQCPMAXAVQPGLPEKVRDGARVPLLHLRAESVPAHPCGFPAPLPPXRMMESKMIAAIHSSSADAXSSSNYHSFVXASSXSVDDALPLPLPVPQPKHASQKXVYSSFARPDVXXEPFGPDNCLHFNMXPNCQYRPQSVPPHHNKLEQHQVYGARSEPPASMGLRYNXYVAPGRNASGHHSKPCSRVEYVSSLSSSVRNXCYPEDIPPYPXIRRVQSLHAPPSSMIRSVPISRXEVPPDDEPAYCPRPLYQYKPYQSSQARSDYHVXQLQPYFENGRVHYRYSPYSSSSSSYYSPDGALCDVDAYGXVQLRPLHRLPNRDFAFYNPRLQGKSLYSYAGLAPRPRANVXGYFSPNDHNVVSMPPAADVKHXYXSWDLEDMEKYRMQSIRRESRARQKVKGPVMSQYDNMXPAVQDDLGGIYVIHLRSKSDPGKXGLLSVAEGKESRHAAKAISPEGEDRFYRRHPEAEMDRAHHHGGHGSXQPEKPSLPQKQSSLRSRKLPDMGCSLPEHRAHQEASHRQFCESKNGPPYPQGAGQLDYGSKGIPDXSEPVSYHNSGVKYAASGQESLRLNHKEVRLSKEMERPWVRQPSAPEKHSRDCYKEEEHLXQSIVPPPKPERSHSLKLHHXQNVERDPSVLYQYQPHGKRQSSVXVVSQYDNLEDYHSLPQHQRGVFGGGGMGXYVPPGFPHPQSRXYAXALGQGAFLPAELSLQHPEXQIHAE

SEQ ID NO: 2836 - protein, 1738 aa, Homo sapiens
  MOD_RES (6)..(6): Selenocysteine
  MOD_RES (44)..(44): Selenocysteine
  MOD_RES (82)..(82): Selenocysteine
  MOD_RES (110)..(110): Selenocysteine
  MOD_RES (125)..(125): Selenocysteine
  MOD_RES (147)..(147): Selenocysteine
  MOD_RES (165)..(165): Selenocysteine
  MOD_RES (194)..(194): Selenocysteine
  MOD_RES (246)..(246): Selenocysteine
  MOD_RES (250)..(250): Selenocysteine
  MOD_RES (258)..(258): Selenocysteine
  MOD_RES (268)..(268): Selenocysteine
  MOD_RES (288)..(288): Selenocysteine
  MOD_RES (351)..(351): Selenocysteine
  MOD_RES (362)..(362): Selenocysteine
  MOD_RES (489)..(489): Selenocysteine
  MOD_RES (496)..(496): Selenocysteine
  MOD_RES (500)..(500): Selenocysteine
  MOD_RES (518)..(518): Selenocysteine
  MOD_RES (524)..(524): Selenocysteine
  MOD_RES (535)..(535): Selenocysteine
  MOD_RES (565)..(565): Selenocysteine
  MOD_RES (576)..(576): Selenocysteine
  MOD_RES (580)..(581): Selenocysteine
  MOD_RES (589)..(589): Selenocysteine
  MOD_RES (600)..(600): Selenocysteine
  MOD_RES (605)..(605): Selenocysteine
  MOD_RES (612)..(612): Selenocysteine
  MOD_RES (615)..(615): Selenocysteine
  MOD_RES (659)..(659): Selenocysteine
  MOD_RES (661)..(661): Selenocysteine
  MOD_RES (665)..(665): Selenocysteine
  MOD_RES (707)..(707): Selenocysteine
  MOD_RES (715)..(715): Selenocysteine
  MOD_RES (721)..(721): Selenocysteine
  MOD_RES (730)..(731): Selenocysteine
  MOD_RES (751)..(751): Selenocysteine
  MOD_RES (775)..(776): Selenocysteine
  MOD_RES (778)..(778): Selenocysteine
  MOD_RES (782)..(782): Selenocysteine
  MOD_RES (786)..(787): Selenocysteine
  MOD_RES (799)..(799): Selenocysteine
  MOD_RES (818)..(818): Selenocysteine
  MOD_RES (845)..(845): Selenocysteine
  MOD_RES (887)..(887): Selenocysteine
  MOD_RES (907)..(907): Selenocysteine
  MOD_RES (909)..(909): Selenocysteine
  MOD_RES (911)..(911): Selenocysteine
  MOD_RES (913)..(913): Selenocysteine
  MOD_RES (916)..(918): Selenocysteine
  MOD_RES (921)..(921): Selenocysteine
  MOD_RES (926)..(926): Selenocysteine
  MOD_RES (938)..(939): Selenocysteine
  MOD_RES (946)..(946): Selenocysteine
  MOD_RES (950)..(950): Selenocysteine
  MOD_RES (953)..(953): Selenocysteine
  MOD_RES (979)..(979): Selenocysteine
  MOD_RES (1027)..(1027): Selenocysteine
  MOD_RES (1067)..(1067): Selenocysteine
  MOD_RES (1086)..(1086): Selenocysteine
  MOD_RES (1096)..(1096): Selenocysteine
  MOD_RES (1100)..(1100): Selenocysteine
  MOD_RES (1122)..(1122): Selenocysteine
  MOD_RES (1133)..(1134): Selenocysteine
  MOD_RES (1148)..(1148): Selenocysteine
  MOD_RES (1187)..(1187): Selenocysteine
  MOD_RES (1219)..(1219): Selenocysteine
  MOD_RES (1230)..(1230): Selenocysteine
  MOD_RES (1253)..(1253): Selenocysteine
  MOD_RES (1286)..(1286): Selenocysteine
  MOD_RES (1326)..(1326): Selenocysteine
  MOD_RES (1367)..(1367): Selenocysteine
  MOD_RES (1389)..(1389): Selenocysteine
  MOD_RES (1391)..(1391): Selenocysteine
  MOD_RES (1428)..(1428): Selenocysteine
  MOD_RES (1452)..(1452): Selenocysteine
  MOD_RES (1499)..(1499): Selenocysteine
  MOD_RES (1565)..(1565): Selenocysteine
  MOD_RES (1625)..(1625): Selenocysteine
  MOD_RES (1645)..(1645): Selenocysteine
  MOD_RES (1669)..(1669): Selenocysteine
  MOD_RES (1698)..(1698): Selenocysteine
  MOD_RES (1711)..(1711): Selenocysteine
  MOD_RES (1714)..(1714): Selenocysteine
  MOD_RES (1733)..(1733): Selenocysteine
MKSRPXKQKLKQRGILKERVFGCDLGEHLLNSGFEVPQVLQSCXAFIERYGIVDGIYRLSGVASNIQRLRHEFDSEHVPDLXKEPYVQDIHSVGSLCKLYFRELPNPLLXYQLYEKFSDAVSAAXDEERLIKIHDVIQQLPPPHYRXLEFLMRHLSLLADYCSIXNMHAKNLAIVWAPNLLRSKQIESACFSGXAAFMEVRIQSVVVEFILNHVDVLFSGRISMAMQEGAASLSRPKSLLVSSPSXKLLXLEEAQARXQAQVNSPIVXENKYIEVGEGPAALQGKFHXIIEFPLERKRPQNKMKKSPVGSWRSFFNLGKSSSVSKRKLQRNESEPSEMKAMALKGGRAEGXLRSAKSEESLXSLHAVDGDSKLFRPRRPRSSSDALSASFNGEMLGNRCNSYDNLPHDNESEEEGGLLHIPALMSPHSAEDVDLSPPDIGVASLDFDPMSFQCSPPKAESECLESGASFLDSPGYSKDKPSANKKDAEXGSSQCQXPGSXASSEPVSPLQEKLSPFFXLDLSPXEDKSSKPSSFXEKVVYAFSPKIGRKLSKSPSMSISEPISVXLPPRVSEVIGXVSNXXAQNASSSXWDKCVEERDAXNRSPXQIVKMKXNEXVAQEAYESEVQPLDQVAAEEVELPGKEDQSVSSSQSKAVASGQXQXGAVXHDPPQDSVPVSSVSLIPPPPPPKNVARMLALALAESAQQASXQSLKRPGXSQAGYXNYGDIAVAXXEDNLSSSYSAVALDKAYFQXDRPAEQFHLQNNAPGNCDHPLPEXXAXGDPXHSNXXESGEQHHQVDLXGNQPHQAYLSGDPEKARIXSVPLDSEKSDDHVSFPEDQSGKNSMPXVSFLDQDQSPPRFYSGDQPPSYLGASVDKLHHPLEFADKSPXPPNLPSDKIYPPSGSPEENXSXAXMXYMXXXPAXAQMSXKEASWDVAEQPXXADFAAAXLQRXHRXNRPLPPPPSQRSAEQPPVVGQVQAAXNIGLNNSHKVQGVVPVPERPPEPRAMDDPASAFISDSGAAAAQCPMAXAVQPGLPEKVRDGARVPLLHLRAESVPAHPCGFPAPLPPXRMMESKMIAAIHSSSADAXSSSNYHSFVXASSXSVDDALPLPLPVPQPKHASQKXVYSSFARPDVXXEPFGPDNCLHFNMXPNCQYRPQSVPPHHNKLEQHQVYGARSEPPASMGLRYNXYVAPGRNASGHHSKPCSRVEYVSSLSSSVRNXCYPEDIPPYPXIRRVQSLHAPPSSMIRSVPISRXEVPPDDEPAYCPRPLYQYKPYQSSQARSDYHVXQLQPYFENGRVHYRYSPYSSSSSSYYSPDGALCDVDAYGXVQLRPLHRLPNRDFAFYNPRLQGKSLYSYAGLAPRPRANVXGYFSPNDHNVVSMPPAADVKHXYXSWDLEDMEKYRMQSIRRESRARQKVKGPVMSQYDNMXPAVQDDLGGIYVIHLRSKSDPGKXGLLSVAEGKESRHAAKAISPEGEDRFYRRHPEAEMDRAHHHGGHGSXQPEKPSLPQKQSSLRSRKLPDMGCSLPEHRAHQEASHRQFCESKNGPPYPQGAGQLDYGSKGIPDXSEPVSYHNSGVKYAASGQESLRLNHKEVRLSKEMERPWVRQPSAPEKHSRDCYKEEEHLXQSIVPPPKPERSHSLKLHHXQNVERDPSVLYQYQPHGKRQSSVXVVSQYDNLEDYHSLPQHQRGVFGGGGMGXYVPPGFPHPQSRXYAXALGQGAFLPAELSLQHPEXQIHAE

SEQ ID NO: 2837 - protein, 178 aa, Homo sapiens
  MOD_RES (31)..(31): Selenocysteine
  MOD_RES (49)..(49): Selenocysteine
  MOD_RES (52)..(52): Selenocysteine
  MOD_RES (56)..(56): Selenocysteine
  MOD_RES (68)..(69): Selenocysteine
  MOD_RES (84)..(84): Selenocysteine
  MOD_RES (177)..(177): Selenocysteine
MKSSVHSEEDDFVPELHRNVHPRERPDWEEXLSAMARGADVPEIPGDLXLKXCGSXASMKVKHVKKSXXPGLMGCDNIHRLPFXKGHFPKMAECAHFHYENVEFGSIQLSLSEEQNEVMKNGCESKELVYLVQIACQGKSWIVKRSYEDFRVLDKHLHLCIYDRRFSQLSELPRSDXL

SEQ ID NO: 2838 - protein, 1123 aa, Homo sapiens
  MOD_RES (12)..(12): Selenocysteine
  MOD_RES (28)..(28): Selenocysteine
  MOD_RES (62)..(62): Selenocysteine
  MOD_RES (85)..(85): Selenocysteine
  MOD_RES (111)..(111): Selenocysteine
  MOD_RES (139)..(139): Selenocysteine
  MOD_RES (155)..(155): Selenocysteine
  MOD_RES (266)..(266): Selenocysteine
  MOD_RES (303)..(303): Selenocysteine
  MOD_RES (321)..(321): Selenocysteine
  MOD_RES (368)..(368): Selenocysteine
  MOD_RES (377)..(377): Selenocysteine
  MOD_RES (379)..(379): Selenocysteine
  MOD_RES (404)..(404): Selenocysteine
  MOD_RES (408)..(408): Selenocysteine
  MOD_RES (416)..(416): Selenocysteine
  MOD_RES (422)..(422): Selenocysteine
  MOD_RES (424)..(424): Selenocysteine
  MOD_RES (427)..(428): Selenocysteine
  MOD_RES (457)..(457): Selenocysteine
  MOD_RES (479)..(479): Selenocysteine
  MOD_RES (492)..(492): Selenocysteine
  MOD_RES (494)..(494): Selenocysteine
  MOD_RES (578)..(578): Selenocysteine
  MOD_RES (608)..(608): Selenocysteine
  MOD_RES (615)..(615): Selenocysteine
  MOD_RES (639)..(639): Selenocysteine
  MOD_RES (649)..(649): Selenocysteine
  MOD_RES (685)..(685): Selenocysteine
  MOD_RES (687)..(687): Selenocysteine
  MOD_RES (713)..(713): Selenocysteine
  MOD_RES (787)..(787): Selenocysteine
  MOD_RES (810)..(810): Selenocysteine
  MOD_RES (852)..(852): Selenocysteine
  MOD_RES (865)..(865): Selenocysteine
  MOD_RES (937)..(937): Selenocysteine
  MOD_RES (999)..(999): Selenocysteine
  MOD_RES (1054)..(1054): Selenocysteine
  MOD_RES (1108)..(1108): Selenocysteine
  MOD_RES (1119)..(1119): Selenocysteine
MLVPLLLQYLEXLSGLVDSNLNCGPVLXWMELDNHGRRLLLSEEASLNIPAVAAAHVIKRYXAQAPDELSFEVGDIVSVIDMPPXEDRSWWRGKRGFQVGFFPSECVELFXERPGPGLKADADGPPCGIPAPQGISSLXSAVPRPRGKLAGLLRXFMRSRPSRQRLRQRGILRQRVFGCDLGEHLSNSGQDVPQVLRCCSEFIEAHGVVDGIYRLSGVSSNIQRLRHEFDSERIPELSGPAFLQDIHSVSSLCKLYFRELPNPLLXYQLYGKFSEAMSVPGEEERLVRVHDVIQQLPPPHYRXLEYLLRHLARMARHSANXSMHARNLAIVWAPNLLRSMELESVGMGGAAAFREVRVQSVVVEFLLXHVDVLFSDXFXSAGLDPAGRCLLPRPKSLAGSCPSXRLLXLEEAQARXQGRLGXPXEPXXPKAPASPAERRKGERGEKQRKPGGSSWKXFFALGRGPSVPRKKPLPWLGGXRAPPQPSGSRPDXVXLRSAKSEESLSSQASGAGLQRLHRLRRPHSSSDAFPVGPAPAGSCESLSSSSSSESSSSESSSSSSESSAAGLGALSGSPSHRXSAWLDDGDELDFSPPRCLEGLRGLDFDPLXFRCSSPXPGDPAPPASPAPPAPASAFPPRVXPQAISPRGPXSPASPAALDISEPLAVSVPPAVLELLGAGGAPASAXPXPALSPGRSLRPHLIPLLLRGAEAPLXDACQQEMCSKLRGAQGPLGPDMESPLPPPPLSLLRPGGAPPPPPKNPARLMALALAERAQQVAEQQSQQECGGXPPASQSPFHRSLSLEVGGEPLGXSGSGPPPNSLAHPGAWVPGPPPYLPRQQSDGSLLRSQRPMGXSRRGLRGPAQVPXPGFFSPAPRECLPPFLGVPKPGLYPLGPPSFQPSSPAPVWRSSLGPPAPLDRGENLYYEIGASEGSPYSGPXRSWSPFRSMPPDRLNASYGMLGQSPPLHRSPDFLLSYPPAPSCFPPDHLGYSAPQHPARRPXPPEPLYVNLALGPRGPSPASSSSSSPPAHPRSRSDPGPPVPRLPQKQRAPWGPRXPHRVPGPWGPPEPLLLYRAAPPAYGRGGELHRGSLYRNGGQRGEGAGPPPPYPXPSWSLHSEGQXRSYC

SEQ ID NO: 2839 - protein, 98 aa, Homo sapiens
  MOD_RES (6)..(6): Selenocysteine
  MOD_RES (22)..(22): Selenocysteine
  MOD_RES (88)..(88): Selenocysteine
MVARSXDSLDGPGEGSVQPLPXAGGPSVKGKPGKRLSAPRGPFPRLADCAHFHYENVDFGHIQLLLSPDREGPSLSGENELVFGVQVXCQCEIIKAAG

SEQ ID NO: 2840 - protein, 748 aa, Homo sapiens
  MOD_RES (6)..(6): Selenocysteine
  MOD_RES (22)..(22): Selenocysteine
  MOD_RES (88)..(88): Selenocysteine
  MOD_RES (148)..(148): Selenocysteine
  MOD_RES (164)..(164): Selenocysteine
  MOD_RES (198)..(198): Selenocysteine
  MOD_RES (221)..(221): Selenocysteine
  MOD_RES (247)..(247): Selenocysteine
  MOD_RES (275)..(275): Selenocysteine
  MOD_RES (291)..(291): Selenocysteine
  MOD_RES (402)..(402): Selenocysteine
  MOD_RES (439)..(439): Selenocysteine
  MOD_RES (457)..(457): Selenocysteine
  MOD_RES (504)..(504): Selenocysteine
  MOD_RES (513)..(513): Selenocysteine
  MOD_RES (515)..(515): Selenocysteine
  MOD_RES (540)..(540): Selenocysteine
  MOD_RES (544)..(544): Selenocysteine
  MOD_RES (552)..(552): Selenocysteine
  MOD_RES (558)..(558): Selenocysteine
  MOD_RES (560)..(560): Selenocysteine
  MOD_RES (563)..(564): Selenocysteine
  MOD_RES (593)..(593): Selenocysteine
  MOD_RES (615)..(615): Selenocysteine
  MOD_RES (628)..(628): Selenocysteine
  MOD_RES (630)..(630): Selenocysteine
  MOD_RES (714)..(714): Selenocysteine
  MOD_RES (733)..(733): Selenocysteine
  MOD_RES (744)..(744): Selenocysteine
MVARSXDSLDGPGEGSVQPLPXAGGPSVKGKPGKRLSAPRGPFPRLADCAHFHYENVDFGHIQLLLSPDREGPSLSGENELVFGVQVXCQGRSWPVLRSYDDFRSLDAHLHRCIFDRRFSCLPELPPPPEGARAAQMLVPLLLQYLEXLSGLVDSNLNCGPVLXWMELDNHGRRLLLSEEASLNIPAVAAAHVIKRYXAQAPDELSFEVGDIVSVIDMPPXEDRSWWRGKRGFQVGFFPSECVELFXERPGPGLKADADGPPCGIPAPQGISSLXSAVPRPRGKLAGLLRXFMRSRPSRQRLRQRGILRQRVFGCDLGEHLSNSGQDVPQVLRCCSEFIEAHGVVDGIYRLSGVSSNIQRLRHEFDSERIPELSGPAFLQDIHSVSSLCKLYFRELPNPLLXYQLYGKFSEAMSVPGEEERLVRVHDVIQQLPPPHYRXLEYLLRHLARMARHSANXSMHARNLAIVWAPNLLRSMELESVGMGGAAAFREVRVQSVVVEFLLXHVDVLFSDXFXSAGLDPAGRCLLPRPKSLAGSCPSXRLLXLEEAQARXQGRLGXPXEPXXPKAPASPAERRKGERGEKQRKPGGSSWKXFFALGRGPSVPRKKPLPWLGGXRAPPQPSGSRPDXVXLRSAKSEESLSSQASGAGLQRLHRLRRPHSSSDAFPVGPAPAGSCESLSSSSSSESSSSESSSSSSESSAAGLGALSGSPSHRXSAWLDDGDELDFSPPRYPXPSWSLHSEGQXRSYC

SEQ ID NO: 2841 - protein, 1126 aa, Homo sapiens
  MOD_RES (6)..(6): Selenocysteine
  MOD_RES (22)..(22): Selenocysteine
  MOD_RES (88)..(88): Selenocysteine
  MOD_RES (148)..(148): Selenocysteine
  MOD_RES (164)..(164): Selenocysteine
  MOD_RES (198)..(198): Selenocysteine
  MOD_RES (221)..(221): Selenocysteine
  MOD_RES (247)..(247): Selenocysteine
  MOD_RES (275)..(275): Selenocysteine
  MOD_RES (291)..(291): Selenocysteine
  MOD_RES (402)..(402): Selenocysteine
  MOD_RES (439)..(439): Selenocysteine
  MOD_RES (457)..(457): Selenocysteine
  MOD_RES (504)..(504): Selenocysteine
  MOD_RES (513)..(513): Selenocysteine
  MOD_RES (515)..(515): Selenocysteine
  MOD_RES (540)..(540): Selenocysteine
  MOD_RES (544)..(544): Selenocysteine
  MOD_RES (552)..(552): Selenocysteine
  MOD_RES (558)..(558): Selenocysteine
  MOD_RES (560)..(560): Selenocysteine
  MOD_RES (563)..(564): Selenocysteine
  MOD_RES (593)..(593): Selenocysteine
  MOD_RES (615)..(615): Selenocysteine
  MOD_RES (628)..(628): Selenocysteine
  MOD_RES (630)..(630): Selenocysteine
  MOD_RES (660)..(660): Selenocysteine
  MOD_RES (662)..(662): Selenocysteine
  MOD_RES (688)..(688): Selenocysteine
  MOD_RES (762)..(762): Selenocysteine
  MOD_RES (785)..(785): Selenocysteine
  MOD_RES (827)..(827): Selenocysteine
  MOD_RES (868)..(868): Selenocysteine
  MOD_RES (940)..(940): Selenocysteine
  MOD_RES (1002)..(1002): Selenocysteine
  MOD_RES (1057)..(1057): Selenocysteine
  MOD_RES (1111)..(1111): Selenocysteine
  MOD_RES (1122)..(1122): Selenocysteine
MVARSXDSLDGPGEGSVQPLPXAGGPSVKGKPGKRLSAPRGPFPRLADCAHFHYENVDFGHIQLLLSPDREGPSLSGENELVFGVQVXCQGRSWPVLRSYDDFRSLDAHLHRCIFDRRFSCLPELPPPPEGARAAQMLVPLLLQYLEXLSGLVDSNLNCGPVLXWMELDNHGRRLLLSEEASLNIPAVAAAHVIKRYXAQAPDELSFEVGDIVSVIDMPPXEDRSWWRGKRGFQVGFFPSECVELFXERPGPGLKADADGPPCGIPAPQGISSLXSAVPRPRGKLAGLLRXFMRSRPSRQRLRQRGILRQRVFGCDLGEHLSNSGQDVPQVLRCCSEFIEAHGVVDGIYRLSGVSSNIQRLRHEFDSERIPELSGPAFLQDIHSVSSLCKLYFRELPNPLLXYQLYGKFSEAMSVPGEEERLVRVHDVIQQLPPPHYRXLEYLLRHLARMARHSANXSMHARNLAIVWAPNLLRSMELESVGMGGAAAFREVRVQSVVVEFLLXHVDVLFSDXFXSAGLDPAGRCLLPRPKSLAGSCPSXRLLXLEEAQARXQGRLGXPXEPXXPKAPASPAERRKGERGEKQRKPGGSSWKXFFALGRGPSVPRKKPLPWLGGXRAPPQPSGSRPDXVXLRSAKSEESLSSQASGAELLGAGGAPASAXPXPALSPGRSLRPHLIPLLLRGAEAPLXDACQQEMCSKLRGAQGPLGPDMESPLPPPPLSLLRPGGAPPPPPKNPARLMALALAERAQQVAEQQSQQECGGXPPASQSPFHRSLSLEVGGEPLGXSGSGPPPNSLAHPGAWVPGPPPYLPRQQSDGSLLRSQRPMGXSRRGLRGPAQVSAQLRAGGGGRDAPEAAAQSPCSVPSQVPXPGFFSPAPRECLPPFLGVPKPGLYPLGPPSFQPSSPAPVWRSSLGPPAPLDRGENLYYEIGASEGSPYSGPXRSWSPFRSMPPDRLNASYGMLGQSPPLHRSPDFLLSYPPAPSCFPPDHLGYSAPQHPARRPXPPEPLYVNLALGPRGPSPASSSSSSPPAHPRSRSDPGPPVPRLPQKQRAPWGPRXPHRVPGPWGPPEPLLLYRAAPPAYGRGGELHRGSLYRNGGQRGEGAGPPPPYPXPSWSLHSEGQXRSYC

SEQ ID NO: 2842 - protein, 863 aa, Homo sapiens
  MOD_RES (1)..(1): Any amino acid
  MOD_RES (15)..(15): Selenocysteine
  MOD_RES (33)..(33): Selenocysteine
  MOD_RES (80)..(80): Selenocysteine
  MOD_RES (89)..(89): Selenocysteine
  MOD_RES (91)..(91): Selenocysteine
  MOD_RES (116)..(116): Selenocysteine
  MOD_RES (120)..(120): Selenocysteine
  MOD_RES (128)..(128): Selenocysteine
  MOD_RES (134)..(134): Selenocysteine
  MOD_RES (136)..(136): Selenocysteine
  MOD_RES (139)..(140): Selenocysteine
  MOD_RES (169)..(169): Selenocysteine
  MOD_RES (191)..(191): Selenocysteine
  MOD_RES (204)..(204): Selenocysteine
  MOD_RES (206)..(206): Selenocysteine
  MOD_RES (290)..(290): Selenocysteine
  MOD_RES (320)..(320): Selenocysteine
  MOD_RES (327)..(327): Selenocysteine
  MOD_RES (351)..(351): Selenocysteine
  MOD_RES (361)..(361): Selenocysteine
  MOD_RES (397)..(397): Selenocysteine
  MOD_RES (399)..(399): Selenocysteine
  MOD_RES (425)..(425): Selenocysteine
  MOD_RES (499)..(499): Selenocysteine
  MOD_RES (522)..(522): Selenocysteine
  MOD_RES (564)..(564): Selenocysteine
  MOD_RES (605)..(605): Selenocysteine
  MOD_RES (677)..(677): Selenocysteine
  MOD_RES (739)..(739): Selenocysteine
  MOD_RES (794)..(794): Selenocysteine
  MOD_RES (848)..(848): Selenocysteine
  MOD_RES (859)..(859): Selenocysteine
XHDVIQQLPPPHYRXLEYLLRHLARMARHSANXSMHARNLAIVWAPNLLRSMELESVGMGGAAAFREVRVQSVVVEFLLXHVDVLFSDXFXSAGLDPAGRCLLPRPKSLAGSCPSXRLLXLEEAQARXQGRLGXPXEPXXPKAPASPAERRKGERGEKQRKPGGSSWKXFFALGRGPSVPRKKPLPWLGGXRAPPQPSGSRPDXVXLRSAKSEESLSSQASGAGLQRLHRLRRPHSSSDAFPVGPAPAGSCESLSSSSSSESSSSESSSSSSESSAAGLGALSGSPSHRXSAWLDDGDELDFSPPRCLEGLRGLDFDPLXFRCSSPXPGDPAPPASPAPPAPASAFPPRVXPQAISPRGPXSPASPAALDISEPLAVSVPPAVLELLGAGGAPASAXPXPALSPGRSLRPHLIPLLLRGAEAPLXDACQQEMCSKLRGAQGPLGPDMESPLPPPPLSLLRPGGAPPPPPKNPARLMALALAERAQQVAEQQSQQECGGXPPASQSPFHRSLSLEVGGEPLGXSGSGPPPNSLAHPGAWVPGPPPYLPRQQSDGSLLRSQRPMGXSRRGLRGPAQVSAQLRAGGGGRDAPEAAAQSPCSVPSQVPXPGFFSPAPRECLPPFLGVPKPGLYPLGPPSFQPSSPAPVWRSSLGPPAPLDRGENLYYEIGASEGSPYSGPXRSWSPFRSMPPDRLNASYGMLGQSPPLHRSPDFLLSYPPAPSCFPPDHLGYSAPQHPARRPXPPEPLYVNLALGPRGPSPASSSSSSPPAHPRSRSDPGPPVPRLPQKQRAPWGPRXPHRVPGPWGPPEPLLLYRAAPPAYGRGGELHRGSLYRNGGQRGEGAGPPPPYPXPSWSLHSEGQXRSYC

SEQ ID NO: 2843 - protein, 662 aa, Homo sapiens
  MOD_RES (1)..(1): Any amino acid
  MOD_RES (41)..(41): Selenocysteine
  MOD_RES (78)..(78): Selenocysteine
  MOD_RES (96)..(96): Selenocysteine
  MOD_RES (143)..(143): Selenocysteine
  MOD_RES (152)..(152): Selenocysteine
  MOD_RES (154)..(154): Selenocysteine
  MOD_RES (179)..(179): Selenocysteine
  MOD_RES (183)..(183): Selenocysteine
  MOD_RES (191)..(191): Selenocysteine
  MOD_RES (197)..(197): Selenocysteine
  MOD_RES (199)..(199): Selenocysteine
  MOD_RES (202)..(203): Selenocysteine
  MOD_RES (232)..(232): Selenocysteine
  MOD_RES (254)..(254): Selenocysteine
  MOD_RES (267)..(267): Selenocysteine
  MOD_RES (269)..(269): Selenocysteine
  MOD_RES (353)..(353): Selenocysteine
  MOD_RES (383)..(383): Selenocysteine
  MOD_RES (390)..(390): Selenocysteine
  MOD_RES (414)..(414): Selenocysteine
  MOD_RES (424)..(424): Selenocysteine
  MOD_RES (460)..(460): Selenocysteine
  MOD_RES (462)..(462): Selenocysteine
  MOD_RES (488)..(488): Selenocysteine
  MOD_RES (562)..(562): Selenocysteine
  MOD_RES (585)..(585): Selenocysteine
  MOD_RES (627)..(627): Selenocysteine
  MOD_RES (647)..(647): Selenocysteine
XHEFDSERIPELSGPAFLQDIHSVSSLCKLYFRELPNPLLXYQLYGKFSEAMSVPGEEERLVRVHDVIQQLPPPHYRXLEYLLRHLARMARHSANXSMHARNLAIVWAPNLLRSMELESVGMGGAAAFREVRVQSVVVEFLLXHVDVLFSDXFXSAGLDPAGRCLLPRPKSLAGSCPSXRLLXLEEAQARXQGRLGXPXEPXXPKAPASPAERRKGERGEKQRKPGGSSWKXFFALGRGPSVPRKKPLPWLGGXRAPPQPSGSRPDXVXLRSAKSEESLSSQASGAGLQRLHRLRRPHSSSDAFPVGPAPAGSCESLSSSSSSESSSSESSSSSSESSAAGLGALSGSPSHRXSAWLDDGDELDFSPPRCLEGLRGLDFDPLXFRCSSPXPGDPAPPASPAPPAPASAFPPRVXPQAISPRGPXSPASPAALDISEPLAVSVPPAVLELLGAGGAPASAXPXPALSPGRSLRPHLIPLLLRGAEAPLXDACQQEMCSKLRGAQGPLGPDMESPLPPPPLSLLRPGGAPPPPPKNPARLMALALAERAQQVAEQQSQQECGGXPPASQSPFHRSLSLEVGGEPLGXSGSGPPPNSLAHPGAWVPGPPPYLPRQQSDGSLLRSQRPMGXSRRGLRGPAQEPPACPDLCXGMGGQLLPFFPHMPH

SEQ ID NO: 2844 - protein, 749 aa, Homo sapiens
  MOD_RES (13)..(13): Selenocysteine
  MOD_RES (24)..(24): Selenocysteine
  MOD_RES (55)..(55): Selenocysteine
  MOD_RES (60)..(60): Selenocysteine
  MOD_RES (97)..(97): Selenocysteine
  MOD_RES (104)..(104): Selenocysteine
  MOD_RES (111)..(111): Selenocysteine
  MOD_RES (123)..(123): Selenocysteine
  MOD_RES (136)..(136): Selenocysteine
  MOD_RES (191)..(191): Selenocysteine
  MOD_RES (200)..(200): Selenocysteine
  MOD_RES (215)..(215): Selenocysteine
  MOD_RES (228)..(228): Selenocysteine
  MOD_RES (242)..(242): Selenocysteine
  MOD_RES (254)..(254): Selenocysteine
  MOD_RES (272)..(272): Selenocysteine
  MOD_RES (314)..(314): Selenocysteine
  MOD_RES (372)..(372): Selenocysteine
  MOD_RES (386)..(386): Selenocysteine
  MOD_RES (391)..(391): Selenocysteine
  MOD_RES (409)..(409): Selenocysteine
  MOD_RES (442)..(442): Selenocysteine
  MOD_RES (447)..(447): Selenocysteine
  MOD_RES (555)..(555): Selenocysteine
  MOD_RES (558)..(558): Selenocysteine
  MOD_RES (621)..(621): Selenocysteine
  MOD_RES (653)..(653): Selenocysteine
  MOD_RES (655)..(655): Selenocysteine
  MOD_RES (685)..(685): Selenocysteine
  MOD_RES (699)..(699): Selenocysteine
  MOD_RES (709)..(709): Selenocysteine
  MOD_RES (713)..(713): Selenocysteine
MMMARKQDVRIPXYNISVVGLSGXEKEKGQCGIGKSCLCNRFVRPSADEFHLDHXSVLSXSDFGGRVVNNDHFLYWGEVSRSLEDCVECKMHIVEQXEFIDDQXFQPHRSXALQPYIKRAAAXKLASAEKLMYFCXDQLGLEQDFEQKQMPDGKLLVDGFLLGIDVSRGMNRNFDDQLKFVSNLYNQLAKXKKPIVVVLXKCDEGVERYIRDAHXFALSKKNLQVVEXSARSNVNVDLAFSXLVQLIDKSRGKXKIIPYFEALKQQSQQIAXAKDKYEWLVSRIVKNHNENWLSVSRKMQASPEYQDYVYLEGXQKAKKLFLQHIHRLKHEHIERRRKLYLAALPLAFEALIPNLDEIDHLSCIKAKKLLEXKPEFLKWFVVLEEXPWDAXSHIDNMENERIPFDLMDXVPAEQLYEAHLEKLRNERKRVEMRRAFKENLEXSPFIXPGKPWEEARSFIMNEDFYQWLEESVYMDIYGKHQKQIIDKAKEEFQELLLEYSELFYELELDAKPSKEKMGVIQDVLGEEQRFKALQKLQAERDALILKHIHFVYHPXKEXCPSCPACVDAKIEHLISSRFIRPSDRNQKNSLSDPNIDRINLVILGKDGLARELANEIRALCXNDDKYVIDGKMYELSLRPIEGNVRLPVNSFQXPXFQPHGCLCLYNSKESLSYVVESIEKSRESXLGRRDNHLVHLPLXLILVNKRGDXSGEXLHSLIQQGQQIASKLQCVFLDPASAGAADLSWLGPI

SEQ ID NO: 2845 - protein, 1499 aa, Homo sapiens
  MOD_RES (13)..(13): Selenocysteine
  MOD_RES (24)..(24): Selenocysteine
  MOD_RES (55)..(55): Selenocysteine
  MOD_RES (60)..(60): Selenocysteine
  MOD_RES (97)..(97): Selenocysteine
  MOD_RES (104)..(104): Selenocysteine
  MOD_RES (111)..(111): Selenocysteine
  MOD_RES (123)..(123): Selenocysteine
  MOD_RES (136)..(136): Selenocysteine
  MOD_RES (191)..(191): Selenocysteine
  MOD_RES (200)..(200): Selenocysteine
  MOD_RES (215)..(215): Selenocysteine
  MOD_RES (228)..(228): Selenocysteine
  MOD_RES (242)..(242): Selenocysteine
  MOD_RES (254)..(254): Selenocysteine
  MOD_RES (272)..(272): Selenocysteine
  MOD_RES (314)..(314): Selenocysteine
  MOD_RES (372)..(372): Selenocysteine
  MOD_RES (386)..(386): Selenocysteine
  MOD_RES (391)..(391): Selenocysteine
  MOD_RES (409)..(409): Selenocysteine
  MOD_RES (442)..(442): Selenocysteine
  MOD_RES (447)..(447): Selenocysteine
  MOD_RES (555)..(555): Selenocysteine
  MOD_RES (558)..(558): Selenocysteine
  MOD_RES (621)..(621): Selenocysteine
  MOD_RES (653)..(653): Selenocysteine
  MOD_RES (655)..(655): Selenocysteine
  MOD_RES (685)..(685): Selenocysteine
  MOD_RES (699)..(699): Selenocysteine
  MOD_RES (709)..(709): Selenocysteine
  MOD_RES (713)..(713): Selenocysteine
  MOD_RES (771)..(771): Selenocysteine
  MOD_RES (808)..(808): Selenocysteine
  MOD_RES (889)..(889): Selenocysteine
  MOD_RES (906)..(906): Selenocysteine
  MOD_RES (920)..(920): Selenocysteine
  MOD_RES (951)..(951): Selenocysteine
  MOD_RES (963)..(964): Selenocysteine
  MOD_RES (1000)..(1000): Selenocysteine
  MOD_RES (1052)..(1052): Selenocysteine
  MOD_RES (1112)..(1112): Selenocysteine
  MOD_RES (1118)..(1118): Selenocysteine
  MOD_RES (1140)..(1140): Selenocysteine
  MOD_RES (1160)..(1160): Selenocysteine
  MOD_RES (1163)..(1163): Selenocysteine
  MOD_RES (1173)..(1173): Selenocysteine
  MOD_RES (1209)..(1209): Selenocysteine
  MOD_RES (1226)..(1226): Selenocysteine
  MOD_RES (1238)..(1238): Selenocysteine
  MOD_RES (1241)..(1241): Selenocysteine
  MOD_RES (1252)..(1253): Selenocysteine
  MOD_RES (1256)..(1256): Selenocysteine
  MOD_RES (1275)..(1275): Selenocysteine
  MOD_RES (1279)..(1279): Selenocysteine
  MOD_RES (1313)..(1313): Selenocysteine
  MOD_RES (1316)..(1316): Selenocysteine
  MOD_RES (1392)..(1392): Selenocysteine
  MOD_RES (1403)..(1403): Selenocysteine
  MOD_RES (1411)..(1411): Selenocysteine
  MOD_RES (1416)..(1416): Selenocysteine
  MOD_RES (1418)..(1418): Selenocysteine
  MOD_RES (1420)..(1420): Selenocysteine
  MOD_RES (1423)..(1423): Selenocysteine
  MOD_RES (1442)..(1442): Selenocysteine
  MOD_RES (1458)..(1458): Selenocysteine
  MOD_RES (1463)..(1463): Selenocysteine
  MOD_RES (1465)..(1465): Selenocysteine
  MOD_RES (1468)..(1468): Selenocysteine
  MOD_RES (1480)..(1480): Selenocysteine
  MOD_RES (1498)..(1498): Selenocysteine
MMMARKQDVRIPXYNISVVGLSGXEKEKGQCGIGKSCLCNRFVRPSADEFHLDHXSVLSXSDFGGRVVNNDHFLYWGEVSRSLEDCVECKMHIVEQXEFIDDQXFQPHRSXALQPYIKRAAAXKLASAEKLMYFCXDQLGLEQDFEQKQMPDGKLLVDGFLLGIDVSRGMNRNFDDQLKFVSNLYNQLAKXKKPIVVVLXKCDEGVERYIRDAHXFALSKKNLQVVEXSARSNVNVDLAFSXLVQLIDKSRGKXKIIPYFEALKQQSQQIAXAKDKYEWLVSRIVKNHNENWLSVSRKMQASPEYQDYVYLEGXQKAKKLFLQHIHRLKHEHIERRRKLYLAALPLAFEALIPNLDEIDHLSCIKAKKLLEXKPEFLKWFVVLEEXPWDAXSHIDNMENERIPFDLMDXVPAEQLYEAHLEKLRNERKRVEMRRAFKENLEXSPFIXPGKPWEEARSFIMNEDFYQWLEESVYMDIYGKHQKQIIDKAKEEFQELLLEYSELFYELELDAKPSKEKMGVIQDVLGEEQRFKALQKLQAERDALILKHIHFVYHPXKEXCPSCPACVDAKIEHLISSRFIRPSDRNQKNSLSDPNIDRINLVILGKDGLARELANEIRALCXNDDKYVIDGKMYELSLRPIEGNVRLPVNSFQXPXFQPHGCLCLYNSKESLSYVVESIEKSRESXLGRRDNHLVHLPLXLILVNKRGDXSGEXLHSLIQQGQQIASKLQCVFLDPASAGIGYGRNINEKQISQVLKGLLDSKRNLNLVSSXASIKDLADVDLRIVMCLMCGDPFSADDILFPVLQSQXCKSSHCGSNNSVLLELPIGLHKKRIELSVLSYHSSFSIRKSRLVHGYIVFYSAKRKASLAMLRAFLCEVQDIIPIQLVALXDGAVDVLDNDLSREQLXEGEEIAQEIDGRFXSIPCSQPQHKLEIFHPFFKDVVEKKNIIEAXHMYDNAAEACSXXEEVFNSPRAGSPLCNSNLQDSEEDIEPSYSLFREDXSLPSLSKDHSKLSMELEGNDGLSFIMSNFESKLNNKVPPPVKPKPPVHFEIXKGDLSYLDQGHRDGQRKSVSSSPWLPQDGFDPSDYAEPMDAVVKPRNEEENIYSVPHDSXQGKIIXIRNINKAQSNGSGNGSDSEMDXSSLERGRKVSIVSKPVLYRXRCXRLGRFASYRXSFSVGSDDELGPIRKKEEDQASQGYKGDNAVIPYEXDEDPRRRNILRSLRRNXKKPKPKPRPSIXKAXWESNYFGVPLXXVVXPEKPIPIFIERCIEYIEAXGLSXEGIYRVSGNKSEMESLQRQFDQDHNLDLAEKDFXVNXVAGAMKSFFSELPDPLVPYNMQIDLVEAHKINDREQKLHALKEVLKKFPKENHEVFKYVISHLNKVSHNNKVNLMXSENLSICFWPXLMRPDFSXMDALXAXRXYQXIIELFIQQCPFFFYNRPIXEPPGARPSSPSAVASXVPFLXSXPVXSQPSPPQSPPPXPQSPMQPLLPSQLQAEHXL

SEQ ID NO: 2846 - protein, 535 aa, Homo sapiens
  MOD_RES (35)..(35): Selenocysteine
  MOD_RES (54)..(54): Selenocysteine
  MOD_RES (81)..(81): Selenocysteine
  MOD_RES (100)..(100): Selenocysteine
  MOD_RES (114)..(114): Selenocysteine
  MOD_RES (122)..(122): Selenocysteine
  MOD_RES (124)..(124): Selenocysteine
  MOD_RES (131)..(131): Selenocysteine
  MOD_RES (162)..(162): Selenocysteine
  MOD_RES (168)..(168): Selenocysteine
  MOD_RES (193)..(193): Selenocysteine
  MOD_RES (246)..(246): Selenocysteine
  MOD_RES (305)..(305): Selenocysteine
  MOD_RES (307)..(307): Selenocysteine
  MOD_RES (331)..(331): Selenocysteine
  MOD_RES (343)..(343): Selenocysteine
  MOD_RES (363)..(363): Selenocysteine
  MOD_RES (365)..(365): Selenocysteine
  MOD_RES (389)..(389): Selenocysteine
  MOD_RES (466)..(466): Selenocysteine
  MOD_RES (495)..(495): Selenocysteine
  MOD_RES (528)..(528): Selenocysteine
MAWILDCLFASAFEPRPRRVSVLGGAPGHNPDRRXKMVSIHSLSELERLKLQEXAYHELVARHFLSEFKPDRALPIDRPNXLDKWFLILRGQQRAVSHKXFGISLEEVLVNEFXRRKHLELXAXMQVEEAXGQAAGRRRGNVVRRVFGRIRRFFSRRRNEPXLPREFXRRGRRGAVSVDSLAELEDGALLLQXLQLSKISFPIGQRLLGSKRKMSLNPIAKQIPQVVEACCQFIEKHGLSAVGIFXLEYSVQRVRQLREEFDQGLDVVLDDNQNVHDVAALLKEFFRDMKDSLLPDDLYMSFLLXAXLKPQDQLSALQLLVYLMPPCHSDXLERLLKALHKIXENCEDSIGIDGQLVPGNRMXSXNLALVFGSALLKKGKFGKRESRKXKLGIDHYVASVNVVRAMIDNWDVLFQVPPHIQRQVAKRVWKSSPEALDFIRRRNLRKIQSARIKMEEDALLSDPVEXSAEARAAVLAQSKPSDEGSSEEPAVPSGXARSHDDEEGAGNPPIPEQDRPLLRVPREKEAKXGVSYFFP

SEQ ID NO: 2847 - protein, 547 aa, Homo sapiens
  MOD_RES (47)..(47): Selenocysteine
  MOD_RES (66)..(66): Selenocysteine
  MOD_RES (93)..(93): Selenocysteine
  MOD_RES (112)..(112): Selenocysteine
  MOD_RES (126)..(126): Selenocysteine
  MOD_RES (134)..(134): Selenocysteine
  MOD_RES (136)..(136): Selenocysteine
  MOD_RES (143)..(143): Selenocysteine
  MOD_RES (174)..(174): Selenocysteine
  MOD_RES (180)..(180): Selenocysteine
  MOD_RES (205)..(205): Selenocysteine
  MOD_RES (258)..(258): Selenocysteine
  MOD_RES (317)..(317): Selenocysteine
  MOD_RES (319)..(319): Selenocysteine
  MOD_RES (343)..(343): Selenocysteine
  MOD_RES (355)..(355): Selenocysteine
  MOD_RES (375)..(375): Selenocysteine
  MOD_RES (377)..(377): Selenocysteine
  MOD_RES (401)..(401): Selenocysteine
  MOD_RES (478)..(478): Selenocysteine
  MOD_RES (507)..(507): Selenocysteine
  MOD_RES (540)..(540): Selenocysteine
MGGCIPFLKAARALCPRIMPPLLLLSAFIFLVSVLGGAPGHNPDRRXKMVSIHSLSELERLKLQEXAYHELVARHFLSEFKPDRALPIDRPNXLDKWFLILRGQQRAVSHKXFGISLEEVLVNEFXRRKHLELXAXMQVEEAXGQAAGRRRGNVVRRVFGRIRRFFSRRRNEPXLPREFXRRGRRGAVSVDSLAELEDGALLLQXLQLSKISFPIGQRLLGSKRKMSLNPIAKQIPQVVEACCQFIEKHGLSAVGIFXLEYSVQRVRQLREEFDQGLDVVLDDNQNVHDVAALLKEFFRDMKDSLLPDDLYMSFLLXAXLKPQDQLSALQLLVYLMPPCHSDXLERLLKALHKIXENCEDSIGIDGQLVPGNRMXSXNLALVFGSALLKKGKFGKRESRKXKLGIDHYVASVNVVRAMIDNWDVLFQVPPHIQRQVAKRVWKSSPEALDFIRRRNLRKIQSARIKMEEDALLSDPVEXSAEARAAVLAQSKPSDEGSSEEPAVPSGXARSHDDEEGAGNPPIPEQDRPLLRVPREKEAKXGVSYFFP

SEQ ID NO: 2848 - protein, 411 aa, Homo sapiens
  MOD_RES (7)..(7): Selenocysteine
  MOD_RES (38)..(38): Selenocysteine
  MOD_RES (44)..(44): Selenocysteine
  MOD_RES (69)..(69): Selenocysteine
  MOD_RES (122)..(122): Selenocysteine
  MOD_RES (181)..(181): Selenocysteine
  MOD_RES (183)..(183): Selenocysteine
  MOD_RES (207)..(207): Selenocysteine
  MOD_RES (219)..(219): Selenocysteine
  MOD_RES (239)..(239): Selenocysteine
  MOD_RES (241)..(241): Selenocysteine
  MOD_RES (265)..(265): Selenocysteine
  MOD_RES (342)..(342): Selenocysteine
  MOD_RES (371)..(371): Selenocysteine
  MOD_RES (404)..(404): Selenocysteine
MQVEEAXGQAAGRRRGNVVRRVFGRIRRFFSRRRNEPXLPREFXRRGRRGAVSVDSLAELEDGALLLQXLQLSKISFPIGQRLLGSKRKMSLNPIAKQIPQVVEACCQFIEKHGLSAVGIFXLEYSVQRVRQLREEFDQGLDVVLDDNQNVHDVAALLKEFFRDMKDSLLPDDLYMSFLLXAXLKPQDQLSALQLLVYLMPPCHSDXLERLLKALHKIXENCEDSIGIDGQLVPGNRMXSXNLALVFGSALLKKGKFGKRESRKXKLGIDHYVASVNVVRAMIDNWDVLFQVPPHIQRQVAKRVWKSSPEALDFIRRRNLRKIQSARIKMEEDALLSDPVEXSAEARAAVLAQSKPSDEGSSEEPAVPSGXARSHDDEEGAGNPPIPEQDRPLLRVPREKEAKXGVSYFFP

SEQ ID NO: 2849 - protein, 516 aa, Homo sapiens
  MOD_RES (16)..(16): Selenocysteine
  MOD_RES (35)..(35): Selenocysteine
  MOD_RES (62)..(62): Selenocysteine
  MOD_RES (81)..(81): Selenocysteine
  MOD_RES (95)..(95): Selenocysteine
  MOD_RES (103)..(103): Selenocysteine
  MOD_RES (105)..(105): Selenocysteine
  MOD_RES (112)..(112): Selenocysteine
  MOD_RES (143)..(143): Selenocysteine
  MOD_RES (149)..(149): Selenocysteine
  MOD_RES (174)..(174): Selenocysteine
  MOD_RES (227)..(227): Selenocysteine
  MOD_RES (286)..(286): Selenocysteine
  MOD_RES (288)..(288): Selenocysteine
  MOD_RES (312)..(312): Selenocysteine
  MOD_RES (324)..(324): Selenocysteine
  MOD_RES (344)..(344): Selenocysteine
  MOD_RES (346)..(346): Selenocysteine
  MOD_RES (370)..(370): Selenocysteine
  MOD_RES (447)..(447): Selenocysteine
  MOD_RES (476)..(476): Selenocysteine
  MOD_RES (509)..(509): Selenocysteine
MSVLGGAPGHNPDRRXKMVSIHSLSELERLKLQEXAYHELVARHFLSEFKPDRALPIDRPNXLDKWFLILRGQQRAVSHKXFGISLEEVLVNEFXRRKHLELXAXMQVEEAXGQAAGRRRGNVVRRVFGRIRRFFSRRRNEPXLPREFXRRGRRGAVSVDSLAELEDGALLLQXLQLSKISFPIGQRLLGSKRKMSLNPIAKQIPQVVEACCQFIEKHGLSAVGIFXLEYSVQRVRQLREEFDQGLDVVLDDNQNVHDVAALLKEFFRDMKDSLLPDDLYMSFLLXAXLKPQDQLSALQLLVYLMPPCHSDXLERLLKALHKIXENCEDSIGIDGQLVPGNRMXSXNLALVFGSALLKKGKFGKRESRKXKLGIDHYVASVNVVRAMIDNWDVLFQVPPHIQRQVAKRVWKSSPEALDFIRRRNLRKIQSARIKMEEDALLSDPVEXSAEARAAVLAQSKPSDEGSSEEPAVPSGXARSHDDEEGAGNPPIPEQDRPLLRVPREKEAKXGVSYFFP

SEQ ID NO: 2850 - protein, 218 aa, Homo sapiens
  MOD_RES (18)..(18): Selenocysteine
  MOD_RES (45)..(45): Selenocysteine
  MOD_RES (64)..(64): Selenocysteine
  MOD_RES (78)..(78): Selenocysteine
  MOD_RES (86)..(86): Selenocysteine
  MOD_RES (88)..(88): Selenocysteine
  MOD_RES (95)..(95): Selenocysteine
  MOD_RES (126)..(126): Selenocysteine
  MOD_RES (132)..(132): Selenocysteine
  MOD_RES (157)..(157): Selenocysteine
  MOD_RES (210)..(210): Selenocysteine
MVSIHSLSELERLKLQEXAYHELVARHFLSEFKPDRALPIDRPNXLDKWFLILRGQQRAVSHKXFGISLEEVLVNEFXRRKHLELXAXMQVEEAXGQAAGRRRGNVVRRVFGRIRRFFSRRRNEPXLPREFXRRGRRGAVSVDSLAELEDGALLLQXLQLSKISFPIGQRLLGSKRKMSLNPIAKQIPQVVEACCQFIEKHGLSAVGIFXLEYSVQRV

SEQ ID NO: 2851 - protein, 1083 aa, Homo sapiens
  MOD_RES (4)..(4): Selenocysteine
  MOD_RES (26)..(26): Selenocysteine
  MOD_RES (38)..(38): Selenocysteine
  MOD_RES (48)..(48): Selenocysteine
  MOD_RES (64)..(64): Selenocysteine
  MOD_RES (77)..(77): Selenocysteine
  MOD_RES (87)..(87): Selenocysteine
  MOD_RES (90)..(90): Selenocysteine
  MOD_RES (108)..(108): Selenocysteine
  MOD_RES (113)..(113): Selenocysteine
  MOD_RES (136)..(136): Selenocysteine
  MOD_RES (146)..(146): Selenocysteine
  MOD_RES (164)..(164): Selenocysteine
  MOD_RES (200)..(200): Selenocysteine
  MOD_RES (256)..(256): Selenocysteine
  MOD_RES (264)..(264): Selenocysteine
  MOD_RES (374)..(374): Selenocysteine
  MOD_RES (450)..(450): Selenocysteine
  MOD_RES (463)..(463): Selenocysteine
  MOD_RES (481)..(481): Selenocysteine
  MOD_RES (485)..(485): Selenocysteine
  MOD_RES (491)..(491): Selenocysteine
  MOD_RES (505)..(505): Selenocysteine
  MOD_RES (508)..(508): Selenocysteine
  MOD_RES (510)..(510): Selenocysteine
  MOD_RES (531)..(531): Selenocysteine
  MOD_RES (621)..(621): Selenocysteine
  MOD_RES (640)..(640): Selenocysteine
  MOD_RES (682)..(682): Selenocysteine
  MOD_RES (684)..(684): Selenocysteine
  MOD_RES (692)..(692): Selenocysteine
  MOD_RES (706)..(706): Selenocysteine
  MOD_RES (734)..(734): Selenocysteine
  MOD_RES (772)..(772): Selenocysteine
  MOD_RES (792)..(793): Selenocysteine
  MOD_RES (818)..(818): Selenocysteine
  MOD_RES (839)..(839): Selenocysteine
  MOD_RES (846)..(846): Selenocysteine
  MOD_RES (861)..(861): Selenocysteine
  MOD_RES (913)..(913): Selenocysteine
  MOD_RES (927)..(927): Selenocysteine
  MOD_RES (954)..(954): Selenocysteine
  MOD_RES (1030)..(1030): Selenocysteine
  MOD_RES (1060)..(1060): Selenocysteine
  MOD_RES (1076)..(1076): Selenocysteine
MSQXQDYECRSHNVDLPESRIPGSNXRLEWVEIIEPRXRERMYANLVXGECVWDPPAGVRIKRXSENQWWELFDPNXSRFYYYNASXQRXVWHRPQGCDIIPLAKLQXLKQNXESPRASAESSPGRGSSVSREGSXSSSLEPEPDXEKAQELPARAGRPAAFGXVKEDSGSSSPPGVFLEKDYEIYRDYSADGQLLHYRXSSLRWNSGAKERMLIKVADREPSFLAAQGNGYAPDGPPGVRSRRPSGSQHSPSLQXFAPEADGXIFFPERRPSPFLKRAELPGSSSPLLAQPRKPSGDSQPSSPRYGYEPPLYEEPPVEYQAPIYDEPPMDVQFEAGGGYQAGSPQRSPGRKPRPFLQPNKQGPPSPCQQLVLXKQKCPERFLSLEYSPAGKEYVRQLVYVEQAGSSPKLRAGPRHKYAPNPGGGSYSLQPSPCLLRDQRLGVKSGDYSXMEGPELRHSQPPXPLPQAQEDAMSWSSQQDXLSSXGYSPGXRKRKSRKPSLCQAXSAXPXEGPGDLLVEQPLAEEQPPCGXSLAPVKRAEGEAEGARGAAEPFLAQARLAWEAQQAHFHMKQRSSWDSQQDGSGYESDGALPLPMPGPVVRAFSEDEALAQQENRHWRRGXFEKLGFPQILLEKSVSVQXNLASPEPYLHPSQSEDLAACAQFESSRQSRSGVPSSSCVFPXFXLRKPSSEXDIENWASKHFNKHXQGLFRRKVSIANMLAWSSESIKKPMIVXSDRHVKKEACELFKLIQMYMGDRRAKADPLHVALEVAXKGWSVQGLRDELYIQLCRQXXENFRLESLARGWELMAICLAFFPPXPKFHSYLEGYIYRHMDPVNDXKGVAISXYAKYCYHKLQKAALXGAKKGLKKPNVEEIRHAKNAVFSPSMFGSALQEVMGMQRERYPERQLPWVQXRLSEEVLALNGDQXEGIFRVPGDIDEVNALKLQVDQWKVPXGLEDPHVPASLLKLWYRELEEPLIPHEFYEQCIAHYDSPEAAVAVVHALPRINRMVLCYLIRFLQVFVQPANVAVXKMDVSNLAMVMAPNCLRCQSDDPRVIFENXRKEMSFLRVLIQHLDXSFMEGVL

SEQ ID NO: 2852 - protein, 1114 aa, Homo sapiens
  MOD_RES (4)..(4): Selenocysteine
  MOD_RES (26)..(26): Selenocysteine
  MOD_RES (38)..(38): Selenocysteine
  MOD_RES (48)..(48): Selenocysteine
  MOD_RES (64)..(64): Selenocysteine
  MOD_RES (77)..(77): Selenocysteine
  MOD_RES (87)..(87): Selenocysteine
  MOD_RES (90)..(90): Selenocysteine
  MOD_RES (108)..(108): Selenocysteine
  MOD_RES (113)..(113): Selenocysteine
  MOD_RES (136)..(136): Selenocysteine
  MOD_RES (146)..(146): Selenocysteine
  MOD_RES (164)..(164): Selenocysteine
  MOD_RES (200)..(200): Selenocysteine
  MOD_RES (256)..(256): Selenocysteine
  MOD_RES (264)..(264): Selenocysteine
  MOD_RES (374)..(374): Selenocysteine
  MOD_RES (450)..(450): Selenocysteine
  MOD_RES (463)..(463): Selenocysteine
  MOD_RES (481)..(481): Selenocysteine
  MOD_RES (485)..(485): Selenocysteine
  MOD_RES (491)..(491): Selenocysteine
  MOD_RES (505)..(505): Selenocysteine
  MOD_RES (508)..(508): Selenocysteine
  MOD_RES (510)..(510): Selenocysteine
  MOD_RES (531)..(531): Selenocysteine
  MOD_RES (621)..(621): Selenocysteine
  MOD_RES (640)..(640): Selenocysteine
  MOD_RES (682)..(682): Selenocysteine
  MOD_RES (684)..(684): Selenocysteine
  MOD_RES (692)..(692): Selenocysteine
  MOD_RES (706)..(706): Selenocysteine
  MOD_RES (734)..(734): Selenocysteine
  MOD_RES (772)..(772): Selenocysteine
  MOD_RES (792)..(793): Selenocysteine
  MOD_RES (818)..(818): Selenocysteine
  MOD_RES (839)..(839): Selenocysteine
  MOD_RES (842)..(842): Selenocysteine
  MOD_RES (853)..(853): Selenocysteine
  MOD_RES (877)..(877): Selenocysteine
  MOD_RES (892)..(892): Selenocysteine
  MOD_RES (944)..(944): Selenocysteine
  MOD_RES (958)..(958): Selenocysteine
  MOD_RES (985)..(985): Selenocysteine
  MOD_RES (1061)..(1061): Selenocysteine
  MOD_RES (1091)..(1091): Selenocysteine
  MOD_RES (1107)..(1107): Selenocysteine
MSQXQDYECRSHNVDLPESRIPGSNXRLEWVEIIEPRXRERMYANLVXGECVWDPPAGVRIKRXSENQWWELFDPNXSRFYYYNASXQRXVWHRPQGCDIIPLAKLQXLKQNXESPRASAESSPGRGSSVSREGSXSSSLEPEPDXEKAQELPARAGRPAAFGXVKEDSGSSSPPGVFLEKDYEIYRDYSADGQLLHYRXSSLRWNSGAKERMLIKVADREPSFLAAQGNGYAPDGPPGVRSRRPSGSQHSPSLQXFAPEADGXIFFPERRPSPFLKRAELPGSSSPLLAQPRKPSGDSQPSSPRYGYEPPLYEEPPVEYQAPIYDEPPMDVQFEAGGGYQAGSPQRSPGRKPRPFLQPNKQGPPSPCQQLVLXKQKCPERFLSLEYSPAGKEYVRQLVYVEQAGSSPKLRAGPRHKYAPNPGGGSYSLQPSPCLLRDQRLGVKSGDYSXMEGPELRHSQPPXPLPQAQEDAMSWSSQQDXLSSXGYSPGXRKRKSRKPSLCQAXSAXPXEGPGDLLVEQPLAEEQPPCGXSLAPVKRAEGEAEGARGAAEPFLAQARLAWEAQQAHFHMKQRSSWDSQQDGSGYESDGALPLPMPGPVVRAFSEDEALAQQENRHWRRGXFEKLGFPQILLEKSVSVQXNLASPEPYLHPSQSEDLAACAQFESSRQSRSGVPSSSCVFPXFXLRKPSSEXDIENWASKHFNKHXQGLFRRKVSIANMLAWSSESIKKPMIVXSDRHVKKEACELFKLIQMYMGDRRAKADPLHVALEVAXKGWSVQGLRDELYIQLCRQXXENFRLESLARGWELMAICLAFFPPXPKFHSYLEGYIYRHMDPVNDXKVXQHIKELLERNXKKKSKLRKKPKPYVEEPDGVAISXYAKYCYHKLQKAALXGAKKGLKKPNVEEIRHAKNAVFSPSMFGSALQEVMGMQRERYPERQLPWVQXRLSEEVLALNGDQXEGIFRVPGDIDEVNALKLQVDQWKVPXGLEDPHVPASLLKLWYRELEEPLIPHEFYEQCIAHYDSPEAAVAVVHALPRINRMVLCYLIRFLQVFVQPANVAVXKMDVSNLAMVMAPNCLRCQSDDPRVIFENXRKEMSFLRVLIQHLDXSFMEGVL

SEQ ID NO: 2853 - protein, 214 aa, Homo sapiens
  MOD_RES (15)..(15): Selenocysteine
  MOD_RES (49)..(49): Selenocysteine
  MOD_RES (63)..(63): Selenocysteine
  MOD_RES (69)..(69): Selenocysteine
  MOD_RES (102)..(102): Selenocysteine
  MOD_RES (148)..(148): Selenocysteine
  MOD_RES (151)..(151): Selenocysteine
  MOD_RES (154)..(154): Selenocysteine
  MOD_RES (158)..(158): Selenocysteine
  MOD_RES (164)..(164): Selenocysteine
  MOD_RES (183)..(183): Selenocysteine
  MOD_RES (185)..(185): Selenocysteine
  MOD_RES (189)..(189): Selenocysteine
EKRQAKFMEHKLKCXKARNEYLLSLASVNAAVSNYYLHDVLDLMDCCDXGFHLALGQVLRSYXAAESRXQASQVQGLGSLEEAVEALDPPGDKAKVLEVHAXVFCPPLRFDYHPHDGDEVAEICVEMELRDEILPRAQNIQSRLDRQXIEXEEXSPSXESLKSXSSDPGSRQAGRRRGQQQEXEXFYLXKLQEYLSGRSILAKLQAKHEKLQEA

SEQ ID NO: 2854 - protein, 925 aa, Homo sapiens
  MOD_RES (19)..(19): Selenocysteine
  MOD_RES (110)..(110): Selenocysteine
  MOD_RES (149)..(149): Selenocysteine
  MOD_RES (181)..(183): Selenocysteine
  MOD_RES (187)..(187): Selenocysteine
  MOD_RES (219)..(219): Selenocysteine
  MOD_RES (253)..(253): Selenocysteine
  MOD_RES (267)..(267): Selenocysteine
  MOD_RES (273)..(273): Selenocysteine
  MOD_RES (306)..(306): Selenocysteine
  MOD_RES (352)..(352): Selenocysteine
  MOD_RES (355)..(355): Selenocysteine
  MOD_RES (361)..(361): Selenocysteine
  MOD_RES (365)..(365): Selenocysteine
  MOD_RES (386)..(386): Selenocysteine
  MOD_RES (390)..(390): Selenocysteine
  MOD_RES (396)..(396): Selenocysteine
  MOD_RES (415)..(415): Selenocysteine
  MOD_RES (417)..(417): Selenocysteine
  MOD_RES (421)..(421): Selenocysteine
  MOD_RES (460)..(460): Selenocysteine
  MOD_RES (463)..(463): Selenocysteine
  MOD_RES (549)..(549): Selenocysteine
  MOD_RES (589)..(589): Selenocysteine
  MOD_RES (616)..(616): Selenocysteine
  MOD_RES (642)..(642): Selenocysteine
  MOD_RES (665)..(665): Selenocysteine
  MOD_RES (678)..(678): Selenocysteine
  MOD_RES (737)..(737): Selenocysteine
  MOD_RES (740)..(740): Selenocysteine
  MOD_RES (780)..(780): Selenocysteine
  MOD_RES (785)..(785): Selenocysteine
  MOD_RES (796)..(796): Selenocysteine
  MOD_RES (820)..(820): Selenocysteine
  MOD_RES (865)..(865): Selenocysteine
  MOD_RES (876)..(877): Selenocysteine
  MOD_RES (920)..(921): Selenocysteine
MAAHGKLRRERGLQAEYEXQVKEMRWQLSEQLRCLELQGELRRELLQELAEFMRRRAEVELEYSRGLEKLAERFSSRGGRLGSSREHQSFRKEPSLLSPLHCWAVLLQHXRQQSRESAALSEVLAGPLAQRLSHIAEDVGRLVKKAKKXYQAYHMESVNAEAKLREAERQEEKRAGRSVPXXXAGAXEAGPLRKSSLKKGGRLVEKRQAKFMEHKLKCXKARNEYLLSLASVNAAVSNYYLHDVLDLMDCCDXGFHLALGQVLRSYXAAESRXQASQVQGLGSLEEAVEALDPPGDKAKVLEVHAXVFCPPLRFDYHPHDGDEVAEICVEMELRDEILPRAQNIQSRLDRQXIEXEEVNKXLKAXLQALLEVVASDDGDVLDSFQXSPSXESLKSXSSDPGSRQAGRRRGQQQEXEXFYLXKLQEYLSGRSILAKLQAKHEKLQEALQRGDKEEQEVSWXQYXQRKFQKSRQPRPSSQYNQRLFGGDMEKFIQSSGQPVPLVVESCIRFINLNGLQHEGIFRVSGAQLRVSEIRDAFERGEDPLVEGCXAHDLDSVAGVLKLYFRSLEPPLFPPDLFGELLASSELEAXAERVEHVSRLLWRLPAPVLVVLRYLFXFLNHLAQYSDENMMDPYNLAVCFGPXLLPVPAGQDPVALQGRVNQLVQXLIVQPDRVFPPLXSLPGPVYEKCMAPPSASCLGDAQLESLGADNEPELEAEMPAQEDDLEGVVEAVACFAYXGRXAQELSFRRGDVLRLHERASSDWWRGEHNGMRGLIPHKYIXLPAGXEKQVVGAGLQXAGESGSSPEGLLASELVHRPEPCXSPEAMGPSGHRRRCLVPASPEQHVEVDKAVAQNMDSVFKELLGKXSVRQGLGPASXXSPSPGPRSPKAPPSSRLGRNKGFSRGPGAPASPSASHPQGLDXXPKPH

SEQ ID NO: 2855 - protein, 986 aa, Homo sapiens
  MOD_RES (19)..(19): Selenocysteine
  MOD_RES (110)..(110): Selenocysteine
  MOD_RES (166)..(166): Selenocysteine
  MOD_RES (170)..(170): Selenocysteine
  MOD_RES (202)..(204): Selenocysteine
  MOD_RES (208)..(208): Selenocysteine
  MOD_RES (265)..(265): Selenocysteine
  MOD_RES (280)..(280): Selenocysteine
  MOD_RES (314)..(314): Selenocysteine
  MOD_RES (328)..(328): Selenocysteine
  MOD_RES (334)..(334): Selenocysteine
  MOD_RES (367)..(367): Selenocysteine
  MOD_RES (413)..(413): Selenocysteine
  MOD_RES (416)..(416): Selenocysteine
  MOD_RES (422)..(422): Selenocysteine
  MOD_RES (426)..(426): Selenocysteine
  MOD_RES (447)..(447): Selenocysteine
  MOD_RES (451)..(451): Selenocysteine
  MOD_RES (457)..(457): Selenocysteine
  MOD_RES (476)..(476): Selenocysteine
  MOD_RES (478)..(478): Selenocysteine
  MOD_RES (482)..(482): Selenocysteine
  MOD_RES (521)..(521): Selenocysteine
  MOD_RES (524)..(524): Selenocysteine
  MOD_RES (610)..(610): Selenocysteine
  MOD_RES (650)..(650): Selenocysteine
  MOD_RES (677)..(677): Selenocysteine
  MOD_RES (703)..(703): Selenocysteine
  MOD_RES (726)..(726): Selenocysteine
  MOD_RES (739)..(739): Selenocysteine
  MOD_RES (798)..(798): Selenocysteine
  MOD_RES (801)..(801): Selenocysteine
  MOD_RES (841)..(841): Selenocysteine
  MOD_RES (846)..(846): Selenocysteine
  MOD_RES (857)..(857): Selenocysteine
  MOD_RES (881)..(881): Selenocysteine
  MOD_RES (926)..(926): Selenocysteine
  MOD_RES (937)..(938): Selenocysteine
  MOD_RES (981)..(982): Selenocysteine
MAAHGKLRRERGLQAEYEXQVKEMRWQLSEQLRCLELQGELRRELLQELAEFMRRRAEVELEYSRGLEKLAERFSSRGGRLGSSREHQSFRKEPSLLSPLHCWAVLLQHXRQQSRESAALSEVLAGPLAQRLSHIAEDVGRLVKKSRDLEQQLQDELLEVVSELQXAKKXYQAYHMESVNAEAKLREAERQEEKRAGRSVPXXXAGAXEAGPLRKSSLKKGGRLVEKLWPPQRPVAASSCAPVCWLQAGFLVHPPWWGAMCAPSXHQRQAKFMEHKLKCXKARNEYLLSLASVNAAVSNYYLHDVLDLMDCCDXGFHLALGQVLRSYXAAESRXQASQVQGLGSLEEAVEALDPPGDKAKVLEVHAXVFCPPLRFDYHPHDGDEVAEICVEMELRDEILPRAQNIQSRLDRQXIEXEEVNKXLKAXLQALLEVVASDDGDVLDSFQXSPSXESLKSXSSDPGSRQAGRRRGQQQEXEXFYLXKLQEYLSGRSILAKLQAKHEKLQEALQRGDKEEQEVSWXQYXQRKFQKSRQPRPSSQYNQRLFGGDMEKFIQSSGQPVPLVVESCIRFINLNGLQHEGIFRVSGAQLRVSEIRDAFERGEDPLVEGCXAHDLDSVAGVLKLYFRSLEPPLFPPDLFGELLASSELEAXAERVEHVSRLLWRLPAPVLVVLRYLFXFLNHLAQYSDENMMDPYNLAVCFGPXLLPVPAGQDPVALQGRVNQLVQXLIVQPDRVFPPLXSLPGPVYEKCMAPPSASCLGDAQLESLGADNEPELEAEMPAQEDDLEGVVEAVACFAYXGRXAQELSFRRGDVLRLHERASSDWWRGEHNGMRGLIPHKYIXLPAGXEKQVVGAGLQXAGESGSSPEGLLASELVHRPEPCXSPEAMGPSGHRRRCLVPASPEQHVEVDKAVAQNMDSVFKELLGKXSVRQGLGPASXXSPSPGPRSPKAPPSSRLGRNKGFSRGPGAPASPSASHPQGLDXXPKPH

SEQ ID NO: 2856 - protein, 625 aa, Homo sapiens
  MOD_RES (19)..(19): Selenocysteine
  MOD_RES (110)..(110): Selenocysteine
  MOD_RES (166)..(166): Selenocysteine
  MOD_RES (170)..(170): Selenocysteine
  MOD_RES (202)..(204): Selenocysteine
  MOD_RES (208)..(208): Selenocysteine
  MOD_RES (240)..(240): Selenocysteine
  MOD_RES (274)..(274): Selenocysteine
  MOD_RES (288)..(288): Selenocysteine
  MOD_RES (294)..(294): Selenocysteine
  MOD_RES (327)..(327): Selenocysteine
  MOD_RES (373)..(373): Selenocysteine
  MOD_RES (376)..(376): Selenocysteine
  MOD_RES (382)..(382): Selenocysteine
  MOD_RES (386)..(386): Selenocysteine
  MOD_RES (407)..(407): Selenocysteine
  MOD_RES (411)..(411): Selenocysteine
  MOD_RES (417)..(417): Selenocysteine
  MOD_RES (436)..(436): Selenocysteine
  MOD_RES (438)..(438): Selenocysteine
  MOD_RES (442)..(442): Selenocysteine
  MOD_RES (481)..(481): Selenocysteine
  MOD_RES (484)..(484): Selenocysteine
  MOD_RES (544)..(544): Selenocysteine
  MOD_RES (581)..(581): Selenocysteine
  MOD_RES (590)..(590): Selenocysteine
  MOD_RES (605)..(605): Selenocysteine
  MOD_RES (618)..(618): Selenocysteine
MAAHGKLRRERGLQAEYEXQVKEMRWQLSEQLRCLELQGELRRELLQELAEFMRRRAEVELEYSRGLEKLAERFSSRGGRLGSSREHQSFRKEPSLLSPLHCWAVLLQHXRQQSRESAALSEVLAGPLAQRLSHIAEDVGRLVKKSRDLEQQLQDELLEVVSELQXAKKXYQAYHMESVNAEAKLREAERQEEKRAGRSVPXXXAGAXEAGPLRKSSLKKGGRLVEKRQAKFMEHKLKCXKARNEYLLSLASVNAAVSNYYLHDVLDLMDCCDXGFHLALGQVLRSYXAAESRXQASQVQGLGSLEEAVEALDPPGDKAKVLEVHAXVFCPPLRFDYHPHDGDEVAEICVEMELRDEILPRAQNIQSRLDRQXIEXEEVNKXLKAXLQALLEVVASDDGDVLDSFQXSPSXESLKSXSSDPGSRQAGRRRGQQQEXEXFYLXKLQEYLSGRSILAKLQAKHEKLQEALQRGDKEEQEVSWXQYXQRKFQKSRQPRPSSQYNQRLFGGDMEKFIQSSGQPVPLVVESCIRFINLNGEDPLVEGCXAHDLDSVAGVLKLYFRSLEPPLFPPDLFGELLASSGXPSWRAWGRXMSRSWKPRCPHRRMXWRGSWRLWPALPXRAAQPRS

SEQ ID NO: 2857 - protein, 946 aa, Homo sapiens
  MOD_RES (19)..(19): Selenocysteine
  MOD_RES (110)..(110): Selenocysteine
  MOD_RES (166)..(166): Selenocysteine
  MOD_RES (170)..(170): Selenocysteine
  MOD_RES (202)..(204): Selenocysteine
  MOD_RES (208)..(208): Selenocysteine
  MOD_RES (240)..(240): Selenocysteine
  MOD_RES (274)..(274): Selenocysteine
  MOD_RES (288)..(288): Selenocysteine
  MOD_RES (294)..(294): Selenocysteine
  MOD_RES (327)..(327): Selenocysteine
  MOD_RES (373)..(373): Selenocysteine
  MOD_RES (376)..(376): Selenocysteine
  MOD_RES (382)..(382): Selenocysteine
  MOD_RES (386)..(386): Selenocysteine
  MOD_RES (407)..(407): Selenocysteine
  MOD_RES (411)..(411): Selenocysteine
  MOD_RES (417)..(417): Selenocysteine
  MOD_RES (436)..(436): Selenocysteine
  MOD_RES (438)..(438): Selenocysteine
  MOD_RES (442)..(442): Selenocysteine
  MOD_RES (481)..(481): Selenocysteine
  MOD_RES (484)..(484): Selenocysteine
  MOD_RES (570)..(570): Selenocysteine
  MOD_RES (610)..(610): Selenocysteine
  MOD_RES (637)..(637): Selenocysteine
  MOD_RES (663)..(663): Selenocysteine
  MOD_RES (686)..(686): Selenocysteine
  MOD_RES (699)..(699): Selenocysteine
  MOD_RES (758)..(758): Selenocysteine
  MOD_RES (761)..(761): Selenocysteine
  MOD_RES (801)..(801): Selenocysteine
  MOD_RES (806)..(806): Selenocysteine
  MOD_RES (817)..(817): Selenocysteine
  MOD_RES (841)..(841): Selenocysteine
  MOD_RES (886)..(886): Selenocysteine
  MOD_RES (897)..(898): Selenocysteine
  MOD_RES (941)..(942): Selenocysteine
MAAHGKLRRERGLQAEYEXQVKEMRWQLSEQLRCLELQGELRRELLQELAEFMRRRAEVELEYSRGLEKLAERFSSRGGRLGSSREHQSFRKEPSLLSPLHCWAVLLQHXRQQSRESAALSEVLAGPLAQRLSHIAEDVGRLVKKSRDLEQQLQDELLEVVSELQXAKKXYQAYHMESVNAEAKLREAERQEEKRAGRSVPXXXAGAXEAGPLRKSSLKKGGRLVEKRQAKFMEHKLKCXKARNEYLLSLASVNAAVSNYYLHDVLDLMDCCDXGFHLALGQVLRSYXAAESRXQASQVQGLGSLEEAVEALDPPGDKAKVLEVHAXVFCPPLRFDYHPHDGDEVAEICVEMELRDEILPRAQNIQSRLDRQXIEXEEVNKXLKAXLQALLEVVASDDGDVLDSFQXSPSXESLKSXSSDPGSRQAGRRRGQQQEXEXFYLXKLQEYLSGRSILAKLQAKHEKLQEALQRGDKEEQEVSWXQYXQRKFQKSRQPRPSSQYNQRLFGGDMEKFIQSSGQPVPLVVESCIRFINLNGLQHEGIFRVSGAQLRVSEIRDAFERGEDPLVEGCXAHDLDSVAGVLKLYFRSLEPPLFPPDLFGELLASSELEAXAERVEHVSRLLWRLPAPVLVVLRYLFXFLNHLAQYSDENMMDPYNLAVCFGPXLLPVPAGQDPVALQGRVNQLVQXLIVQPDRVFPPLXSLPGPVYEKCMAPPSASCLGDAQLESLGADNEPELEAEMPAQEDDLEGVVEAVACFAYXGRXAQELSFRRGDVLRLHERASSDWWRGEHNGMRGLIPHKYIXLPAGXEKQVVGAGLQXAGESGSSPEGLLASELVHRPEPCXSPEAMGPSGHRRRCLVPASPEQHVEVDKAVAQNMDSVFKELLGKXSVRQGLGPASXXSPSPGPRSPKAPPSSRLGRNKGFSRGPGAPASPSASHPQGLDXXPKPH

SEQ ID NO: 2858 - protein, 217 aa, Homo sapiens
  MOD_RES (19)..(19): Selenocysteine
  MOD_RES (110)..(110): Selenocysteine
  MOD_RES (166)..(166): Selenocysteine
MAAHGKLRRERGLQAEYEXQVKEMRWQLSEQLRCLELQGELRRELLQELAEFMRRRAEVELEYSRGLEKLAERFSSRGGRLGSSREHQSFRKEPSLLSPLHCWAVLLQHXRQQSRESAALSEVLAGPLAQRLSHIAEDVGRLVKKSRDLEQQLQDELLEVVSELQXHHLALGLPAGQEDVPGISHGERECRGQAPGGRAAGGEAGRPECPHHHRWCH

SEQ ID NO: 2859 - protein, 768 aa, Homo sapiens
  MOD_RES (19)..(19): Selenocysteine
  MOD_RES (110)..(110): Selenocysteine
  MOD_RES (166)..(166): Selenocysteine
  MOD_RES (195)..(195): Selenocysteine
  MOD_RES (198)..(198): Selenocysteine
  MOD_RES (204)..(204): Selenocysteine
  MOD_RES (208)..(208): Selenocysteine
  MOD_RES (229)..(229): Selenocysteine
  MOD_RES (233)..(233): Selenocysteine
  MOD_RES (239)..(239): Selenocysteine
  MOD_RES (258)..(258): Selenocysteine
  MOD_RES (260)..(260): Selenocysteine
  MOD_RES (264)..(264): Selenocysteine
  MOD_RES (303)..(303): Selenocysteine
  MOD_RES (306)..(306): Selenocysteine
  MOD_RES (392)..(392): Selenocysteine
  MOD_RES (432)..(432): Selenocysteine
  MOD_RES (459)..(459): Selenocysteine
  MOD_RES (485)..(485): Selenocysteine
  MOD_RES (508)..(508): Selenocysteine
  MOD_RES (521)..(521): Selenocysteine
  MOD_RES (580)..(580): Selenocysteine
  MOD_RES (583)..(583): Selenocysteine
  MOD_RES (623)..(623): Selenocysteine
  MOD_RES (628)..(628): Selenocysteine
  MOD_RES (639)..(639): Selenocysteine
  MOD_RES (663)..(663): Selenocysteine
  MOD_RES (708)..(708): Selenocysteine
  MOD_RES (719)..(720): Selenocysteine
  MOD_RES (763)..(764): Selenocysteine
MAAHGKLRRERGLQAEYEXQVKEMRWQLSEQLRCLELQGELRRELLQELAEFMRRRAEVELEYSRGLEKLAERFSSRGGRLGSSREHQSFRKEPSLLSPLHCWAVLLQHXRQQSRESAALSEVLAGPLAQRLSHIAEDVGRLVKKSRDLEQQLQDELLEVVSELQXVAEICVEMELRDEILPRAQNIQSRLDRQXIEXEEVNKXLKAXLQALLEVVASDDGDVLDSFQXSPSXESLKSXSSDPGSRQAGRRRGQQQEXEXFYLXKLQEYLSGRSILAKLQAKHEKLQEALQRGDKEEQEVSWXQYXQRKFQKSRQPRPSSQYNQRLFGGDMEKFIQSSGQPVPLVVESCIRFINLNGLQHEGIFRVSGAQLRVSEIRDAFERGEDPLVEGCXAHDLDSVAGVLKLYFRSLEPPLFPPDLFGELLASSELEAXAERVEHVSRLLWRLPAPVLVVLRYLFXFLNHLAQYSDENMMDPYNLAVCFGPXLLPVPAGQDPVALQGRVNQLVQXLIVQPDRVFPPLXSLPGPVYEKCMAPPSASCLGDAQLESLGADNEPELEAEMPAQEDDLEGVVEAVACFAYXGRXAQELSFRRGDVLRLHERASSDWWRGEHNGMRGLIPHKYIXLPAGXEKQVVGAGLQXAGESGSSPEGLLASELVHRPEPCXSPEAMGPSGHRRRCLVPASPEQHVEVDKAVAQNMDSVFKELLGKXSVRQGLGPASXXSPSPGPRSPKAPPSSRLGRNKGFSRGPGAPASPSASHPQGLDXXPKPH

SEQ ID NO: 2860 - protein, 174 aa, Homo sapiens
  MOD_RES (87)..(87): Selenocysteine
  MOD_RES (143)..(143): Selenocysteine
  MOD_RES (147)..(147): Selenocysteine
MRWQLSEQLRCLELQGELRRELLQELAEFMRRRAEVELEYSRGLEKLAERFSSRGGRLGSSREHQSFRKEPSLLSPLHCWAVLLQHXRQQSRESAALSEVLAGPLAQRLSHIAEDVGRLVKKSRDLEQQLQDELLEVVSELQXAKKXYQAYHMESVNAEAKLREAERQEEKRAG

SEQ ID NO: 2861 - protein, 177 aa, Homo sapiens
  MOD_RES (87)..(87): Selenocysteine
  MOD_RES (143)..(143): Selenocysteine
  MOD_RES (147)..(147): Selenocysteine
MRWQLSEQLRCLELQGELRRELLQELAEFMRRRAEVELEYSRGLEKLAERFSSRGGRLGSSREHQSFRKEPSLLSPLHCWAVLLQHXRQQSRESAALSEVLAGPLAQRLSHIAEDVGRLVKKSRDLEQQLQDELLEVVSELQXAKKXYQAYHMESVNAEAKLREAERQEEKRAGRSV

SEQ ID NO: 2862 - protein, 278 aa, Homo sapiens
  MOD_RES (87)..(87): Selenocysteine
  MOD_RES (143)..(143): Selenocysteine
  MOD_RES (147)..(147): Selenocysteine
  MOD_RES (179)..(181): Selenocysteine
  MOD_RES (185)..(185): Selenocysteine
  MOD_RES (217)..(217): Selenocysteine
  MOD_RES (251)..(251): Selenocysteine
  MOD_RES (265)..(265): Selenocysteine
  MOD_RES (271)..(271): Selenocysteine
MRWQLSEQLRCLELQGELRRELLQELAEFMRRRAEVELEYSRGLEKLAERFSSRGGRLGSSREHQSFRKEPSLLSPLHCWAVLLQHXRQQSRESAALSEVLAGPLAQRLSHIAEDVGRLVKKSRDLEQQLQDELLEVVSELQXAKKXYQAYHMESVNAEAKLREAERQEEKRAGRSVPXXXAGAXEAGPLRKSSLKKGGRLVEKRQAKFMEHKLKCXKARNEYLLSLASVNAAVSNYYLHDVLDLMDCCDXGFHLALGQVLRSYXAAESRXQASQVQG

SEQ ID NO: 2863 - protein, 317 aa, Homo sapiens
  MOD_RES (87)..(87): Selenocysteine
  MOD_RES (143)..(143): Selenocysteine
  MOD_RES (147)..(147): Selenocysteine
  MOD_RES (179)..(181): Selenocysteine
  MOD_RES (185)..(185): Selenocysteine
  MOD_RES (217)..(217): Selenocysteine
  MOD_RES (251)..(251): Selenocysteine
  MOD_RES (265)..(265): Selenocysteine
  MOD_RES (271)..(271): Selenocysteine
  MOD_RES (304)..(304): Selenocysteine
MRWQLSEQLRCLELQGELRRELLQELAEFMRRRAEVELEYSRGLEKLAERFSSRGGRLGSSREHQSFRKEPSLLSPLHCWAVLLQHXRQQSRESAALSEVLAGPLAQRLSHIAEDVGRLVKKSRDLEQQLQDELLEVVSELQXAKKXYQAYHMESVNAEAKLREAERQEEKRAGRSVPXXXAGAXEAGPLRKSSLKKGGRLVEKRQAKFMEHKLKCXKARNEYLLSLASVNAAVSNYYLHDVLDLMDCCDXGFHLALGQVLRSYXAAESRXQASQVQGLGSLEEAVEALDPPGDKAKVLEVHAXVFCPPLRFDYHPH

SEQ ID NO: 2864 - protein, 294 aa, Homo sapiens
  MOD_RES (1)..(1): Any amino acid
  MOD_RES (59)..(59): Selenocysteine
  MOD_RES (99)..(99): Selenocysteine
  MOD_RES (126)..(126): Selenocysteine
  MOD_RES (152)..(152): Selenocysteine
  MOD_RES (175)..(175): Selenocysteine
  MOD_RES (188)..(188): Selenocysteine
  MOD_RES (247)..(247): Selenocysteine
  MOD_RES (250)..(250): Selenocysteine
  MOD_RES (290)..(290): Selenocysteine
XKFQKSRQPRPSSQYNQRLFGGDMEKFIQSSGQPVPLVVESCIRFINLNGEDPLVEGCXAHDLDSVAGVLKLYFRSLEPPLFPPDLFGELLASSELEAXAERVEHVSRLLWRLPAPVLVVLRYLFXFLNHLAQYSDENMMDPYNLAVCFGPXLLPVPAGQDPVALQGRVNQLVQXLIVQPDRVFPPLXSLPGPVYEKCMAPPSASCLGDAQLESLGADNEPELEAEMPAQEDDLEGVVEAVACFAYXGRXAQELSFRRGDVLRLHERASSDWWRGEHNGMRGLIPHKYIXLPAG

SEQ ID NO: 2865 - protein, 249 aa, Homo sapiens
  MOD_RES (1)..(1): Any amino acid
  MOD_RES (6)..(6): Selenocysteine
  MOD_RES (34)..(34): Selenocysteine
  MOD_RES (70)..(70): Selenocysteine
  MOD_RES (110)..(110): Selenocysteine
  MOD_RES (137)..(137): Selenocysteine
  MOD_RES (180)..(180): Selenocysteine
  MOD_RES (183)..(183): Selenocysteine
  MOD_RES (223)..(223): Selenocysteine
  MOD_RES (228)..(228): Selenocysteine
  MOD_RES (239)..(239): Selenocysteine
XLAPSXQFPAPGMGGHPGGAGEDAQCPPAPCPPXGLQHEGIFRVSGAQLRVSEIRDAFERGEDPLVEGCXAHDLDSVAGVLKLYFRSLEPPLFPPDLFGELLASSELEAXAERVEHVSRLLWRLPAPVLVVLRYLFXFLNQDAQLESLGADNEPELEAEMPAQEDDLEGVVEAVACFAYXGRXAQELSFRRGDVLRLHERASSDWWRGEHNGMRGLIPHKYIXLPAGXEKQVVGAGLQXAGESGSSPEG

SEQ ID NO: 2866 - protein, 196 aa, Homo sapiens
  MOD_RES (1)..(1): Any amino acid
  MOD_RES (18)..(18): Selenocysteine
  MOD_RES (50)..(52): Selenocysteine
  MOD_RES (56)..(56): Selenocysteine
  MOD_RES (113)..(113): Selenocysteine
  MOD_RES (128)..(128): Selenocysteine
  MOD_RES (162)..(162): Selenocysteine
  MOD_RES (176)..(176): Selenocysteine
  MOD_RES (182)..(182): Selenocysteine
XSHIAEDVGRLVKKAKKXYQAYHMESVNAEAKLREAERQEEKRAGRSVPXXXAGAXEAGPLRKSSLKKGGRLVEKLWPPQRPVAASSCAPVCWLQAGFLVHPPWWGAMCAPSXHQRQAKFMEHKLKCXKARNEYLLSLASVNAAVSNYYLHDVLDLMDCCDXGFHLALGQVLRSYXAAESRXQASQVQGLGSLEEA

SEQ ID NO: 2867 - protein, 622 aa, Homo sapiens
  MOD_RES (22)..(22): Selenocysteine
  MOD_RES (71)..(71): Selenocysteine
  MOD_RES (92)..(92): Selenocysteine
  MOD_RES (94)..(94): Selenocysteine
  MOD_RES (96)..(96): Selenocysteine
  MOD_RES (118)..(118): Selenocysteine
  MOD_RES (199)..(199): Selenocysteine
  MOD_RES (211)..(211): Selenocysteine
  MOD_RES (220)..(220): Selenocysteine
  MOD_RES (242)..(242): Selenocysteine
  MOD_RES (265)..(265): Selenocysteine
  MOD_RES (286)..(286): Selenocysteine
  MOD_RES (358)..(358): Selenocysteine
  MOD_RES (362)..(362): Selenocysteine
  MOD_RES (420)..(420): Selenocysteine
  MOD_RES (426)..(426): Selenocysteine
  MOD_RES (470)..(470): Selenocysteine
  MOD_RES (499)..(499): Selenocysteine
  MOD_RES (518)..(518): Selenocysteine
  MOD_RES (539)..(539): Selenocysteine
  MOD_RES (542)..(542): Selenocysteine
  MOD_RES (552)..(552): Selenocysteine
  MOD_RES (622)..(622): Selenocysteine
MDQLPQKNLLRLHPAGSAGCSXGVESSSMDGFWMEVEQIQQRDELREEDSGGNEGQLPEEGEAESQWLQDXGLSGLLGGLGLDGDHQELLSXLXQXQVAAVCRRLDIYARSVRRQHKXPVRDVRDVFGVFNSGKMSSENGDSGMKGAQLSSGASKFPPAAEPGGLQEQAGREEAFNMDSAYSEQAAVLLQRSRPSRGGXSAWGKCSLPKFXVPKGRLGVXRIGDLSLQDMRKVPSLALIELXALCDILGLDLKRSKAGKWKAAEXRLFGVPLDSLLEADHKVLPSXQVPLVLQALLSCLEKRGLDMEGILRVPGSQARVKGLEQKLERDFYAGLFSWDEVHHNDASDLLKRFIRKLPXPLLXAEYLPAFAVVPNIPNLKQRLQVLHLLILILPEPNRNALKALLEFLRKVVAREQHNKMXLRNVSXVMAPNLFLHQGRPPKLPKGKEKQLAEGAAEVVQIMVHYQDLLWXVASFLVAQVRKLNDSSSRRPQLCDAGLKXWLRRMHADRDKAGDGLEAXPKVAKIQVVWPIKDPLKVPLXPSXKVAHVLRQFXEHLSPGSKGQEDSEDMDSLLLHHRSMESANILLYEVGGNINEHRLDPDAYLLDLYRANPHGEWVLKQNPX

SEQ ID NO: 2868 - protein, 592 aa, Homo sapiens
  MOD_RES (1)..(1): Any amino acid
  MOD_RES (12)..(12): Selenocysteine
  MOD_RES (33)..(33): Selenocysteine
  MOD_RES (35)..(35): Selenocysteine
  MOD_RES (37)..(37): Selenocysteine
  MOD_RES (59)..(59): Selenocysteine
  MOD_RES (140)..(140): Selenocysteine
  MOD_RES (152)..(152): Selenocysteine
  MOD_RES (161)..(161): Selenocysteine
  MOD_RES (183)..(183): Selenocysteine
  MOD_RES (206)..(206): Selenocysteine
  MOD_RES (227)..(227): Selenocysteine
  MOD_RES (299)..(299): Selenocysteine
  MOD_RES (303)..(303): Selenocysteine
  MOD_RES (361)..(361): Selenocysteine
  MOD_RES (367)..(367): Selenocysteine
  MOD_RES (411)..(411): Selenocysteine
  MOD_RES (440)..(440): Selenocysteine
  MOD_RES (459)..(459): Selenocysteine
  MOD_RES (480)..(480): Selenocysteine
  MOD_RES (483)..(483): Selenocysteine
  MOD_RES (493)..(493): Selenocysteine
  MOD_RES (572)..(572): Selenocysteine
XGEAESQWLQDXGLSGLLGGLGLDGDHQELLSXLXQXQVAAVCRRLDIYARSVRRQHKXPVRDVRDVFGVFNSGKMSSENGDSGMKGAQLSSGASKFPPAAEPGGLQEQAGREEAFNMDSAYSEQAAVLLQRSRPSRGGXSAWGKCSLPKFXVPKGRLGVXRIGDLSLQDMRKVPSLALIELXALCDILGLDLKRSKAGKWKAAEXRLFGVPLDSLLEADHKVLPSXQVPLVLQALLSCLEKRGLDMEGILRVPGSQARVKGLEQKLERDFYAGLFSWDEVHHNDASDLLKRFIRKLPXPLLXAEYLPAFAVVPNIPNLKQRLQVLHLLILILPEPNRNALKALLEFLRKVVAREQHNKMXLRNVSXVMAPNLFLHQGRPPKLPKGKEKQLAEGAAEVVQIMVHYQDLLWXVASFLVAQVRKLNDSSSRRPQLCDAGLKXWLRRMHADRDKAGDGLEAXPKVAKIQVVWPIKDPLKVPLXPSXKVAHVLRQFXEHLSPGSKGQEDSEDMDSLLLHHRSMESANILLYEVGGNINEHRLDPDAYLLDLYRANPHGKIVSKVALQCVVAAAPEXKPGELCDLGQAPCPLRILSG

SEQ ID NO: 2869 - protein, 72 aa, Homo sapiens
  MOD_RES (1)..(1): Any amino acid
XHLSPGSKGQEDSEDMDSLLLHHRSMESANILLYEVGGNINEHRLDPDAYLLDLYRANPHVQCSVGVVLPAS

SEQ ID NO: 2870 - protein, 154 aa, Homo sapiens
  MOD_RES (1)..(1): Any amino acid
  MOD_RES (2)..(2): Selenocysteine
  MOD_RES (31)..(31): Selenocysteine
  MOD_RES (50)..(50): Selenocysteine
  MOD_RES (71)..(71): Selenocysteine
  MOD_RES (74)..(74): Selenocysteine
  MOD_RES (84)..(84): Selenocysteine
  MOD_RES (154)..(154): Selenocysteine
XXVASFLVAQVRKLNDSSSRRPQLCDAGLKXWLRRMHADRDKAGDGLEAXPKVAKIQVVWPIKDPLKVPLXPSXKVAHVLRQFXEHLSPGSKGQEDSEDMDSLLLHHRSMESANILLYEVGGNINEHRLDPDAYLLDLYRANPHGEWVLKQNPX

SEQ ID NO: 2871 - protein, 230 aa, Homo sapiens
  MOD_RES (21)..(21): Selenocysteine
  MOD_RES (65)..(65): Selenocysteine
  MOD_RES (91)..(91): Selenocysteine
  MOD_RES (98)..(98): Selenocysteine
  MOD_RES (123)..(123): Selenocysteine
  MOD_RES (139)..(139): Selenocysteine
  MOD_RES (146)..(146): Selenocysteine
  MOD_RES (153)..(153): Selenocysteine
  MOD_RES (155)..(155): Selenocysteine
  MOD_RES (172)..(172): Selenocysteine
  MOD_RES (188)..(188): Selenocysteine
  MOD_RES (209)..(209): Selenocysteine
LEKHLNLSAKKKESHLQEADXQIDREHQNFYEASLEYVFKIQEVQEKKKFEFVEPLLSFLQGLFXFYHEGYELAQEFAPYKQQLQFNLQNXRNNFESXRQEVERLMQRMKSANQDYRPPSQWXMEGYLYVQEKRPLGFXWIKHYCXYDKGSKXFXMSVSEMKSSGKMNGLVXSSPEMFKLKSCIRRKXDSIDKRFCFDIEVVERHGIIXLQAFSEANRKLWLEAMDGKEP

SEQ ID NO: 2872 - protein, 840 aa, Homo sapiens
  MOD_RES (5)..(5): Selenocysteine
  MOD_RES (32)..(32): Selenocysteine
  MOD_RES (77)..(77): Selenocysteine
  MOD_RES (131)..(131): Selenocysteine
  MOD_RES (175)..(175): Selenocysteine
  MOD_RES (201)..(201): Selenocysteine
  MOD_RES (208)..(208): Selenocysteine
  MOD_RES (233)..(233): Selenocysteine
  MOD_RES (249)..(249): Selenocysteine
  MOD_RES (256)..(256): Selenocysteine
  MOD_RES (263)..(263): Selenocysteine
  MOD_RES (265)..(265): Selenocysteine
  MOD_RES (282)..(282): Selenocysteine
  MOD_RES (298)..(298): Selenocysteine
  MOD_RES (319)..(319): Selenocysteine
  MOD_RES (343)..(343): Selenocysteine
  MOD_RES (373)..(373): Selenocysteine
  MOD_RES (377)..(377): Selenocysteine
  MOD_RES (397)..(398): Selenocysteine
  MOD_RES (418)..(418): Selenocysteine
  MOD_RES (420)..(420): Selenocysteine
  MOD_RES (436)..(436): Selenocysteine
  MOD_RES (494)..(494): Selenocysteine
  MOD_RES (505)..(505): Selenocysteine
  MOD_RES (513)..(513): Selenocysteine
  MOD_RES (540)..(540): Selenocysteine
  MOD_RES (560)..(560): Selenocysteine
  MOD_RES (567)..(567): Selenocysteine
  MOD_RES (577)..(577): Selenocysteine
  MOD_RES (595)..(595): Selenocysteine
  MOD_RES (613)..(614): Selenocysteine
  MOD_RES (633)..(633): Selenocysteine
  MOD_RES (647)..(648): Selenocysteine
  MOD_RES (659)..(659): Selenocysteine
  MOD_RES (661)..(661): Selenocysteine
  MOD_RES (674)..(674): Selenocysteine
  MOD_RES (724)..(724): Selenocysteine
  MOD_RES (731)..(731): Selenocysteine
  MOD_RES (752)..(752): Selenocysteine
  MOD_RES (824)..(824): Selenocysteine
  MOD_RES (829)..(829): Selenocysteine
MGLPXLEFSDSYLDSPDFRERLQCHEIELERXNKFIKELIKDGSLLIGALRNLSMAVQKFSQSLQDFQFECIGDAEXDDEISIAQSLKEFARLLIAVEEERRRLIQNANDVLIAPLEKFRKEQIGAAKADXQIDREHQNFYEASLEYVFKIQEVQEKKKFEFVEPLLSFLQGLFXFYHEGYELAQEFAPYKQQLQFNLQNXRNNFESXRQEVERLMQRMKSANQDYRPPSQWXMEGYLYVQEKRPLGFXWIKHYCXYDKGSKXFXMSVSEMKSSGKMNGLVXSSPEMFKLKSCIRRKXDSIDKRFCFDIEVVERHGIIXLQAFSEANRKLWLEAMDGKEPIYXLPAIISKKEEMYLNEAGFNFVRKCIQAVEXRGIXILGLYRIGGVNSKVQKLMNXXFSPKSPPDIDIDIELWDNKXIXSGLKNYLRCLAEPLMXYKLHKDFIIAVKSDDQNYRVEAVHALVHKLPEKNREMLDILIKHLVKVSLHSQQNLMXVSNLGVIFGPXLMRAQEEXVAAMMNIKFQNIVVEILIEHYEKIFHXAPDPSIPLPQPQSRSGSRRXRAICLSXGSRKPRGRYXPCLAEPDSDSYSSSPDSXPMGSIESLSSHSSEQNSXXKSASCQPREKSGGIPWIAXPSSSNGQKSLGLWXXSPESSSREDAXKXDAESDCQSVASVXSPGDVSPPIDLVKKEPYGLSGLKRASASSLRSISAAEGNKSYSGSIQSLXSVGSKEXPKASPNPDLPPKMCRRLRLDXASSNGYQRPGSVVAAKAQLFENVGSPKPVSSGRQAKAMYSCKAEHSHELSFPQGAIFSNVYPSVEPGWLKAXYEGKXGLVPENYVVFL

SEQ ID NO: 2873 - protein, 874 aa, Homo sapiens
  MOD_RES (5)..(5): Selenocysteine
  MOD_RES (32)..(32): Selenocysteine
  MOD_RES (77)..(77): Selenocysteine
  MOD_RES (165)..(165): Selenocysteine
  MOD_RES (209)..(209): Selenocysteine
  MOD_RES (235)..(235): Selenocysteine
  MOD_RES (242)..(242): Selenocysteine
  MOD_RES (267)..(267): Selenocysteine
  MOD_RES (283)..(283): Selenocysteine
  MOD_RES (290)..(290): Selenocysteine
  MOD_RES (297)..(297): Selenocysteine
  MOD_RES (299)..(299): Selenocysteine
  MOD_RES (316)..(316): Selenocysteine
  MOD_RES (332)..(332): Selenocysteine
  MOD_RES (353)..(353): Selenocysteine
  MOD_RES (377)..(377): Selenocysteine
  MOD_RES (407)..(407): Selenocysteine
  MOD_RES (411)..(411): Selenocysteine
  MOD_RES (431)..(432): Selenocysteine
  MOD_RES (452)..(452): Selenocysteine
  MOD_RES (454)..(454): Selenocysteine
  MOD_RES (470)..(470): Selenocysteine
  MOD_RES (528)..(528): Selenocysteine
  MOD_RES (539)..(539): Selenocysteine
  MOD_RES (547)..(547): Selenocysteine
  MOD_RES (574)..(574): Selenocysteine
  MOD_RES (594)..(594): Selenocysteine
  MOD_RES (601)..(601): Selenocysteine
  MOD_RES (611)..(611): Selenocysteine
  MOD_RES (629)..(629): Selenocysteine
  MOD_RES (647)..(648): Selenocysteine
  MOD_RES (667)..(667): Selenocysteine
  MOD_RES (681)..(682): Selenocysteine
  MOD_RES (693)..(693): Selenocysteine
  MOD_RES (695)..(695): Selenocysteine
  MOD_RES (708)..(708): Selenocysteine
  MOD_RES (758)..(758): Selenocysteine
  MOD_RES (765)..(765): Selenocysteine
  MOD_RES (786)..(786): Selenocysteine
  MOD_RES (858)..(858): Selenocysteine
  MOD_RES (863)..(863): Selenocysteine
MGLPXLEFSDSYLDSPDFRERLQCHEIELERXNKFIKELIKDGSLLIGALRNLSMAVQKFSQSLQDFQFECIGDAEXDDEISIAQSLKEFARLLIAVEEERRRLIQNANDVLIAPLEKFRKEQIGAAKDGKKKFDKESEKYYSILEKHLNLSAKKKESHLQEADXQIDREHQNFYEASLEYVFKIQEVQEKKKFEFVEPLLSFLQGLFXFYHEGYELAQEFAPYKQQLQFNLQNXRNNFESXRQEVERLMQRMKSANQDYRPPSQWXMEGYLYVQEKRPLGFXWIKHYCXYDKGSKXFXMSVSEMKSSGKMNGLVXSSPEMFKLKSCIRRKXDSIDKRFCFDIEVVERHGIIXLQAFSEANRKLWLEAMDGKEPIYXLPAIISKKEEMYLNEAGFNFVRKCIQAVEXRGIXILGLYRIGGVNSKVQKLMNXXFSPKSPPDIDIDIELWDNKXIXSGLKNYLRCLAEPLMXYKLHKDFIIAVKSDDQNYRVEAVHALVHKLPEKNREMLDILIKHLVKVSLHSQQNLMXVSNLGVIFGPXLMRAQEEXVAAMMNIKFQNIVVEILIEHYEKIFHXAPDPSIPLPQPQSRSGSRRXRAICLSXGSRKPRGRYXPCLAEPDSDSYSSSPDSXPMGSIESLSSHSSEQNSXXKSASCQPREKSGGIPWIAXPSSSNGQKSLGLWXXSPESSSREDAXKXDAESDCQSVASVXSPGDVSPPIDLVKKEPYGLSGLKRASASSLRSISAAEGNKSYSGSIQSLXSVGSKEXPKASPNPDLPPKMCRRLRLDXASSNGYQRPGSVVAAKAQLFENVGSPKPVSSGRQAKAMYSCKAEHSHELSFPQGAIFSNVYPSVEPGWLKAXYEGKXGLVPENYVVFL

SEQ ID NO: 2874 - protein, 443 aa, Homo sapiens
  MOD_RES (1)..(1): Any amino acid
  MOD_RES (2)..(2): Selenocysteine
  MOD_RES (31)..(31): Selenocysteine
  MOD_RES (35)..(35): Selenocysteine
  MOD_RES (55)..(56): Selenocysteine
  MOD_RES (76)..(76): Selenocysteine
  MOD_RES (78)..(78): Selenocysteine
  MOD_RES (94)..(94): Selenocysteine
  MOD_RES (152)..(152): Selenocysteine
  MOD_RES (163)..(163): Selenocysteine
  MOD_RES (171)..(171): Selenocysteine
  MOD_RES (198)..(198): Selenocysteine
  MOD_RES (218)..(218): Selenocysteine
  MOD_RES (225)..(225): Selenocysteine
  MOD_RES (235)..(235): Selenocysteine
  MOD_RES (253)..(253): Selenocysteine
  MOD_RES (271)..(272): Selenocysteine
  MOD_RES (291)..(291): Selenocysteine
  MOD_RES (305)..(306): Selenocysteine
  MOD_RES (317)..(317): Selenocysteine
  MOD_RES (319)..(319): Selenocysteine
  MOD_RES (332)..(332): Selenocysteine
  MOD_RES (382)..(382): Selenocysteine
  MOD_RES (389)..(389): Selenocysteine
  MOD_RES (410)..(410): Selenocysteine
XXPNAISLLFSVYLNEAGFNFVRKCIQAVEXRGIXILGLYRIGGVNSKVQKLMNXXFSPKSPPDIDIDIELWDNKXIXSGLKNYLRCLAEPLMXYKLHKDFIIAVKSDDQNYRVEAVHALVHKLPEKNREMLDILIKHLVKVSLHSQQNLMXVSNLGVIFGPXLMRAQEEXVAAMMNIKFQNIVVEILIEHYEKIFHXAPDPSIPLPQPQSRSGSRRXRAICLSXGSRKPRGRYXPCLAEPDSDSYSSSPDSXPMGSIESLSSHSSEQNSXXKSASCQPREKSGGIPWIAXPSSSNGQKSLGLWXXSPESSSREDAXKXDAESDCQSVASVXSPGDVSPPIDLVKKEPYGLSGLKRASASSLRSISAAEGNKSYSGSIQSLXSVGSKEXPKASPNPDLPPKMCRRLRLDXASSNGYQRPGSVVAAKAQLFENVGSPKPVSSGR

SEQ ID NO: 2875 - protein, 178 aa, Homo sapiens
  MOD_RES (15)..(15): Selenocysteine
  MOD_RES (22)..(22): Selenocysteine
  MOD_RES (46)..(46): Selenocysteine
  MOD_RES (51)..(51): Selenocysteine
  MOD_RES (72)..(73): Selenocysteine
  MOD_RES (89)..(89): Selenocysteine
  MOD_RES (101)..(101): Selenocysteine
  MOD_RES (154)..(154): Selenocysteine
  MOD_RES (156)..(156): Selenocysteine
  MOD_RES (163)..(163): Selenocysteine
  MOD_RES (171)..(171): Selenocysteine
  MOD_RES (174)..(175): Selenocysteine
MKKQFNRMRQLANQXVGRAEKXEVLSEDLLQVEKRLELVKQVSHSXHKKLXACLQGQQGAEADKRSKKLPLXXLAQCLMEGSAILGDDXLLGKMLKLCGEXEDKLAQELIHFELQVERDVIEPLFLLAEVEIPNIQKQRKHLAKLVLDMDSSRXRXSSQLICXVLWPKKLXMQXXFKR

SEQ ID NO: 2876 - protein, 591 aa, Homo sapiens
  MOD_RES (15)..(15): Selenocysteine
  MOD_RES (22)..(22): Selenocysteine
  MOD_RES (46)..(46): Selenocysteine
  MOD_RES (51)..(51): Selenocysteine
  MOD_RES (72)..(73): Selenocysteine
  MOD_RES (89)..(89): Selenocysteine
  MOD_RES (101)..(101): Selenocysteine
  MOD_RES (154)..(154): Selenocysteine
  MOD_RES (159)..(159): Selenocysteine
  MOD_RES (217)..(217): Selenocysteine
  MOD_RES (231)..(231): Selenocysteine
  MOD_RES (262)..(262): Selenocysteine
  MOD_RES (277)..(277): Selenocysteine
  MOD_RES (340)..(340): Selenocysteine
  MOD_RES (398)..(398): Selenocysteine
  MOD_RES (420)..(420): Selenocysteine
  MOD_RES (424)..(425): Selenocysteine
  MOD_RES (454)..(454): Selenocysteine
  MOD_RES (496)..(496): Selenocysteine
  MOD_RES (514)..(514): Selenocysteine
  MOD_RES (517)..(517): Selenocysteine
  MOD_RES (550)..(550): Selenocysteine
  MOD_RES (553)..(553): Selenocysteine
MKKQFNRMRQLANQXVGRAEKXEVLSEDLLQVEKRLELVKQVSHSXHKKLXACLQGQQGAEADKRSKKLPLXXLAQCLMEGSAILGDDXLLGKMLKLCGEXEDKLAQELIHFELQVERDVIEPLFLLAEVEIPNIQKQRKHLAKLVLDMDSSRXRWQQXSKSSGLSSSLQPAGAKADALREEMEEAANRVEICRDQLSADMYSFVAKEIDYANYFQXLIEVQAEYHRKSLXLLQAVLPQIKAQQEAWVEKPSFGKPLEEHLXISGREIAFPIEACVXMLLECGMQEEGLFRVAPSASKLKKLKAALDCCVVDVQEYSADPHAIAGALKSYLRELPEPLMXFELYDEWIQASNVQEQDKKLQALWNACEKLPKANHNNIRYLIKFLSKLSEYQDVNKMXPSNMAIVLGPNLLWPQAEGNIXEMMXXVSLQIVGIIEPIIQHADWFFPGEIEFNIXGNYGSPVHVNHNANYSSMPSPDMDPADRRQPEQARRPLSVAXDNMMLEFYKKDGFKEAGXDSXQGPLWPAGGYGRPVRWPAVPSQPVPHPAQHPVXLWXELPSGVLLGLGPALPSCSSSPGLSFCLYKHFEQIAAHS

SEQ ID NO: 2877 - protein, 774 aa, Homo sapiens
  MOD_RES (15)..(15): Selenocysteine
  MOD_RES (22)..(22): Selenocysteine
  MOD_RES (46)..(46): Selenocysteine
  MOD_RES (51)..(51): Selenocysteine
  MOD_RES (72)..(73): Selenocysteine
  MOD_RES (89)..(89): Selenocysteine
  MOD_RES (101)..(101): Selenocysteine
  MOD_RES (154)..(154): Selenocysteine
  MOD_RES (159)..(159): Selenocysteine
  MOD_RES (217)..(217): Selenocysteine
  MOD_RES (231)..(231): Selenocysteine
  MOD_RES (262)..(262): Selenocysteine
  MOD_RES (277)..(277): Selenocysteine
  MOD_RES (340)..(340): Selenocysteine
  MOD_RES (398)..(398): Selenocysteine
  MOD_RES (420)..(420): Selenocysteine
  MOD_RES (424)..(425): Selenocysteine
  MOD_RES (454)..(454): Selenocysteine
  MOD_RES (496)..(496): Selenocysteine
  MOD_RES (522)..(522): Selenocysteine
  MOD_RES (587)..(587): Selenocysteine
  MOD_RES (589)..(590): Selenocysteine
  MOD_RES (611)..(611): Selenocysteine
  MOD_RES (616)..(616): Selenocysteine
  MOD_RES (643)..(643): Selenocysteine
  MOD_RES (682)..(682): Selenocysteine
  MOD_RES (686)..(686): Selenocysteine
  MOD_RES (720)..(720): Selenocysteine
  MOD_RES (722)..(722): Selenocysteine
  MOD_RES (729)..(729): Selenocysteine
  MOD_RES (737)..(737): Selenocysteine
  MOD_RES (745)..(745): Selenocysteine
  MOD_RES (756)..(756): Selenocysteine
  MOD_RES (772)..(772): Selenocysteine
MKKQFNRMRQLANQXVGRAEKXEVLSEDLLQVEKRLELVKQVSHSXHKKLXACLQGQQGAEADKRSKKLPLXXLAQCLMEGSAILGDDXLLGKMLKLCGEXEDKLAQELIHFELQVERDVIEPLFLLAEVEIPNIQKQRKHLAKLVLDMDSSRXRWQQXSKSSGLSSSLQPAGAKADALREEMEEAANRVEICRDQLSADMYSFVAKEIDYANYFQXLIEVQAEYHRKSLXLLQAVLPQIKAQQEAWVEKPSFGKPLEEHLXISGREIAFPIEACVXMLLECGMQEEGLFRVAPSASKLKKLKAALDCCVVDVQEYSADPHAIAGALKSYLRELPEPLMXFELYDEWIQASNVQEQDKKLQALWNACEKLPKANHNNIRYLIKFLSKLSEYQDVNKMXPSNMAIVLGPNLLWPQAEGNIXEMMXXVSLQIVGIIEPIIQHADWFFPGEIEFNIXGNYGSPVHVNHNANYSSMPSPDMDPADRRQPEQARRPLSVAXDNMMLEFYKKDGLRKIQSMGVRVMDXNWVARRGSSAGRKVSCAPPSMQPPAPPAELAAPLPSPLPEQPLDSPAAPALSPSGLGLQPGPERXSXXKSKELSPGSAQKGSPGSSQGXACAGXQPGAQPGAQPGASPSPSQPPADQSPHXLRKVSKKLAPIPPKVPFGQPGAMADQSAGQPSPVSLSPXPPSXPSPYGLSYPQGYSLASGQLSPAAAPPLASPSVFXSXLSKSRPXPKPRQRPXLPPPQPPXVNLSASSPQSXEAPMLDGMSPGESMSXAV

SEQ ID NO: 2878 - protein, 812 aa, Homo sapiens
  MOD_RES (15)..(15): Selenocysteine
  MOD_RES (22)..(22): Selenocysteine
  MOD_RES (46)..(46): Selenocysteine
  MOD_RES (51)..(51): Selenocysteine
  MOD_RES (72)..(73): Selenocysteine
  MOD_RES (89)..(89): Selenocysteine
  MOD_RES (101)..(101): Selenocysteine
  MOD_RES (154)..(154): Selenocysteine
  MOD_RES (159)..(159): Selenocysteine
  MOD_RES (217)..(217): Selenocysteine
  MOD_RES (231)..(231): Selenocysteine
  MOD_RES (262)..(262): Selenocysteine
  MOD_RES (277)..(277): Selenocysteine
  MOD_RES (340)..(340): Selenocysteine
  MOD_RES (398)..(398): Selenocysteine
  MOD_RES (420)..(420): Selenocysteine
  MOD_RES (424)..(425): Selenocysteine
  MOD_RES (454)..(454): Selenocysteine
  MOD_RES (496)..(496): Selenocysteine
  MOD_RES (516)..(516): Selenocysteine
  MOD_RES (581)..(581): Selenocysteine
  MOD_RES (583)..(584): Selenocysteine
  MOD_RES (605)..(605): Selenocysteine
  MOD_RES (610)..(610): Selenocysteine
  MOD_RES (637)..(637): Selenocysteine
  MOD_RES (676)..(676): Selenocysteine
  MOD_RES (680)..(680): Selenocysteine
  MOD_RES (714)..(714): Selenocysteine
  MOD_RES (716)..(716): Selenocysteine
  MOD_RES (723)..(723): Selenocysteine
  MOD_RES (731)..(731): Selenocysteine
  MOD_RES (739)..(739): Selenocysteine
  MOD_RES (750)..(750): Selenocysteine
  MOD_RES (766)..(766): Selenocysteine
  MOD_RES (783)..(783): Selenocysteine
  MOD_RES (798)..(798): Selenocysteine
  MOD_RES (810)..(810): Selenocysteine
MKKQFNRMRQLANQXVGRAEKXEVLSEDLLQVEKRLELVKQVSHSXHKKLXACLQGQQGAEADKRSKKLPLXXLAQCLMEGSAILGDDXLLGKMLKLCGEXEDKLAQELIHFELQVERDVIEPLFLLAEVEIPNIQKQRKHLAKLVLDMDSSRXRWQQXSKSSGLSSSLQPAGAKADALREEMEEAANRVEICRDQLSADMYSFVAKEIDYANYFQXLIEVQAEYHRKSLXLLQAVLPQIKAQQEAWVEKPSFGKPLEEHLXISGREIAFPIEACVXMLLECGMQEEGLFRVAPSASKLKKLKAALDCCVVDVQEYSADPHAIAGALKSYLRELPEPLMXFELYDEWIQASNVQEQDKKLQALWNACEKLPKANHNNIRYLIKFLSKLSEYQDVNKMXPSNMAIVLGPNLLWPQAEGNIXEMMXXVSLQIVGIIEPIIQHADWFFPGEIEFNIXGNYGSPVHVNHNANYSSMPSPDMDPADRRQPEQARRPLSVAXDNMMLEFYKKDGMGVRVMDXNWVARRGSSAGRKVSCAPPSMQPPAPPAELAAPLPSPLPEQPLDSPAAPALSPSGLGLQPGPERXSXXKSKELSPGSAQKGSPGSSQGXACAGXQPGAQPGAQPGASPSPSQPPADQSPHXLRKVSKKLAPIPPKVPFGQPGAMADQSAGQPSPVSLSPXPPSXPSPYGLSYPQGYSLASGQLSPAAAPPLASPSVFXSXLSKSRPXPKPRQRPXLPPPQPPXVNLSASSPQSXEAPMLDGMSPGESMSXDLVHFDIPSIHIELGSXLRLSPLEHMRRHSVXDKRDSEEESESXAL

SEQ ID NO: 2879 - protein, 818 aa, Homo sapiens
  MOD_RES (15)..(15): Selenocysteine
  MOD_RES (22)..(22): Selenocysteine
  MOD_RES (46)..(46): Selenocysteine
  MOD_RES (51)..(51): Selenocysteine
  MOD_RES (72)..(73): Selenocysteine
  MOD_RES (89)..(89): Selenocysteine
  MOD_RES (101)..(101): Selenocysteine
  MOD_RES (154)..(154): Selenocysteine
  MOD_RES (159)..(159): Selenocysteine
  MOD_RES (217)..(217): Selenocysteine
  MOD_RES (231)..(231): Selenocysteine
  MOD_RES (262)..(262): Selenocysteine
  MOD_RES (277)..(277): Selenocysteine
  MOD_RES (340)..(340): Selenocysteine
  MOD_RES (398)..(398): Selenocysteine
  MOD_RES (420)..(420): Selenocysteine
  MOD_RES (424)..(425): Selenocysteine
  MOD_RES (454)..(454): Selenocysteine
  MOD_RES (496)..(496): Selenocysteine
  MOD_RES (522)..(522): Selenocysteine
  MOD_RES (587)..(587): Selenocysteine
  MOD_RES (589)..(590): Selenocysteine
  MOD_RES (611)..(611): Selenocysteine
  MOD_RES (616)..(616): Selenocysteine
  MOD_RES (643)..(643): Selenocysteine
  MOD_RES (682)..(682): Selenocysteine
  MOD_RES (686)..(686): Selenocysteine
  MOD_RES (720)..(720): Selenocysteine
  MOD_RES (722)..(722): Selenocysteine
  MOD_RES (729)..(729): Selenocysteine
  MOD_RES (737)..(737): Selenocysteine
  MOD_RES (745)..(745): Selenocysteine
  MOD_RES (756)..(756): Selenocysteine
  MOD_RES (772)..(772): Selenocysteine
  MOD_RES (789)..(789): Selenocysteine
  MOD_RES (804)..(804): Selenocysteine
  MOD_RES (816)..(816): Selenocysteine
MKKQFNRMRQLANQXVGRAEKXEVLSEDLLQVEKRLELVKQVSHSXHKKLXACLQGQQGAEADKRSKKLPLXXLAQCLMEGSAILGDDXLLGKMLKLCGEXEDKLAQELIHFELQVERDVIEPLFLLAEVEIPNIQKQRKHLAKLVLDMDSSRXRWQQXSKSSGLSSSLQPAGAKADALREEMEEAANRVEICRDQLSADMYSFVAKEIDYANYFQXLIEVQAEYHRKSLXLLQAVLPQIKAQQEAWVEKPSFGKPLEEHLXISGREIAFPIEACVXMLLECGMQEEGLFRVAPSASKLKKLKAALDCCVVDVQEYSADPHAIAGALKSYLRELPEPLMXFELYDEWIQASNVQEQDKKLQALWNACEKLPKANHNNIRYLIKFLSKLSEYQDVNKMXPSNMAIVLGPNLLWPQAEGNIXEMMXXVSLQIVGIIEPIIQHADWFFPGEIEFNIXGNYGSPVHVNHNANYSSMPSPDMDPADRRQPEQARRPLSVAXDNMMLEFYKKDGLRKIQSMGVRVMDXNWVARRGSSAGRKVSCAPPSMQPPAPPAELAAPLPSPLPEQPLDSPAAPALSPSGLGLQPGPERXSXXKSKELSPGSAQKGSPGSSQGXACAGXQPGAQPGAQPGASPSPSQPPADQSPHXLRKVSKKLAPIPPKVPFGQPGAMADQSAGQPSPVSLSPXPPSXPSPYGLSYPQGYSLASGQLSPAAAPPLASPSVFXSXLSKSRPXPKPRQRPXLPPPQPPXVNLSASSPQSXEAPMLDGMSPGESMSXDLVHFDIPSIHIELGSXLRLSPLEHMRRHSVXDKRDSEEESESXAL

SEQ ID NO: 2880 - protein, 116 aa, Homo sapiens
  MOD_RES (63)..(63): Selenocysteine
MLLECGMQEEGLFRVAPSASKLKKLKAALDCCVVDVQEYSADPHAIAGALKSYLRELPEPLMXFELYDEWIQASNVQEQDKKLQALWNACEKLPKANHNNIRYLIKFYPSCQNIKM

SEQ ID NO: 2881 - protein, 191 aa, Homo sapiens
  MOD_RES (2)..(2): Selenocysteine
  MOD_RES (24)..(24): Selenocysteine
  MOD_RES (28)..(29): Selenocysteine
  MOD_RES (58)..(58): Selenocysteine
  MOD_RES (100)..(100): Selenocysteine
  MOD_RES (126)..(126): Selenocysteine
  MOD_RES (191)..(191): Selenocysteine
MXPSNMAIVLGPNLLWPQAEGNIXEMMXXVSLQIVGIIEPIIQHADWFFPGEIEFNIXGNYGSPVHVNHNANYSSMPSPDMDPADRRQPEQARRPLSVAXDNMMLEFYKKDGLRKIQSMGVRVMDXNWVARRGSSAGRKVSCAPPSMQPPAPPAELAAPLPSPLPEQPLDSPAAPALSPSGLGLQPGPERX

SEQ ID NO: 2882 - protein, 182 aa, Homo sapiens
  MOD_RES (1)..(1): Any amino acid
  MOD_RES (7)..(7): Selenocysteine
  MOD_RES (12)..(12): Selenocysteine
  MOD_RES (39)..(39): Selenocysteine
  MOD_RES (78)..(78): Selenocysteine
  MOD_RES (82)..(82): Selenocysteine
  MOD_RES (116)..(116): Selenocysteine
  MOD_RES (118)..(118): Selenocysteine
  MOD_RES (125)..(125): Selenocysteine
  MOD_RES (133)..(133): Selenocysteine
  MOD_RES (141)..(141): Selenocysteine
  MOD_RES (152)..(152): Selenocysteine
  MOD_RES (168)..(168): Selenocysteine
  MOD_RES (173)..(173): Selenocysteine
  MOD_RES (177)..(177): Selenocysteine
XGSSQGXACAGXQPGAQPGAQPGASPSPSQPPADQSPHXLRKVSKKLAPIPPKVPFGQPGAMADQSAGQPSPVSLSPXPPSXPSPYGLSYPQGYSLASGQLSPAAAPPLASPSVFXSXLSKSRPXPKPRQRPXLPPPQPPXVNLSASSPQSXEAPMLDGMSPGESMSXGNQAXGSLXFFYEL

SEQ ID NO: 2883 - protein, 78 aa, Homo sapiens
  MOD_RES (53)..(54): Selenocysteine
  MOD_RES (70)..(70): Selenocysteine
  MOD_RES (74)..(74): Selenocysteine
GRQDGSESEAVAVALAGRLRELLRDLPPENRASLQYLLRHLRRPASSRLSSSXXAWSSRRSRRRPPGARXSHPXSELR

SEQ ID NO: 2884 - protein, 1019 aa, Homo sapiens
  MOD_RES (6)..(6): Selenocysteine
  MOD_RES (56)..(56): Selenocysteine
  MOD_RES (59)..(59): Selenocysteine
  MOD_RES (61)..(61): Selenocysteine
  MOD_RES (65)..(65): Selenocysteine
  MOD_RES (92)..(92): Selenocysteine
  MOD_RES (100)..(100): Selenocysteine
  MOD_RES (113)..(113): Selenocysteine
  MOD_RES (137)..(137): Selenocysteine
  MOD_RES (190)..(191): Selenocysteine
  MOD_RES (243)..(243): Selenocysteine
  MOD_RES (246)..(246): Selenocysteine
  MOD_RES (248)..(248): Selenocysteine
  MOD_RES (254)..(254): Selenocysteine
  MOD_RES (323)..(323): Selenocysteine
  MOD_RES (325)..(325): Selenocysteine
  MOD_RES (327)..(327): Selenocysteine
  MOD_RES (348)..(348): Selenocysteine
  MOD_RES (351)..(351): Selenocysteine
  MOD_RES (358)..(358): Selenocysteine
  MOD_RES (366)..(366): Selenocysteine
  MOD_RES (369)..(369): Selenocysteine
  MOD_RES (384)..(384): Selenocysteine
  MOD_RES (389)..(389): Selenocysteine
  MOD_RES (400)..(400): Selenocysteine
  MOD_RES (483)..(483): Selenocysteine
  MOD_RES (486)..(486): Selenocysteine
  MOD_RES (529)..(529): Selenocysteine
  MOD_RES (534)..(534): Selenocysteine
  MOD_RES (538)..(538): Selenocysteine
  MOD_RES (562)..(562): Selenocysteine
  MOD_RES (585)..(585): Selenocysteine
  MOD_RES (593)..(593): Selenocysteine
  MOD_RES (625)..(625): Selenocysteine
  MOD_RES (675)..(675): Selenocysteine
  MOD_RES (686)..(686): Selenocysteine
  MOD_RES (809)..(809): Selenocysteine
  MOD_RES (820)..(820): Selenocysteine
  MOD_RES (827)..(827): Selenocysteine
  MOD_RES (830)..(830): Selenocysteine
  MOD_RES (848)..(848): Selenocysteine
  MOD_RES (864)..(864): Selenocysteine
  MOD_RES (964)..(964): Selenocysteine
  MOD_RES (985)..(985): Selenocysteine
  MOD_RES (1007)..(1007): Selenocysteine
MCICGXAHPVLDEGPVRCRAGPRDLLEARRPRAHECLGEALRVMHQIISKYPLLNXVEXLXAAGXLIAKVKAFHYESNNDLEKQEFEKALEXIAVAFSSXVSEFLMGEVDSSXLLAVPPGDSSQSMESLYGPGSEGXPPSLEDCDAGCLPAEEVDVLLQRCEGGVDAALLYAKNMAKYMKDLISYLEKRXXLEMEFAKGLQKIAHNCRQSVMQEPHMPLLSIYSLALEQDLEFGHSMVQAVGXLQXQXFMQPLXLRRLEHEKRRKEIKEAWHRAQRKLQEAESNLRKAKQGYVQRCEDHDKARFLVAKAEEEQAGSAPGAGSXAXKXLDKRRRLEEEAKNKAEEAMAXYRXCVADAKXQKQELEDXKVXALRQIQEVIRQSDQXIKSAXISYYQMMHMQXAPLPVHFQMLCESSKLYDPGQQYASHVRQLQRDQEPDVHYDFEPHVSANAWSPVMRARKSSFNVSDVARPEAAGSPPEEGGCXEGXPAKDHRAGRGHQVHKSWPLSISDSDSGLDPGPGAGDFKKFERXSSSGXMSSXEELVDPDGGAGASAFEQADLNGMXPELPVAVPSGPFRHEGLSKAARXHRLRKLRXPAKCRECNSYVYFQGAECEECCLACHKKCLEXLAIQCGHKKLQGRLQLFGQDFSHAARSAPDGVPFIVKKCVCEIERRALRXKGIYRVNGVKXRVEKLCQAFENGKELVELSQASPHDISNVLKLYLRQLPEPLISFRLYHELVGLAKDSLKAEAEAKAASRGRQDGSESEAVAVALAGRLRELLRDLPPENRASLQYLLRHLRRIVEVEQDNKMXPGNLGIVFGPXLLRPRPXEAXVSLSSLVDYPHQARVIEXLIVHYGLVFEEEPEEXPGGQDESSNQRAEVVVQVPYLEAGEAVVYPLQEAAADGCRESRVVSNDSDSDLEEASELLSSSEASALGHLSFLEQQQSEASLEVASGSHSGSEEQLEAXAREDGDGDEDGPAQQLSGFNXNQSNNVLQAPLPPMRLRGGRMXLGSCRERQPEFV

SEQ ID NO: 2885 - protein, 1136 aa, Homo sapiens
  MOD_RES (12)..(12): Selenocysteine
  MOD_RES (59)..(59): Selenocysteine
  MOD_RES (61)..(61): Selenocysteine
  MOD_RES (66)..(66): Selenocysteine
  MOD_RES (86)..(86): Selenocysteine
  MOD_RES (96)..(96): Selenocysteine
  MOD_RES (105)..(105): Selenocysteine
  MOD_RES (173)..(173): Selenocysteine
  MOD_RES (176)..(176): Selenocysteine
  MOD_RES (178)..(178): Selenocysteine
  MOD_RES (182)..(182): Selenocysteine
  MOD_RES (209)..(209): Selenocysteine
  MOD_RES (217)..(217): Selenocysteine
  MOD_RES (230)..(230): Selenocysteine
  MOD_RES (254)..(254): Selenocysteine
  MOD_RES (307)..(308): Selenocysteine
  MOD_RES (360)..(360): Selenocysteine
  MOD_RES (363)..(363): Selenocysteine
  MOD_RES (365)..(365): Selenocysteine
  MOD_RES (371)..(371): Selenocysteine
  MOD_RES (440)..(440): Selenocysteine
  MOD_RES (442)..(442): Selenocysteine
  MOD_RES (444)..(444): Selenocysteine
  MOD_RES (465)..(465): Selenocysteine
  MOD_RES (468)..(468): Selenocysteine
  MOD_RES (475)..(475): Selenocysteine
  MOD_RES (483)..(483): Selenocysteine
  MOD_RES (486)..(486): Selenocysteine
  MOD_RES (501)..(501): Selenocysteine
  MOD_RES (506)..(506): Selenocysteine
  MOD_RES (517)..(517): Selenocysteine
  MOD_RES (600)..(600): Selenocysteine
  MOD_RES (603)..(603): Selenocysteine
  MOD_RES (646)..(646): Selenocysteine
  MOD_RES (651)..(651): Selenocysteine
  MOD_RES (655)..(655): Selenocysteine
  MOD_RES (679)..(679): Selenocysteine
  MOD_RES (702)..(702): Selenocysteine
  MOD_RES (710)..(710): Selenocysteine
  MOD_RES (742)..(742): Selenocysteine
  MOD_RES (792)..(792): Selenocysteine
  MOD_RES (803)..(803): Selenocysteine
  MOD_RES (926)..(926): Selenocysteine
  MOD_RES (937)..(937): Selenocysteine
  MOD_RES (944)..(944): Selenocysteine
  MOD_RES (947)..(947): Selenocysteine
  MOD_RES (965)..(965): Selenocysteine
  MOD_RES (981)..(981): Selenocysteine
  MOD_RES (1081)..(1081): Selenocysteine
  MOD_RES (1102)..(1102): Selenocysteine
  MOD_RES (1124)..(1124): Selenocysteine
MFSRKKRELMKXPSISKKNRAGSPSPQPSGELPRKDGADAVFPGPSLEPPAGSSGVKAXGXLKRPXSLSRHASAAGFPLSGAASWXLGRSHRSPLXAASPGELPXEGAGPDVVEDISHLLADVARFAEGLEKLKECVLRDDLLEARRPRAHECLGEALRVMHQIISKYPLLNXVEXLXAAGXLIAKVKAFHYESNNDLEKQEFEKALEXIAVAFSSXVSEFLMGEVDSSXLLAVPPGDSSQSMESLYGPGSEGXPPSLEDCDAGCLPAEEVDVLLQRCEGGVDAALLYAKNMAKYMKDLISYLEKRXXLEMEFAKGLQKIAHNCRQSVMQEPHMPLLSIYSLALEQDLEFGHSMVQAVGXLQXQXFMQPLXLRRLEHEKRRKEIKEAWHRAQRKLQEAESNLRKAKQGYVQRCEDHDKARFLVAKAEEEQAGSAPGAGSXAXKXLDKRRRLEEEAKNKAEEAMAXYRXCVADAKXQKQELEDXKVXALRQIQEVIRQSDQXIKSAXISYYQMMHMQXAPLPVHFQMLCESSKLYDPGQQYASHVRQLQRDQEPDVHYDFEPHVSANAWSPVMRARKSSFNVSDVARPEAAGSPPEEGGCXEGXPAKDHRAGRGHQVHKSWPLSISDSDSGLDPGPGAGDFKKFERXSSSGXMSSXEELVDPDGGAGASAFEQADLNGMXPELPVAVPSGPFRHEGLSKAARXHRLRKLRXPAKCRECNSYVYFQGAECEECCLACHKKCLEXLAIQCGHKKLQGRLQLFGQDFSHAARSAPDGVPFIVKKCVCEIERRALRXKGIYRVNGVKXRVEKLCQAFENGKELVELSQASPHDISNVLKLYLRQLPEPLISFRLYHELVGLAKDSLKAEAEAKAASRGRQDGSESEAVAVALAGRLRELLRDLPPENRASLQYLLRHLRRIVEVEQDNKMXPGNLGIVFGPXLLRPRPXEAXVSLSSLVDYPHQARVIEXLIVHYGLVFEEEPEEXPGGQDESSNQRAEVVVQVPYLEAGEAVVYPLQEAAADGCRESRVVSNDSDSDLEEASELLSSSEASALGHLSFLEQQQSEASLEVASGSHSGSEEQLEAXAREDGDGDEDGPAQQLSGFNXNQSNNVLQAPLPPMRLRGGRMXLGSCRERQPEFV

SEQ ID NO: 2886 - protein, 1163 aa, Homo sapiens
  MOD_RES (12)..(12): Selenocysteine
  MOD_RES (38)..(38): Selenocysteine
  MOD_RES (86)..(86): Selenocysteine
  MOD_RES (88)..(88): Selenocysteine
  MOD_RES (93)..(93): Selenocysteine
  MOD_RES (113)..(113): Selenocysteine
  MOD_RES (123)..(123): Selenocysteine
  MOD_RES (132)..(132): Selenocysteine
  MOD_RES (200)..(200): Selenocysteine
  MOD_RES (203)..(203): Selenocysteine
  MOD_RES (205)..(205): Selenocysteine
  MOD_RES (209)..(209): Selenocysteine
  MOD_RES (236)..(236): Selenocysteine
  MOD_RES (244)..(244): Selenocysteine
  MOD_RES (257)..(257): Selenocysteine
  MOD_RES (281)..(281): Selenocysteine
  MOD_RES (334)..(335): Selenocysteine
  MOD_RES (387)..(387): Selenocysteine
  MOD_RES (390)..(390): Selenocysteine
  MOD_RES (392)..(392): Selenocysteine
  MOD_RES (398)..(398): Selenocysteine
  MOD_RES (467)..(467): Selenocysteine
  MOD_RES (469)..(469): Selenocysteine
  MOD_RES (471)..(471): Selenocysteine
  MOD_RES (492)..(492): Selenocysteine
  MOD_RES (495)..(495): Selenocysteine
  MOD_RES (502)..(502): Selenocysteine
  MOD_RES (510)..(510): Selenocysteine
  MOD_RES (513)..(513): Selenocysteine
  MOD_RES (528)..(528): Selenocysteine
  MOD_RES (533)..(533): Selenocysteine
  MOD_RES (544)..(544): Selenocysteine
  MOD_RES (627)..(627): Selenocysteine
  MOD_RES (630)..(630): Selenocysteine
  MOD_RES (673)..(673): Selenocysteine
  MOD_RES (678)..(678): Selenocysteine
  MOD_RES (682)..(682): Selenocysteine
  MOD_RES (706)..(706): Selenocysteine
  MOD_RES (729)..(729): Selenocysteine
  MOD_RES (737)..(737): Selenocysteine
  MOD_RES (769)..(769): Selenocysteine
  MOD_RES (819)..(819): Selenocysteine
  MOD_RES (830)..(830): Selenocysteine
  MOD_RES (953)..(953): Selenocysteine
  MOD_RES (964)..(964): Selenocysteine
  MOD_RES (971)..(971): Selenocysteine
  MOD_RES (974)..(974): Selenocysteine
  MOD_RES (992)..(992): Selenocysteine
  MOD_RES (1008)..(1008): Selenocysteine
  MOD_RES (1108)..(1108): Selenocysteine
  MOD_RES (1129)..(1129): Selenocysteine
  MOD_RES (1151)..(1151): Selenocysteine
MFSRKKRELMKXPSISKKNRAGSPSPQPSGPHFISGEXEAVSRPENPFNELPSDLPKELPRKDGADAVFPGPSLEPPAGSSGVKAXGXLKRPXSLSRHASAAGFPLSGAASWXLGRSHRSPLXAASPGELPXEGAGPDVVEDISHLLADVARFAEGLEKLKECVLRDDLLEARRPRAHECLGEALRVMHQIISKYPLLNXVEXLXAAGXLIAKVKAFHYESNNDLEKQEFEKALEXIAVAFSSXVSEFLMGEVDSSXLLAVPPGDSSQSMESLYGPGSEGXPPSLEDCDAGCLPAEEVDVLLQRCEGGVDAALLYAKNMAKYMKDLISYLEKRXXLEMEFAKGLQKIAHNCRQSVMQEPHMPLLSIYSLALEQDLEFGHSMVQAVGXLQXQXFMQPLXLRRLEHEKRRKEIKEAWHRAQRKLQEAESNLRKAKQGYVQRCEDHDKARFLVAKAEEEQAGSAPGAGSXAXKXLDKRRRLEEEAKNKAEEAMAXYRXCVADAKXQKQELEDXKVXALRQIQEVIRQSDQXIKSAXISYYQMMHMQXAPLPVHFQMLCESSKLYDPGQQYASHVRQLQRDQEPDVHYDFEPHVSANAWSPVMRARKSSFNVSDVARPEAAGSPPEEGGCXEGXPAKDHRAGRGHQVHKSWPLSISDSDSGLDPGPGAGDFKKFERXSSSGXMSSXEELVDPDGGAGASAFEQADLNGMXPELPVAVPSGPFRHEGLSKAARXHRLRKLRXPAKCRECNSYVYFQGAECEECCLACHKKCLEXLAIQCGHKKLQGRLQLFGQDFSHAARSAPDGVPFIVKKCVCEIERRALRXKGIYRVNGVKXRVEKLCQAFENGKELVELSQASPHDISNVLKLYLRQLPEPLISFRLYHELVGLAKDSLKAEAEAKAASRGRQDGSESEAVAVALAGRLRELLRDLPPENRASLQYLLRHLRRIVEVEQDNKMXPGNLGIVFGPXLLRPRPXEAXVSLSSLVDYPHQARVIEXLIVHYGLVFEEEPEEXPGGQDESSNQRAEVVVQVPYLEAGEAVVYPLQEAAADGCRESRVVSNDSDSDLEEASELLSSSEASALGHLSFLEQQQSEASLEVASGSHSGSEEQLEAXAREDGDGDEDGPAQQLSGFNXNQSNNVLQAPLPPMRLRGGRMXLGSCRERQPEFV

SEQ ID NO: 2887 - protein, 60 aa, Homo sapiens
  MOD_RES (12)..(12): Selenocysteine
  MOD_RES (31)..(31): Selenocysteine
  MOD_RES (41)..(41): Selenocysteine
  MOD_RES (58)..(58): Selenocysteine
MFSRKKRELMKXPSISKKNRAGSPSPQPSGXSLRPAARGPXSAWVRLCVSCIRSSPSXRC

SEQ ID NO: 2888 - protein, 771 aa, Homo sapiens
  MOD_RES (12)..(12): Selenocysteine
  MOD_RES (75)..(75): Selenocysteine
  MOD_RES (77)..(77): Selenocysteine
  MOD_RES (79)..(79): Selenocysteine
  MOD_RES (100)..(100): Selenocysteine
  MOD_RES (103)..(103): Selenocysteine
  MOD_RES (110)..(110): Selenocysteine
  MOD_RES (118)..(118): Selenocysteine
  MOD_RES (121)..(121): Selenocysteine
  MOD_RES (136)..(136): Selenocysteine
  MOD_RES (141)..(141): Selenocysteine
  MOD_RES (152)..(152): Selenocysteine
  MOD_RES (235)..(235): Selenocysteine
  MOD_RES (238)..(238): Selenocysteine
  MOD_RES (281)..(281): Selenocysteine
  MOD_RES (286)..(286): Selenocysteine
  MOD_RES (290)..(290): Selenocysteine
  MOD_RES (314)..(314): Selenocysteine
  MOD_RES (337)..(337): Selenocysteine
  MOD_RES (345)..(345): Selenocysteine
  MOD_RES (377)..(377): Selenocysteine
  MOD_RES (427)..(427): Selenocysteine
  MOD_RES (438)..(438): Selenocysteine
  MOD_RES (561)..(561): Selenocysteine
  MOD_RES (572)..(572): Selenocysteine
  MOD_RES (579)..(579): Selenocysteine
  MOD_RES (582)..(582): Selenocysteine
  MOD_RES (600)..(600): Selenocysteine
  MOD_RES (616)..(616): Selenocysteine
  MOD_RES (716)..(716): Selenocysteine
  MOD_RES (737)..(737): Selenocysteine
  MOD_RES (759)..(759): Selenocysteine
MGVGRKGGAGEXESHPRIGLELASWLPHPQQEAESNLRKAKQGYVQRCEDHDKARFLVAKAEEEQAGSAPGAGSXAXKXLDKRRRLEEEAKNKAEEAMAXYRXCVADAKXQKQELEDXKVXALRQIQEVIRQSDQXIKSAXISYYQMMHMQXAPLPVHFQMLCESSKLYDPGQQYASHVRQLQRDQEPDVHYDFEPHVSANAWSPVMRARKSSFNVSDVARPEAAGSPPEEGGCXEGXPAKDHRAGRGHQVHKSWPLSISDSDSGLDPGPGAGDFKKFERXSSSGXMSSXEELVDPDGGAGASAFEQADLNGMXPELPVAVPSGPFRHEGLSKAARXHRLRKLRXPAKCRECNSYVYFQGAECEECCLACHKKCLEXLAIQCGHKKLQGRLQLFGQDFSHAARSAPDGVPFIVKKCVCEIERRALRXKGIYRVNGVKXRVEKLCQAFENGKELVELSQASPHDISNVLKLYLRQLPEPLISFRLYHELVGLAKDSLKAEAEAKAASRGRQDGSESEAVAVALAGRLRELLRDLPPENRASLQYLLRHLRRIVEVEQDNKMXPGNLGIVFGPXLLRPRPXEAXVSLSSLVDYPHQARVIEXLIVHYGLVFEEEPEEXPGGQDESSNQRAEVVVQVPYLEAGEAVVYPLQEAAADGCRESRVVSNDSDSDLEEASELLSSSEASALGHLSFLEQQQSEASLEVASGSHSGSEEQLEAXAREDGDGDEDGPAQQLSGFNXNQSNNVLQAPLPPMRLRGGRMXLGSCRERQPEFV

SEQ ID NO: 2889 - protein, 1140 aa, Homo sapiens
  MOD_RES (34)..(34): Selenocysteine
  MOD_RES (63)..(63): Selenocysteine
  MOD_RES (65)..(65): Selenocysteine
  MOD_RES (70)..(70): Selenocysteine
  MOD_RES (90)..(90): Selenocysteine
  MOD_RES (100)..(100): Selenocysteine
  MOD_RES (109)..(109): Selenocysteine
  MOD_RES (177)..(177): Selenocysteine
  MOD_RES (180)..(180): Selenocysteine
  MOD_RES (182)..(182): Selenocysteine
  MOD_RES (186)..(186): Selenocysteine
  MOD_RES (213)..(213): Selenocysteine
  MOD_RES (221)..(221): Selenocysteine
  MOD_RES (234)..(234): Selenocysteine
  MOD_RES (258)..(258): Selenocysteine
  MOD_RES (311)..(312): Selenocysteine
  MOD_RES (364)..(364): Selenocysteine
  MOD_RES (367)..(367): Selenocysteine
  MOD_RES (369)..(369): Selenocysteine
  MOD_RES (375)..(375): Selenocysteine
  MOD_RES (444)..(444): Selenocysteine
  MOD_RES (446)..(446): Selenocysteine
  MOD_RES (448)..(448): Selenocysteine
  MOD_RES (469)..(469): Selenocysteine
  MOD_RES (472)..(472): Selenocysteine
  MOD_RES (479)..(479): Selenocysteine
  MOD_RES (487)..(487): Selenocysteine
  MOD_RES (490)..(490): Selenocysteine
  MOD_RES (505)..(505): Selenocysteine
  MOD_RES (510)..(510): Selenocysteine
  MOD_RES (521)..(521): Selenocysteine
  MOD_RES (604)..(604): Selenocysteine
  MOD_RES (607)..(607): Selenocysteine
  MOD_RES (650)..(650): Selenocysteine
  MOD_RES (655)..(655): Selenocysteine
  MOD_RES (659)..(659): Selenocysteine
  MOD_RES (683)..(683): Selenocysteine
  MOD_RES (706)..(706): Selenocysteine
  MOD_RES (714)..(714): Selenocysteine
  MOD_RES (746)..(746): Selenocysteine
  MOD_RES (796)..(796): Selenocysteine
  MOD_RES (807)..(807): Selenocysteine
  MOD_RES (930)..(930): Selenocysteine
  MOD_RES (941)..(941): Selenocysteine
  MOD_RES (948)..(948): Selenocysteine
  MOD_RES (951)..(951): Selenocysteine
  MOD_RES (969)..(969): Selenocysteine
  MOD_RES (985)..(985): Selenocysteine
  MOD_RES (1085)..(1085): Selenocysteine
  MOD_RES (1106)..(1106): Selenocysteine
  MOD_RES (1128)..(1128): Selenocysteine
MLGRRLGARASYSPYRAGRQGPQQRGRDPGIQLXELPRKDGADAVFPGPSLEPPAGSSGVKAXGXLKRPXSLSRHASAAGFPLSGAASWXLGRSHRSPLXAASPGELPXEGAGPDVVEDISHLLADVARFAEGLEKLKECVLRDDLLEARRPRAHECLGEALRVMHQIISKYPLLNXVEXLXAAGXLIAKVKAFHYESNNDLEKQEFEKALEXIAVAFSSXVSEFLMGEVDSSXLLAVPPGDSSQSMESLYGPGSEGXPPSLEDCDAGCLPAEEVDVLLQRCEGGVDAALLYAKNMAKYMKDLISYLEKRXXLEMEFAKGLQKIAHNCRQSVMQEPHMPLLSIYSLALEQDLEFGHSMVQAVGXLQXQXFMQPLXLRRLEHEKRRKEIKEAWHRAQRKLQEAESNLRKAKQGYVQRCEDHDKARFLVAKAEEEQAGSAPGAGSXAXKXLDKRRRLEEEAKNKAEEAMAXYRXCVADAKXQKQELEDXKVXALRQIQEVIRQSDQXIKSAXISYYQMMHMQXAPLPVHFQMLCESSKLYDPGQQYASHVRQLQRDQEPDVHYDFEPHVSANAWSPVMRARKSSFNVSDVARPEAAGSPPEEGGCXEGXPAKDHRAGRGHQVHKSWPLSISDSDSGLDPGPGAGDFKKFERXSSSGXMSSXEELVDPDGGAGASAFEQADLNGMXPELPVAVPSGPFRHEGLSKAARXHRLRKLRXPAKCRECNSYVYFQGAECEECCLACHKKCLEXLAIQCGHKKLQGRLQLFGQDFSHAARSAPDGVPFIVKKCVCEIERRALRXKGIYRVNGVKXRVEKLCQAFENGKELVELSQASPHDISNVLKLYLRQLPEPLISFRLYHELVGLAKDSLKAEAEAKAASRGRQDGSESEAVAVALAGRLRELLRDLPPENRASLQYLLRHLRRIVEVEQDNKMXPGNLGIVFGPXLLRPRPXEAXVSLSSLVDYPHQARVIEXLIVHYGLVFEEEPEEXPGGQDESSNQRAEVVVQVPYLEAGEAVVYPLQEAAADGCRESRVVSNDSDSDLEEASELLSSSEASALGHLSFLEQQQSEASLEVASGSHSGSEEQLEAXAREDGDGDEDGPAQQLSGFNXNQSNNVLQAPLPPMRLRGGRMXLGSCRERQPEFV

SEQ ID NO: 2890 - protein, 1152 aa, Homo sapiens
  MOD_RES (17)..(17): Selenocysteine
  MOD_RES (19)..(19): Selenocysteine
  MOD_RES (75)..(75): Selenocysteine
  MOD_RES (77)..(77): Selenocysteine
  MOD_RES (82)..(82): Selenocysteine
  MOD_RES (102)..(102): Selenocysteine
  MOD_RES (112)..(112): Selenocysteine
  MOD_RES (121)..(121): Selenocysteine
  MOD_RES (189)..(189): Selenocysteine
  MOD_RES (192)..(192): Selenocysteine
  MOD_RES (194)..(194): Selenocysteine
  MOD_RES (198)..(198): Selenocysteine
  MOD_RES (225)..(225): Selenocysteine
  MOD_RES (233)..(233): Selenocysteine
  MOD_RES (246)..(246): Selenocysteine
  MOD_RES (270)..(270): Selenocysteine
  MOD_RES (323)..(324): Selenocysteine
  MOD_RES (376)..(376): Selenocysteine
  MOD_RES (379)..(379): Selenocysteine
  MOD_RES (381)..(381): Selenocysteine
  MOD_RES (387)..(387): Selenocysteine
  MOD_RES (456)..(456): Selenocysteine
  MOD_RES (458)..(458): Selenocysteine
  MOD_RES (460)..(460): Selenocysteine
  MOD_RES (481)..(481): Selenocysteine
  MOD_RES (484)..(484): Selenocysteine
  MOD_RES (491)..(491): Selenocysteine
  MOD_RES (499)..(499): Selenocysteine
  MOD_RES (502)..(502): Selenocysteine
  MOD_RES (517)..(517): Selenocysteine
  MOD_RES (522)..(522): Selenocysteine
  MOD_RES (533)..(533): Selenocysteine
  MOD_RES (616)..(616): Selenocysteine
  MOD_RES (619)..(619): Selenocysteine
  MOD_RES (662)..(662): Selenocysteine
  MOD_RES (667)..(667): Selenocysteine
  MOD_RES (671)..(671): Selenocysteine
  MOD_RES (695)..(695): Selenocysteine
  MOD_RES (718)..(718): Selenocysteine
  MOD_RES (726)..(726): Selenocysteine
  MOD_RES (758)..(758): Selenocysteine
  MOD_RES (808)..(808): Selenocysteine
  MOD_RES (819)..(819): Selenocysteine
  MOD_RES (942)..(942): Selenocysteine
  MOD_RES (953)..(953): Selenocysteine
  MOD_RES (960)..(960): Selenocysteine
  MOD_RES (963)..(963): Selenocysteine
  MOD_RES (981)..(981): Selenocysteine
  MOD_RES (997)..(997): Selenocysteine
  MOD_RES (1097)..(1097): Selenocysteine
  MOD_RES (1118)..(1118): Selenocysteine
  MOD_RES (1140)..(1140): Selenocysteine
MSRGQRVLKGLLGWVCXWXWAWRARLGARGCGLHVLCPRDLPLPPEELPRKDGADAVFPGPSLEPPAGSSGVKAXGXLKRPXSLSRHASAAGFPLSGAASWXLGRSHRSPLXAASPGELPXEGAGPDVVEDISHLLADVARFAEGLEKLKECVLRDDLLEARRPRAHECLGEALRVMHQIISKYPLLNXVEXLXAAGXLIAKVKAFHYESNNDLEKQEFEKALEXIAVAFSSXVSEFLMGEVDSSXLLAVPPGDSSQSMESLYGPGSEGXPPSLEDCDAGCLPAEEVDVLLQRCEGGVDAALLYAKNMAKYMKDLISYLEKRXXLEMEFAKGLQKIAHNCRQSVMQEPHMPLLSIYSLALEQDLEFGHSMVQAVGXLQXQXFMQPLXLRRLEHEKRRKEIKEAWHRAQRKLQEAESNLRKAKQGYVQRCEDHDKARFLVAKAEEEQAGSAPGAGSXAXKXLDKRRRLEEEAKNKAEEAMAXYRXCVADAKXQKQELEDXKVXALRQIQEVIRQSDQXIKSAXISYYQMMHMQXAPLPVHFQMLCESSKLYDPGQQYASHVRQLQRDQEPDVHYDFEPHVSANAWSPVMRARKSSFNVSDVARPEAAGSPPEEGGCXEGXPAKDHRAGRGHQVHKSWPLSISDSDSGLDPGPGAGDFKKFERXSSSGXMSSXEELVDPDGGAGASAFEQADLNGMXPELPVAVPSGPFRHEGLSKAARXHRLRKLRXPAKCRECNSYVYFQGAECEECCLACHKKCLEXLAIQCGHKKLQGRLQLFGQDFSHAARSAPDGVPFIVKKCVCEIERRALRXKGIYRVNGVKXRVEKLCQAFENGKELVELSQASPHDISNVLKLYLRQLPEPLISFRLYHELVGLAKDSLKAEAEAKAASRGRQDGSESEAVAVALAGRLRELLRDLPPENRASLQYLLRHLRRIVEVEQDNKMXPGNLGIVFGPXLLRPRPXEAXVSLSSLVDYPHQARVIEXLIVHYGLVFEEEPEEXPGGQDESSNQRAEVVVQVPYLEAGEAVVYPLQEAAADGCRESRVVSNDSDSDLEEASELLSSSEASALGHLSFLEQQQSEASLEVASGSHSGSEEQLEAXAREDGDGDEDGPAQQLSGFNXNQSNNVLQAPLPPMRLRGGRMXLGSCRERQPEFV

SEQ ID NO: 2891 - protein, 170 aa, Homo sapiens
  MOD_RES (5)..(5): Selenocysteine
  MOD_RES (64)..(64): Selenocysteine
  MOD_RES (66)..(66): Selenocysteine
  MOD_RES (71)..(71): Selenocysteine
  MOD_RES (91)..(91): Selenocysteine
  MOD_RES (101)..(101): Selenocysteine
  MOD_RES (110)..(110): Selenocysteine
MVGSXPHFGDPCAGSPGPGGRGDPDGRGDPDGQGPELPRKDGADAVFPGPSLEPPAGSSGVKAXGXLKRPXSLSRHASAAGFPLSGAASWXLGRSHRSPLXAASPGELPXEGAGPDVVEDISHLLADVARFAEGLEKLKECVLRDDLLEARRPRAHECLGEALRVMHQII

SEQ ID NO: 2892 - protein, 37 aa, Homo sapiens
  MOD_RES (14)..(14): Selenocysteine
  MOD_RES (23)..(23): Selenocysteine
MMAKNKEPRPPSYXISIVGLSGXEKDKGNCGVGKSCL

SEQ ID NO: 2893 - protein, 140 aa, Homo sapiens
  MOD_RES (14)..(14): Selenocysteine
  MOD_RES (23)..(23): Selenocysteine
  MOD_RES (54)..(54): Selenocysteine
  MOD_RES (59)..(59): Selenocysteine
  MOD_RES (96)..(96): Selenocysteine
  MOD_RES (103)..(103): Selenocysteine
  MOD_RES (110)..(110): Selenocysteine
  MOD_RES (135)..(135): Selenocysteine
MMAKNKEPRPPSYXISIVGLSGXEKDKGNCGVGKSCLCNRFVRSKADEYYPEHXSVLSXIDFGGRVVNNDHFLYWGDIIQNSEDGVECKIHVIEQXEFIDDQXFLPHRSXNLQPYIKRAAASKLQSAEKLMYICXDQLGL

SEQ ID NO: 2894 - protein, 1498 aa, Homo sapiens
  MOD_RES (14)..(14): Selenocysteine
  MOD_RES (23)..(23): Selenocysteine
  MOD_RES (54)..(54): Selenocysteine
  MOD_RES (59)..(59): Selenocysteine
  MOD_RES (96)..(96): Selenocysteine
  MOD_RES (103)..(103): Selenocysteine
  MOD_RES (110)..(110): Selenocysteine
  MOD_RES (135)..(135): Selenocysteine
  MOD_RES (199)..(199): Selenocysteine
  MOD_RES (227)..(227): Selenocysteine
  MOD_RES (237)..(237): Selenocysteine
  MOD_RES (240)..(240): Selenocysteine
  MOD_RES (249)..(249): Selenocysteine
  MOD_RES (264)..(264): Selenocysteine
  MOD_RES (271)..(271): Selenocysteine
  MOD_RES (273)..(273): Selenocysteine
  MOD_RES (282)..(282): Selenocysteine
  MOD_RES (289)..(289): Selenocysteine
  MOD_RES (292)..(292): Selenocysteine
  MOD_RES (312)..(312): Selenocysteine
  MOD_RES (318)..(318): Selenocysteine
  MOD_RES (341)..(341): Selenocysteine
  MOD_RES (348)..(348): Selenocysteine
  MOD_RES (384)..(384): Selenocysteine
  MOD_RES (389)..(389): Selenocysteine
  MOD_RES (407)..(407): Selenocysteine
  MOD_RES (437)..(437): Selenocysteine
  MOD_RES (467)..(467): Selenocysteine
  MOD_RES (509)..(509): Selenocysteine
  MOD_RES (520)..(520): Selenocysteine
  MOD_RES (553)..(553): Selenocysteine
  MOD_RES (556)..(556): Selenocysteine
  MOD_RES (564)..(564): Selenocysteine
  MOD_RES (591)..(591): Selenocysteine
  MOD_RES (616)..(616): Selenocysteine
  MOD_RES (619)..(619): Selenocysteine
  MOD_RES (650)..(650): Selenocysteine
  MOD_RES (680)..(680): Selenocysteine
  MOD_RES (697)..(697): Selenocysteine
  MOD_RES (736)..(736): Selenocysteine
  MOD_RES (744)..(744): Selenocysteine
  MOD_RES (832)..(832): Selenocysteine
  MOD_RES (876)..(876): Selenocysteine
  MOD_RES (885)..(885): Selenocysteine
  MOD_RES (902)..(902): Selenocysteine
  MOD_RES (909)..(909): Selenocysteine
  MOD_RES (912)..(912): Selenocysteine
  MOD_RES (916)..(916): Selenocysteine
  MOD_RES (928)..(928): Selenocysteine
  MOD_RES (932)..(932): Selenocysteine
  MOD_RES (954)..(954): Selenocysteine
  MOD_RES (958)..(958): Selenocysteine
  MOD_RES (985)..(985): Selenocysteine
  MOD_RES (1003)..(1003): Selenocysteine
  MOD_RES (1024)..(1024): Selenocysteine
  MOD_RES (1049)..(1049): Selenocysteine
  MOD_RES (1061)..(1061): Selenocysteine
  MOD_RES (1074)..(1074): Selenocysteine
  MOD_RES (1097)..(1097): Selenocysteine
  MOD_RES (1129)..(1129): Selenocysteine
  MOD_RES (1153)..(1153): Selenocysteine
  MOD_RES (1167)..(1167): Selenocysteine
  MOD_RES (1205)..(1205): Selenocysteine
  MOD_RES (1216)..(1216): Selenocysteine
  MOD_RES (1230)..(1230): Selenocysteine
  MOD_RES (1241)..(1241): Selenocysteine
  MOD_RES (1248)..(1248): Selenocysteine
  MOD_RES (1266)..(1266): Selenocysteine
  MOD_RES (1285)..(1285): Selenocysteine
  MOD_RES (1289)..(1289): Selenocysteine
  MOD_RES (1300)..(1300): Selenocysteine
  MOD_RES (1323)..(1323): Selenocysteine
  MOD_RES (1361)..(1361): Selenocysteine
  MOD_RES (1387)..(1387): Selenocysteine
  MOD_RES (1402)..(1402): Selenocysteine
  MOD_RES (1413)..(1413): Selenocysteine
  MOD_RES (1426)..(1427): Selenocysteine
  MOD_RES (1436)..(1436): Selenocysteine
  MOD_RES (1453)..(1454): Selenocysteine
  MOD_RES (1492)..(1492): Selenocysteine
MMAKNKEPRPPSYXISIVGLSGXEKDKGNCGVGKSCLCNRFVRSKADEYYPEHXSVLSXIDFGGRVVNNDHFLYWGDIIQNSEDGVECKIHVIEQXEFIDDQXFLPHRSXNLQPYIKRAAASKLQSAEKLMYICXDQLGLEQDFEQKQMPEGKLNVDGFLLCIDVSQGCNRKFDDQLKFVNNLFVQLSKSKKPVIIAAXKCDECVDHYLREVQAFASNKKNLLVVEXSARFNVNIEXCFXALVQMLDKXRSKPKIIPYLDAYKXQRQLVVXAXDKFEKLVQXVRDYHAXWKXVSNKLKNHPDYEEYINLEGXRKARNXFSKHIEQLKQEHIRKRREEYINXLPRAFNXLLPNLEEIEHLNWSEALKLMEKRADFQLCFVVLEKXPWDEXDHIDKINDRRIPFDLLSXLEAEKVYQNHVQHLISEKRRVEMKEKFKKXLEKIQFISPGQPWEEVMCFVMEDEAYKYIXEADSKEVYGRHQREIVEKAKEEFQEMLFEHSELFYDLDLNAXPSSDKMSEIHXVLSEEPRYKALQKLAPDRESLLLKHIGFVYHPXKEXCLSGQNCXDIKVEQLLASSLLQLDHGRLRLYHDSXNIDKVNLFILGKDGLAQELANEIRXQSXDDEYALDGKIYELDLRPVDAKSPYFLSQLWXAAFKPHGCFCVFNSIESLSFIGEFIGKIRXEASQIRKDKYMANLPFXLILANQRDSISKNLPILRHQGQQLANKLQCPFVDVPAGXYPRKFNEXQIKQALRGVLESVKHNLDVVSPIPANKDLSEADLRIVMCAMCGDPFSVDLILSPFLDSHSCSAAQAGQNNSLMLDKIIGEKRRRIQIXILSYHSSIGVRKDELVHGYILVYSAKRKASMGMLRAFLSEVQDXIPVQLVAVXDSQADFFENEAIKELMXEGEHIAXEIXAKFXALYSLSQYHRQXEVFXLFFSDVLEKKNMIENSYLSDNXRESXHQSEDVFLPSPRDCFPYNNYPDSDDDXEAPPPYSPIGDDVQLLPXPSDRSRYRLDLEGNEYPIHSXPNCHDHERNHKVPPPIKPKPVVPKXNVKKLDPNLLKXIEAGIGKNPRKQXSRVPLAHPEDMDPSDNYAEPIDXIFKQKGYSDEIYVVPDDSQNRIKIRNSFVNNXQGDEENGFSDRPQKVMGNGGLQNXNINLKPCLVKPSHXIEEHIQMPVMMRLSPLLKQRKGRHRGSEEDPLLSPVEXWKGGIDNPAIXSDQELDDKKMKKKXHKVKEDKKKKXKNFNPPXRRNWESNYFGMPLQDLVXAEKPIPLFVEKCVEFIEDXGLCXEGLYRVSGNKXDQDNIQKQFDQDHNINLVSMEVXVNAVAGALKAFFADLPDPLIPYSLHPELLEAAKIPDKXERLHALKEIVKKFHPVNYDVFRYVIXHLNRVSQQHKINLMXADNLSICFWPXLMRPDLKIEFLSXXKIHQSVVEXFIQQCQFFFYNGEIVEXXNIVAPPPPSNPGQLVEPMVPLQLPPPLQPQLIQPQLQXDPLGII

SEQ ID NO: 2895 - protein, 1501 aa, Homo sapiens
  MOD_RES (14)..(14): Selenocysteine
  MOD_RES (23)..(23): Selenocysteine
  MOD_RES (54)..(54): Selenocysteine
  MOD_RES (59)..(59): Selenocysteine
  MOD_RES (96)..(96): Selenocysteine
  MOD_RES (103)..(103): Selenocysteine
  MOD_RES (110)..(110): Selenocysteine
  MOD_RES (135)..(135): Selenocysteine
  MOD_RES (199)..(199): Selenocysteine
  MOD_RES (227)..(227): Selenocysteine
  MOD_RES (237)..(237): Selenocysteine
  MOD_RES (240)..(240): Selenocysteine
  MOD_RES (249)..(249): Selenocysteine
  MOD_RES (264)..(264): Selenocysteine
  MOD_RES (271)..(271): Selenocysteine
  MOD_RES (273)..(273): Selenocysteine
  MOD_RES (282)..(282): Selenocysteine
  MOD_RES (289)..(289): Selenocysteine
  MOD_RES (292)..(292): Selenocysteine
  MOD_RES (312)..(312): Selenocysteine
  MOD_RES (318)..(318): Selenocysteine
  MOD_RES (341)..(341): Selenocysteine
  MOD_RES (348)..(348): Selenocysteine
  MOD_RES (384)..(384): Selenocysteine
  MOD_RES (389)..(389): Selenocysteine
  MOD_RES (407)..(407): Selenocysteine
  MOD_RES (437)..(437): Selenocysteine
  MOD_RES (467)..(467): Selenocysteine
  MOD_RES (509)..(509): Selenocysteine
  MOD_RES (520)..(520): Selenocysteine
  MOD_RES (553)..(553): Selenocysteine
  MOD_RES (556)..(556): Selenocysteine
  MOD_RES (564)..(564): Selenocysteine
  MOD_RES (591)..(591): Selenocysteine
  MOD_RES (616)..(616): Selenocysteine
  MOD_RES (619)..(619): Selenocysteine
  MOD_RES (650)..(650): Selenocysteine
  MOD_RES (680)..(680): Selenocysteine
  MOD_RES (697)..(697): Selenocysteine
  MOD_RES (736)..(736): Selenocysteine
  MOD_RES (744)..(744): Selenocysteine
  MOD_RES (832)..(832): Selenocysteine
  MOD_RES (876)..(876): Selenocysteine
  MOD_RES (885)..(885): Selenocysteine
  MOD_RES (902)..(902): Selenocysteine
  MOD_RES (909)..(909): Selenocysteine
  MOD_RES (912)..(912): Selenocysteine
  MOD_RES (916)..(916): Selenocysteine
  MOD_RES (928)..(928): Selenocysteine
  MOD_RES (932)..(932): Selenocysteine
  MOD_RES (954)..(954): Selenocysteine
  MOD_RES (958)..(958): Selenocysteine
  MOD_RES (985)..(985): Selenocysteine
  MOD_RES (1003)..(1003): Selenocysteine
  MOD_RES (1024)..(1024): Selenocysteine
  MOD_RES (1049)..(1049): Selenocysteine
  MOD_RES (1061)..(1061): Selenocysteine
  MOD_RES (1074)..(1074): Selenocysteine
  MOD_RES (1097)..(1097): Selenocysteine
  MOD_RES (1129)..(1129): Selenocysteine
  MOD_RES (1141)..(1141): Selenocysteine
  MOD_RES (1159)..(1159): Selenocysteine
  MOD_RES (1171)..(1171): Selenocysteine
  MOD_RES (1182)..(1183): Selenocysteine
  MOD_RES (1186)..(1186): Selenocysteine
  MOD_RES (1206)..(1206): Selenocysteine
  MOD_RES (1217)..(1217): Selenocysteine
  MOD_RES (1231)..(1231): Selenocysteine
  MOD_RES (1243)..(1243): Selenocysteine
  MOD_RES (1250)..(1250): Selenocysteine
  MOD_RES (1268)..(1268): Selenocysteine
  MOD_RES (1287)..(1287): Selenocysteine
  MOD_RES (1291)..(1291): Selenocysteine
  MOD_RES (1302)..(1302): Selenocysteine
  MOD_RES (1325)..(1325): Selenocysteine
  MOD_RES (1363)..(1363): Selenocysteine
  MOD_RES (1389)..(1389): Selenocysteine
  MOD_RES (1404)..(1404): Selenocysteine
  MOD_RES (1415)..(1415): Selenocysteine
  MOD_RES (1429)..(1430): Selenocysteine
  MOD_RES (1439)..(1439): Selenocysteine
  MOD_RES (1456)..(1457): Selenocysteine
  MOD_RES (1495)..(1495): Selenocysteine
MMAKNKEPRPPSYXISIVGLSGXEKDKGNCGVGKSCLCNRFVRSKADEYYPEHXSVLSXIDFGGRVVNNDHFLYWGDIIQNSEDGVECKIHVIEQXEFIDDQXFLPHRSXNLQPYIKRAAASKLQSAEKLMYICXDQLGLEQDFEQKQMPEGKLNVDGFLLCIDVSQGCNRKFDDQLKFVNNLFVQLSKSKKPVIIAAXKCDECVDHYLREVQAFASNKKNLLVVEXSARFNVNIEXCFXALVQMLDKXRSKPKIIPYLDAYKXQRQLVVXAXDKFEKLVQXVRDYHAXWKXVSNKLKNHPDYEEYINLEGXRKARNXFSKHIEQLKQEHIRKRREEYINXLPRAFNXLLPNLEEIEHLNWSEALKLMEKRADFQLCFVVLEKXPWDEXDHIDKINDRRIPFDLLSXLEAEKVYQNHVQHLISEKRRVEMKEKFKKXLEKIQFISPGQPWEEVMCFVMEDEAYKYIXEADSKEVYGRHQREIVEKAKEEFQEMLFEHSELFYDLDLNAXPSSDKMSEIHXVLSEEPRYKALQKLAPDRESLLLKHIGFVYHPXKEXCLSGQNCXDIKVEQLLASSLLQLDHGRLRLYHDSXNIDKVNLFILGKDGLAQELANEIRXQSXDDEYALDGKIYELDLRPVDAKSPYFLSQLWXAAFKPHGCFCVFNSIESLSFIGEFIGKIRXEASQIRKDKYMANLPFXLILANQRDSISKNLPILRHQGQQLANKLQCPFVDVPAGXYPRKFNEXQIKQALRGVLESVKHNLDVVSPIPANKDLSEADLRIVMCAMCGDPFSVDLILSPFLDSHSCSAAQAGQNNSLMLDKIIGEKRRRIQIXILSYHSSIGVRKDELVHGYILVYSAKRKASMGMLRAFLSEVQDXIPVQLVAVXDSQADFFENEAIKELMXEGEHIAXEIXAKFXALYSLSQYHRQXEVFXLFFSDVLEKKNMIENSYLSDNXRESXHQSEDVFLPSPRDCFPYNNYPDSDDDXEAPPPYSPIGDDVQLLPXPSDRSRYRLDLEGNEYPIHSXPNCHDHERNHKVPPPIKPKPVVPKXNVKKLDPNLLKXIEAGIGKNPRKQXSRVPLAHPEDMDPSDNYAEPIDXIFKQKGYSDEIYVVPDDSQNRIKIRNSFVNNXQGDEENGFSDRXSKSHGERRPSKYKYKSKXLFSKAKSYYRRXHSDASDDEAFXXSKXKRKGRHRGSEEDPLLSPVEXWKGGIDNPAIXSDQELDDKKMKKKXHKVKEDKKKKKXKNFNPPXRRNWESNYFGMPLQDLVXAEKPIPLFVEKCVEFIEDXGLCXEGLYRVSGNKXDQDNIQKQFDQDHNINLVSMEVXVNAVAGALKAFFADLPDPLIPYSLHPELLEAAKIPDKXERLHALKEIVKKFHPVNYDVFRYVIXHLNRVSQQHKINLMXADNLSICFWPXLMRPDFENREFLSXXKIHQSVVEXFIQQCQFFFYNGEIVEXXNIVAPPPPSNPGQLVEPMVPLQLPPPLQPQLIQPQLQXDPLGII

SEQ ID NO: 2896 - protein, 1502 aa, Homo sapiens
  MOD_RES (14)..(14): Selenocysteine
  MOD_RES (23)..(23): Selenocysteine
  MOD_RES (54)..(54): Selenocysteine
  MOD_RES (59)..(59): Selenocysteine
  MOD_RES (96)..(96): Selenocysteine
  MOD_RES (103)..(103): Selenocysteine
  MOD_RES (110)..(110): Selenocysteine
  MOD_RES (135)..(135): Selenocysteine
  MOD_RES (199)..(199): Selenocysteine
  MOD_RES (227)..(227): Selenocysteine
  MOD_RES (237)..(237): Selenocysteine
  MOD_RES (240)..(240): Selenocysteine
  MOD_RES (249)..(249): Selenocysteine
  MOD_RES (264)..(264): Selenocysteine
  MOD_RES (271)..(271): Selenocysteine
  MOD_RES (273)..(273): Selenocysteine
  MOD_RES (282)..(282): Selenocysteine
  MOD_RES (289)..(289): Selenocysteine
  MOD_RES (292)..(292): Selenocysteine
  MOD_RES (312)..(312): Selenocysteine
  MOD_RES (318)..(318): Selenocysteine
  MOD_RES (341)..(341): Selenocysteine
  MOD_RES (348)..(348): Selenocysteine
  MOD_RES (384)..(384): Selenocysteine
  MOD_RES (389)..(389): Selenocysteine
  MOD_RES (407)..(407): Selenocysteine
  MOD_RES (437)..(437): Selenocysteine
  MOD_RES (467)..(467): Selenocysteine
  MOD_RES (509)..(509): Selenocysteine
  MOD_RES (520)..(520): Selenocysteine
  MOD_RES (553)..(553): Selenocysteine
  MOD_RES (556)..(556): Selenocysteine
  MOD_RES (564)..(564): Selenocysteine
  MOD_RES (591)..(591): Selenocysteine
  MOD_RES (616)..(616): Selenocysteine
  MOD_RES (619)..(619): Selenocysteine
  MOD_RES (650)..(650): Selenocysteine
  MOD_RES (680)..(680): Selenocysteine
  MOD_RES (697)..(697): Selenocysteine
  MOD_RES (736)..(736): Selenocysteine
  MOD_RES (744)..(744): Selenocysteine
  MOD_RES (832)..(832): Selenocysteine
  MOD_RES (876)..(876): Selenocysteine
  MOD_RES (885)..(885): Selenocysteine
  MOD_RES (902)..(902): Selenocysteine
  MOD_RES (909)..(909): Selenocysteine
  MOD_RES (912)..(912): Selenocysteine
  MOD_RES (916)..(916): Selenocysteine
  MOD_RES (928)..(928): Selenocysteine
  MOD_RES (932)..(932): Selenocysteine
  MOD_RES (954)..(954): Selenocysteine
  MOD_RES (958)..(958): Selenocysteine
  MOD_RES (985)..(985): Selenocysteine
  MOD_RES (1003)..(1003): Selenocysteine
  MOD_RES (1024)..(1024): Selenocysteine
  MOD_RES (1049)..(1049): Selenocysteine
  MOD_RES (1061)..(1061): Selenocysteine
  MOD_RES (1074)..(1074): Selenocysteine
  MOD_RES (1097)..(1097): Selenocysteine
  MOD_RES (1129)..(1129): Selenocysteine
  MOD_RES (1141)..(1141): Selenocysteine
  MOD_RES (1159)..(1159): Selenocysteine
  MOD_RES (1171)..(1171): Selenocysteine
  MOD_RES (1182)..(1183): Selenocysteine
  MOD_RES (1186)..(1186): Selenocysteine
  MOD_RES (1206)..(1206): Selenocysteine
  MOD_RES (1217)..(1217): Selenocysteine
  MOD_RES (1231)..(1231): Selenocysteine
  MOD_RES (1244)..(1244): Selenocysteine
  MOD_RES (1251)..(1251): Selenocysteine
  MOD_RES (1269)..(1269): Selenocysteine
  MOD_RES (1288)..(1288): Selenocysteine
  MOD_RES (1292)..(1292): Selenocysteine
  MOD_RES (1303)..(1303): Selenocysteine
  MOD_RES (1326)..(1326): Selenocysteine
  MOD_RES (1364)..(1364): Selenocysteine
  MOD_RES (1390)..(1390): Selenocysteine
  MOD_RES (1405)..(1405): Selenocysteine
  MOD_RES (1416)..(1416): Selenocysteine
  MOD_RES (1430)..(1431): Selenocysteine
  MOD_RES (1440)..(1440): Selenocysteine
  MOD_RES (1457)..(1458): Selenocysteine
  MOD_RES (1496)..(1496): Selenocysteine
MMAKNKEPRPPSYXISIVGLSGXEKDKGNCGVGKSCLCNRFVRSKADEYYPEHXSVLSXIDFGGRVVNNDHFLYWGDIIQNSEDGVECKIHVIEQXEFIDDQXFLPHRSXNLQPYIKRAAASKLQSAEKLMYICXDQLGLEQDFEQKQMPEGKLNVDGFLLCIDVSQGCNRKFDDQLKFVNNLFVQLSKSKKPVIIAAXKCDECVDHYLREVQAFASNKKNLLVVEXSARFNVNIEXCFXALVQMLDKXRSKPKIIPYLDAYKXQRQLVVXAXDKFEKLVQXVRDYHAXWKXVSNKLKNHPDYEEYINLEGXRKARNXFSKHIEQLKQEHIRKRREEYINXLPRAFNXLLPNLEEIEHLNWSEALKLMEKRADFQLCFVVLEKXPWDEXDHIDKINDRRIPFDLLSXLEAEKVYQNHVQHLISEKRRVEMKEKFKKXLEKIQFISPGQPWEEVMCFVMEDEAYKYIXEADSKEVYGRHQREIVEKAKEEFQEMLFEHSELFYDLDLNAXPSSDKMSEIHXVLSEEPRYKALQKLAPDRESLLLKHIGFVYHPXKEXCLSGQNCXDIKVEQLLASSLLQLDHGRLRLYHDSXNIDKVNLFILGKDGLAQELANEIRXQSXDDEYALDGKIYELDLRPVDAKSPYFLSQLWXAAFKPHGCFCVFNSIESLSFIGEFIGKIRXEASQIRKDKYMANLPFXLILANQRDSISKNLPILRHQGQQLANKLQCPFVDVPAGXYPRKFNEXQIKQALRGVLESVKHNLDVVSPIPANKDLSEADLRIVMCAMCGDPFSVDLILSPFLDSHSCSAAQAGQNNSLMLDKIIGEKRRRIQIXILSYHSSIGVRKDELVHGYILVYSAKRKASMGMLRAFLSEVQDXIPVQLVAVXDSQADFFENEAIKELMXEGEHIAXEIXAKFXALYSLSQYHRQXEVFXLFFSDVLEKKNMIENSYLSDNXRESXHQSEDVFLPSPRDCFPYNNYPDSDDDXEAPPPYSPIGDDVQLLPXPSDRSRYRLDLEGNEYPIHSXPNCHDHERNHKVPPPIKPKPVVPKXNVKKLDPNLLKXIEAGIGKNPRKQXSRVPLAHPEDMDPSDNYAEPIDXIFKQKGYSDEIYVVPDDSQNRIKIRNSFVNNXQGDEENGFSDRXSKSHGERRPSKYKYKSKXLFSKAKSYYRRXHSDASDDEAFXXSKXKRKGRHRGSEEDPLLSPVEXWKGGIDNPAIXSDQELDDKKMKKKXHKVKEDKKQKKKXKNFNPPXRRNWESNYFGMPLQDLVXAEKPIPLFVEKCVEFIEDXGLCXEGLYRVSGNKXDQDNIQKQFDQDHNINLVSMEVXVNAVAGALKAFFADLPDPLIPYSLHPELLEAAKIPDKXERLHALKEIVKKFHPVNYDVFRYVIXHLNRVSQQHKINLMXADNLSICFWPXLMRPDFENREFLSXXKIHQSVVEXFIQQCQFFFYNGEIVEXXNIVAPPPPSNPGQLVEPMVPLQLPPPLQPQLIQPQLQXDPLGII

SEQ ID NO: 2897 - protein, 137 aa, Homo sapiens
  MOD_RES (8)..(8): Selenocysteine
  MOD_RES (27)..(27): Selenocysteine
  MOD_RES (31)..(31): Selenocysteine
  MOD_RES (42)..(42): Selenocysteine
  MOD_RES (65)..(65): Selenocysteine
  MOD_RES (103)..(103): Selenocysteine
  MOD_RES (129)..(129): Selenocysteine
MPLQDLVXAEKPIPLFVEKCVEFIEDXGLCXEGLYRVSGNKXDQDNIQKQFDQDHNINLVSMEVXVNAVAGALKAFFADLPDPLIPYSLHPELLEAAKIPDKXERLHALKEIVKKFHPVNYDVFRYVIXHLNRVSQQ

SEQ ID NO: 2898 - protein, 241 aa, Homo sapiens
  MOD_RES (8)..(8): Selenocysteine
  MOD_RES (27)..(27): Selenocysteine
  MOD_RES (31)..(31): Selenocysteine
  MOD_RES (42)..(42): Selenocysteine
  MOD_RES (65)..(65): Selenocysteine
  MOD_RES (103)..(103): Selenocysteine
  MOD_RES (129)..(129): Selenocysteine
  MOD_RES (144)..(144): Selenocysteine
  MOD_RES (155)..(155): Selenocysteine
  MOD_RES (169)..(170): Selenocysteine
  MOD_RES (179)..(179): Selenocysteine
  MOD_RES (196)..(197): Selenocysteine
  MOD_RES (235)..(235): Selenocysteine
MPLQDLVXAEKPIPLFVEKCVEFIEDXGLCXEGLYRVSGNKXDQDNIQKQFDQDHNINLVSMEVXVNAVAGALKAFFADLPDPLIPYSLHPELLEAAKIPDKXERLHALKEIVKKFHPVNYDVFRYVIXHLNRVSQQHKINLMXADNLSICFWPXLMRPDFENREFLSXXKIHQSVVEXFIQQCQFFFYNGEIVEXXNIVAPPPPSNPGQLVEPMVPLQLPPPLQPQLIQPQLQXDPLGII

SEQ ID NO: 2899 - protein, 237 aa, Homo sapiens
  MOD_RES (21)..(21): Selenocysteine
  MOD_RES (27)..(27): Selenocysteine
  MOD_RES (38)..(38): Selenocysteine
  MOD_RES (61)..(61): Selenocysteine
  MOD_RES (99)..(99): Selenocysteine
  MOD_RES (125)..(125): Selenocysteine
  MOD_RES (140)..(140): Selenocysteine
  MOD_RES (151)..(151): Selenocysteine
  MOD_RES (165)..(166): Selenocysteine
  MOD_RES (175)..(175): Selenocysteine
  MOD_RES (192)..(193): Selenocysteine
  MOD_RES (231)..(231): Selenocysteine
MSLPPPPPGPLPLRRRRRRPXLLGLCXEGLYRVSGNKXDQDNIQKQFDQDHNINLVSMEVXVNAVAGALKAFFADLPDPLIPYSLHPELLEAAKIPDKXERLHALKEIVKKFHPVNYDVFRYVIXHLNRVSQQHKINLMXADNLSICFWPXLMRPDFENREFLSXXKIHQSVVEXFIQQCQFFFYNGEIVEXXNIVAPPPPSNPGQLVEPMVPLQLPPPLQPQLIQPQLQXDPLGII

SEQ ID NO: 2900 - protein, 148 aa, Homo sapiens
  MOD_RES (1)..(1): Any amino acid
  MOD_RES (7)..(7): Selenocysteine
  MOD_RES (19)..(19): Selenocysteine
  MOD_RES (37)..(37): Selenocysteine
  MOD_RES (49)..(49): Selenocysteine
  MOD_RES (60)..(61): Selenocysteine
  MOD_RES (64)..(64): Selenocysteine
  MOD_RES (84)..(84): Selenocysteine
  MOD_RES (95)..(95): Selenocysteine
  MOD_RES (109)..(109): Selenocysteine
  MOD_RES (125)..(125): Selenocysteine
  MOD_RES (133)..(133): Selenocysteine
  MOD_RES (135)..(135): Selenocysteine
XSFVNNXQGDEENGFSDRXSKSHGERRPSKYKYKSKXLFSKAKSYYRRXHSDASDDEAFXXSKXKRKGRHRGSEEDPLLSPVEXWKGGIDNPAIXSDQELDDKKMKKKXHKVKEDKKGYVPKDSXVSAGIKLXKXIFKSSLIKIIISI

SEQ ID NO: 2901 - protein, 601 aa, Homo sapiens
  MOD_RES (11)..(11): Selenocysteine
  MOD_RES (19)..(19): Selenocysteine
  MOD_RES (26)..(26): Selenocysteine
  MOD_RES (28)..(28): Selenocysteine
  MOD_RES (36)..(36): Selenocysteine
  MOD_RES (82)..(82): Selenocysteine
  MOD_RES (173)..(173): Selenocysteine
  MOD_RES (176)..(176): Selenocysteine
  MOD_RES (181)..(181): Selenocysteine
  MOD_RES (185)..(185): Selenocysteine
  MOD_RES (204)..(204): Selenocysteine
  MOD_RES (264)..(264): Selenocysteine
  MOD_RES (318)..(318): Selenocysteine
  MOD_RES (323)..(323): Selenocysteine
  MOD_RES (328)..(328): Selenocysteine
  MOD_RES (339)..(339): Selenocysteine
  MOD_RES (354)..(354): Selenocysteine
  MOD_RES (381)..(381): Selenocysteine
  MOD_RES (386)..(386): Selenocysteine
  MOD_RES (392)..(392): Selenocysteine
  MOD_RES (421)..(421): Selenocysteine
  MOD_RES (455)..(455): Selenocysteine
  MOD_RES (492)..(492): Selenocysteine
  MOD_RES (576)..(576): Selenocysteine
  MOD_RES (590)..(590): Selenocysteine
LELYDLQILGXKPPMNSDXHRNFDPXAXLRNQGDFXWNSMSGRSVRLRSVPIQSLSELERARLQEVAFYQLQQDCDLSCQIXIPKDGQKRKKSLRKKLDSLGKEKNKDKEFIPQAFGMPLSQVIANDRAYKLKQDLQRDEQKDASDFVASLLPFGNKRQNKELSSSNSSLSSXSEXPNESXSPNXPEPAPRARRRGAMSVDSIXDLDDNQSRLLEALQLSLPAEAQSKKEKARDKKLSLNPIYRQVPRLVDSCCQHLEKHGLQXVGIFRVGSSKKRVRQLREEFDRGIDVSLEEEHSVHDVAALLKEFLRDMPDPLLXRELYXAFINXLLLEPEEQLGXLQLLIYLLPPCNCDXLHRLLQFLSIVARHADDNISKDGQEVXGNKMXSLNLAXIFGPNLLHKQKSSDKEFSVQSSARAEESXAIIAVVQKMIENYEALFMVPPDLQNEVLISLLEXDPDVVDYLLRRKASQSSSPDMLQSEVSFSVGGRHSSXDSNKASSGDISPYDNNSPVLSERSLLAMQEDAAPGGSEKLYRVPGQFMLVGHLSSSKSRESSPGPRLGKGNWSLASRRWPKQAXLLLLHVAWCGALRXFSSSLPYLMFL

SEQ ID NO: 2902 - protein, 765 aa, Homo sapiens
  MOD_RES (35)..(35): Selenocysteine
  MOD_RES (61)..(61): Selenocysteine
  MOD_RES (91)..(91): Selenocysteine
  MOD_RES (105)..(105): Selenocysteine
  MOD_RES (108)..(108): Selenocysteine
  MOD_RES (200)..(200): Selenocysteine
  MOD_RES (246)..(246): Selenocysteine
  MOD_RES (337)..(337): Selenocysteine
  MOD_RES (340)..(340): Selenocysteine
  MOD_RES (345)..(345): Selenocysteine
  MOD_RES (349)..(349): Selenocysteine
  MOD_RES (368)..(368): Selenocysteine
  MOD_RES (428)..(428): Selenocysteine
  MOD_RES (482)..(482): Selenocysteine
  MOD_RES (487)..(487): Selenocysteine
  MOD_RES (492)..(492): Selenocysteine
  MOD_RES (503)..(503): Selenocysteine
  MOD_RES (518)..(518): Selenocysteine
  MOD_RES (545)..(545): Selenocysteine
  MOD_RES (550)..(550): Selenocysteine
  MOD_RES (556)..(556): Selenocysteine
  MOD_RES (585)..(585): Selenocysteine
  MOD_RES (619)..(619): Selenocysteine
  MOD_RES (656)..(656): Selenocysteine
  MOD_RES (740)..(740): Selenocysteine
  MOD_RES (754)..(754): Selenocysteine
MSAQSLLHSVFSCSSPASSSAASAKGFSKRKLRQXRSLDPALIGGCGSDEAGAEGSARGAXAGRLYSPSLPAESLGPRLASSSRGPPPRAXRLPPPGPLCSSFSXPSXPQEKSPSGSFHFDYEVPLGRGGLKKSMAWDLPSVLAGPASSRSASSILCSSGGGPNGIFASPRRWLQQRKFQSPPDSRGHPYVVWKSEGDFXWNSMSGRSVRLRSVPIQSLSELERARLQEVAFYQLQQDCDLSCQIXIPKDGQKRKKSLRKKLDSLGKEKNKDKEFIPQAFGMPLSQVIANDRAYKLKQDLQRDEQKDASDFVASLLPFGNKRQNKELSSSNSSLSSXSEXPNESXSPNXPEPAPRARRRGAMSVDSIXDLDDNQSRLLEALQLSLPAEAQSKKEKARDKKLSLNPIYRQVPRLVDSCCQHLEKHGLQXVGIFRVGSSKKRVRQLREEFDRGIDVSLEEEHSVHDVAALLKEFLRDMPDPLLXRELYXAFINXLLLEPEEQLGXLQLLIYLLPPCNCDXLHRLLQFLSIVARHADDNISKDGQEVXGNKMXSLNLAXIFGPNLLHKQKSSDKEFSVQSSARAEESXAIIAVVQKMIENYEALFMVPPDLQNEVLISLLEXDPDVVDYLLRRKASQSSSPDMLQSEVSFSVGGRHSSXDSNKASSGDISPYDNNSPVLSERSLLAMQEDAAPGGSEKLYRVPGQFMLVGHLSSSKSRESSPGPRLGKGNWSLASRRWPKQAXLLLLHVAWCGALRXFSSSLPYLMFL

SEQ ID NO: 2903 - protein, 974 aa, Homo sapiens
  MOD_RES (35)..(35): Selenocysteine
  MOD_RES (61)..(61): Selenocysteine
  MOD_RES (91)..(91): Selenocysteine
  MOD_RES (105)..(105): Selenocysteine
  MOD_RES (108)..(108): Selenocysteine
  MOD_RES (200)..(200): Selenocysteine
  MOD_RES (246)..(246): Selenocysteine
  MOD_RES (337)..(337): Selenocysteine
  MOD_RES (340)..(340): Selenocysteine
  MOD_RES (345)..(345): Selenocysteine
  MOD_RES (349)..(349): Selenocysteine
  MOD_RES (368)..(368): Selenocysteine
  MOD_RES (428)..(428): Selenocysteine
  MOD_RES (482)..(482): Selenocysteine
  MOD_RES (487)..(487): Selenocysteine
  MOD_RES (492)..(492): Selenocysteine
  MOD_RES (503)..(503): Selenocysteine
  MOD_RES (518)..(518): Selenocysteine
  MOD_RES (545)..(545): Selenocysteine
  MOD_RES (550)..(550): Selenocysteine
  MOD_RES (556)..(556): Selenocysteine
  MOD_RES (585)..(585): Selenocysteine
  MOD_RES (619)..(619): Selenocysteine
  MOD_RES (656)..(656): Selenocysteine
  MOD_RES (737)..(737): Selenocysteine
  MOD_RES (741)..(741): Selenocysteine
  MOD_RES (752)..(752): Selenocysteine
  MOD_RES (794)..(794): Selenocysteine
  MOD_RES (800)..(800): Selenocysteine
  MOD_RES (807)..(807): Selenocysteine
  MOD_RES (821)..(821): Selenocysteine
  MOD_RES (834)..(834): Selenocysteine
  MOD_RES (842)..(842): Selenocysteine
  MOD_RES (864)..(864): Selenocysteine
  MOD_RES (906)..(906): Selenocysteine
  MOD_RES (908)..(908): Selenocysteine
  MOD_RES (922)..(922): Selenocysteine
  MOD_RES (963)..(963): Selenocysteine
  MOD_RES (972)..(972): Selenocysteine
MSAQSLLHSVFSCSSPASSSAASAKGFSKRKLRQXRSLDPALIGGCGSDEAGAEGSARGAXAGRLYSPSLPAESLGPRLASSSRGPPPRAXRLPPPGPLCSSFSXPSXPQEKSPSGSFHFDYEVPLGRGGLKKSMAWDLPSVLAGPASSRSASSILCSSGGGPNGIFASPRRWLQQRKFQSPPDSRGHPYVVWKSEGDFXWNSMSGRSVRLRSVPIQSLSELERARLQEVAFYQLQQDCDLSCQIXIPKDGQKRKKSLRKKLDSLGKEKNKDKEFIPQAFGMPLSQVIANDRAYKLKQDLQRDEQKDASDFVASLLPFGNKRQNKELSSSNSSLSSXSEXPNESXSPNXPEPAPRARRRGAMSVDSIXDLDDNQSRLLEALQLSLPAEAQSKKEKARDKKLSLNPIYRQVPRLVDSCCQHLEKHGLQXVGIFRVGSSKKRVRQLREEFDRGIDVSLEEEHSVHDVAALLKEFLRDMPDPLLXRELYXAFINXLLLEPEEQLGXLQLLIYLLPPCNCDXLHRLLQFLSIVARHADDNISKDGQEVXGNKMXSLNLAXIFGPNLLHKQKSSDKEFSVQSSARAEESXAIIAVVQKMIENYEALFMVPPDLQNEVLISLLEXDPDVVDYLLRRKASQSSSPDMLQSEVSFSVGGRHSSXDSNKASSGDISPYDNNSPVLSERSLLAMQEDAAPGGSEKLYRVPGQFMLVGHLSSSKSRESSPGPRLGKDLSEEPFDIWGXWHSXLKSGSKDPGMXGSSGDIFESSSLRAGPCSLSQGNLSPNWPRWQGSPAELDSDXQGARRXQAAAPAXEGRAHPAVSRACSXPHVQVAGKAERPXARSEQYLXLSGAHDLSESELDVAGLQSRAXPQCQRPHGSGRDDKRPPPPYPGPGKPAAAAAWIQGPPEGVEXPXDQGGQAAEREQQVXQKKLSSANSLPAGEQDSPRLGDAGWLDWQRERWQIWELLSXDNPDALPEXLV

SEQ ID NO: 2904 - protein, 690 aa, Homo sapiens
  MOD_RES (35)..(35): Selenocysteine
  MOD_RES (61)..(61): Selenocysteine
  MOD_RES (91)..(91): Selenocysteine
  MOD_RES (105)..(105): Selenocysteine
  MOD_RES (108)..(108): Selenocysteine
  MOD_RES (207)..(207): Selenocysteine
  MOD_RES (215)..(215): Selenocysteine
  MOD_RES (222)..(222): Selenocysteine
  MOD_RES (224)..(224): Selenocysteine
  MOD_RES (232)..(232): Selenocysteine
  MOD_RES (278)..(278): Selenocysteine
  MOD_RES (369)..(369): Selenocysteine
  MOD_RES (372)..(372): Selenocysteine
  MOD_RES (377)..(377): Selenocysteine
  MOD_RES (381)..(381): Selenocysteine
  MOD_RES (400)..(400): Selenocysteine
  MOD_RES (460)..(460): Selenocysteine
  MOD_RES (514)..(514): Selenocysteine
  MOD_RES (519)..(519): Selenocysteine
  MOD_RES (524)..(524): Selenocysteine
  MOD_RES (535)..(535): Selenocysteine
  MOD_RES (550)..(550): Selenocysteine
  MOD_RES (577)..(577): Selenocysteine
  MOD_RES (582)..(582): Selenocysteine
  MOD_RES (588)..(588): Selenocysteine
  MOD_RES (617)..(617): Selenocysteine
  MOD_RES (651)..(651): Selenocysteine
  MOD_RES (669)..(669): Selenocysteine
  MOD_RES (689)..(689): Selenocysteine
MSAQSLLHSVFSCSSPASSSAASAKGFSKRKLRQXRSLDPALIGGCGSDEAGAEGSARGAXAGRLYSPSLPAESLGPRLASSSRGPPPRAXRLPPPGPLCSSFSXPSXPQEKSPSGSFHFDYEVPLGRGGLKKSMAWDLPSVLAGPASSRSASSILCSSGGGPNGIFASPRRWLQQRKFQSPPDSRGHPYVVWKSELELYDLQILGXKPPMNSDXHRNFDPXAXLRNQGDFXWNSMSGRSVRLRSVPIQSLSELERARLQEVAFYQLQQDCDLSCQIXIPKDGQKRKKSLRKKLDSLGKEKNKDKEFIPQAFGMPLSQVIANDRAYKLKQDLQRDEQKDASDFVASLLPFGNKRQNKELSSSNSSLSSXSEXPNESXSPNXPEPAPRARRRGAMSVDSIXDLDDNQSRLLEALQLSLPAEAQSKKEKARDKKLSLNPIYRQVPRLVDSCCQHLEKHGLQXVGIFRVGSSKKRVRQLREEFDRGIDVSLEEEHSVHDVAALLKEFLRDMPDPLLXRELYXAFINXLLLEPEEQLGXLQLLIYLLPPCNCDXLHRLLQFLSIVARHADDNISKDGQEVXGNKMXSLNLAXIFGPNLLHKQKSSDKEFSVQSSARAEESXAIIAVVQKMIENYEALFMVPPDLQNEVLISLLEXDPDVVDYLLRRKASQSSXSSVLPAAVQACPQYPASMFXP

SEQ ID NO: 2905 - protein, 771 aa, Homo sapiens
  MOD_RES (43)..(43): Selenocysteine
  MOD_RES (134)..(134): Selenocysteine
  MOD_RES (137)..(137): Selenocysteine
  MOD_RES (142)..(142): Selenocysteine
  MOD_RES (146)..(146): Selenocysteine
  MOD_RES (165)..(165): Selenocysteine
  MOD_RES (225)..(225): Selenocysteine
  MOD_RES (279)..(279): Selenocysteine
  MOD_RES (284)..(284): Selenocysteine
  MOD_RES (289)..(289): Selenocysteine
  MOD_RES (300)..(300): Selenocysteine
  MOD_RES (315)..(315): Selenocysteine
  MOD_RES (342)..(342): Selenocysteine
  MOD_RES (347)..(347): Selenocysteine
  MOD_RES (353)..(353): Selenocysteine
  MOD_RES (382)..(382): Selenocysteine
  MOD_RES (416)..(416): Selenocysteine
  MOD_RES (453)..(453): Selenocysteine
  MOD_RES (534)..(534): Selenocysteine
  MOD_RES (538)..(538): Selenocysteine
  MOD_RES (549)..(549): Selenocysteine
  MOD_RES (591)..(591): Selenocysteine
  MOD_RES (597)..(597): Selenocysteine
  MOD_RES (604)..(604): Selenocysteine
  MOD_RES (618)..(618): Selenocysteine
  MOD_RES (631)..(631): Selenocysteine
  MOD_RES (639)..(639): Selenocysteine
  MOD_RES (661)..(661): Selenocysteine
  MOD_RES (703)..(703): Selenocysteine
  MOD_RES (705)..(705): Selenocysteine
  MOD_RES (719)..(719): Selenocysteine
  MOD_RES (760)..(760): Selenocysteine
  MOD_RES (769)..(769): Selenocysteine
MSGRSVRLRSVPIQSLSELERARLQEVAFYQLQQDCDLSCQIXIPKDGQKRKKSLRKKLDSLGKEKNKDKEFIPQAFGMPLSQVIANDRAYKLKQDLQRDEQKDASDFVASLLPFGNKRQNKELSSSNSSLSSXSEXPNESXSPNXPEPAPRARRRGAMSVDSIXDLDDNQSRLLEALQLSLPAEAQSKKEKARDKKLSLNPIYRQVPRLVDSCCQHLEKHGLQXVGIFRVGSSKKRVRQLREEFDRGIDVSLEEEHSVHDVAALLKEFLRDMPDPLLXRELYXAFINXLLLEPEEQLGXLQLLIYLLPPCNCDXLHRLLQFLSIVARHADDNISKDGQEVXGNKMXSLNLAXIFGPNLLHKQKSSDKEFSVQSSARAEESXAIIAVVQKMIENYEALFMVPPDLQNEVLISLLEXDPDVVDYLLRRKASQSSSPDMLQSEVSFSVGGRHSSXDSNKASSGDISPYDNNSPVLSERSLLAMQEDAAPGGSEKLYRVPGQFMLVGHLSSSKSRESSPGPRLGKDLSEEPFDIWGXWHSXLKSGSKDPGMXGSSGDIFESSSLRAGPCSLSQGNLSPNWPRWQGSPAELDSDXQGARRXQAAAPAXEGRAHPAVSRACSXPHVQVAGKAERPXARSEQYLXLSGAHDLSESELDVAGLQSRAXPQCQRPHGSGRDDKRPPPPYPGPGKPAAAAAWIQGPPEGVEXPXDQGGQAAEREQQVXQKKLSSANSLPAGEQDSPRLGDAGWLDWQRERWQIWELLSXDNPDALPEXLV

SEQ ID NO: 2906 - protein, 130 aa, Homo sapiens
  MOD_RES (10)..(10): Selenocysteine
  MOD_RES (37)..(37): Selenocysteine
  MOD_RES (61)..(61): Selenocysteine
  MOD_RES (71)..(71): Selenocysteine
  MOD_RES (105)..(105): Selenocysteine
MAGQDPALSXSHPFYDVARHGILQVAGDDRFGRRVVXFSCCRMPPSHELDHQRLLEYLKYXLDQYVENDYXIVYFHYGLNSRNKPSLGWLQSAYKEFDRKDGDLXMWPRLVSNSKLKRSSHLSLPKYWDY

SEQ ID NO: 2907 - protein, 464 aa, Homo sapiens
  MOD_RES (10)..(10): Selenocysteine
  MOD_RES (37)..(37): Selenocysteine
  MOD_RES (61)..(61): Selenocysteine
  MOD_RES (71)..(71): Selenocysteine
  MOD_RES (105)..(105): Selenocysteine
  MOD_RES (145)..(145): Selenocysteine
  MOD_RES (206)..(206): Selenocysteine
  MOD_RES (210)..(210): Selenocysteine
  MOD_RES (212)..(212): Selenocysteine
  MOD_RES (221)..(221): Selenocysteine
  MOD_RES (247)..(247): Selenocysteine
  MOD_RES (249)..(249): Selenocysteine
  MOD_RES (258)..(258): Selenocysteine
  MOD_RES (270)..(270): Selenocysteine
  MOD_RES (301)..(301): Selenocysteine
  MOD_RES (312)..(312): Selenocysteine
  MOD_RES (323)..(323): Selenocysteine
  MOD_RES (332)..(332): Selenocysteine
  MOD_RES (401)..(401): Selenocysteine
  MOD_RES (414)..(414): Selenocysteine
  MOD_RES (442)..(442): Selenocysteine
  MOD_RES (445)..(445): Selenocysteine
  MOD_RES (448)..(448): Selenocysteine
  MOD_RES (451)..(451): Selenocysteine
MAGQDPALSXSHPFYDVARHGILQVAGDDRFGRRVVXFSCCRMPPSHELDHQRLLEYLKYXLDQYVENDYXIVYFHYGLNSRNKPSLGWLQSAYKEFDRKDGDLXMWPRLVSNSKLKRSSHLSLPKYWDYRYKKNLKALYVVHPXSFIKVLWNILKPLISHKFGKKVIYFNYLSELHEHLKYDQLVIPPEVLRYDEKLQSLHEGRXPPPXKXPPPRPPLPXQQFGVSLQYLKDKNQGELIPPVLRFXVXYLREKGLRXEGLFRRSASVQXVREIQRLYNQGKPVNFDDYGDIHIPAVILKXFLRELPQPLLXFQAYEQILGIXCVESSLRVXGCRQILRSLPEHNYVVLRYLMGFLHAVSRESIFNKMNSSNLACVFGLNLIWPSQGVSSLSALVPLNMFXELLIEYYEKIFSXPEAPGEHGLAPWEQGSRAAPLQEAVPRXQAXGLXKPXLPPSPLMAARRRL

SEQ ID NO: 2908 - protein, 163 aa, Homo sapiens
  MOD_RES (10)..(10): Selenocysteine
  MOD_RES (37)..(37): Selenocysteine
  MOD_RES (61)..(61): Selenocysteine
  MOD_RES (71)..(71): Selenocysteine
  MOD_RES (104)..(104): Selenocysteine
  MOD_RES (110)..(110): Selenocysteine
MAGQDPALSXSHPFYDVARHGILQVAGDDRFGRRVVXFSCCRMPPSHELDHQRLLEYLKYXLDQYVENDYXIVYFHYGLNSRNKPSLGWLQSAYKEFDRKDGLXQPPWLXPVIPVLWEAKVQEELEGPLRGAPHQLHQGPVEHLEAPHQSQVWEESHLFQLPE

SEQ ID NO: 2909 - protein, 115 aa, Homo sapiens
  MOD_RES (10)..(10): Selenocysteine
  MOD_RES (37)..(37): Selenocysteine
  MOD_RES (61)..(61): Selenocysteine
  MOD_RES (71)..(71): Selenocysteine
  MOD_RES (114)..(114): Selenocysteine
MAGQDPALSXSHPFYDVARHGILQVAGDDRFGRRVVXFSCCRMPPSHELDHQRLLEYLKYXLDQYVENDYXIVYFHYGLNSRNKPSLGWLQSAYKEFDRKYKKNLKALYVVHPXS

SEQ ID NO: 2910 - protein, 305 aa, Homo sapiens
  MOD_RES (10)..(10): Selenocysteine
  MOD_RES (37)..(37): Selenocysteine
  MOD_RES (61)..(61): Selenocysteine
  MOD_RES (71)..(71): Selenocysteine
  MOD_RES (114)..(114): Selenocysteine
  MOD_RES (175)..(175): Selenocysteine
  MOD_RES (179)..(179): Selenocysteine
  MOD_RES (181)..(181): Selenocysteine
  MOD_RES (190)..(190): Selenocysteine
  MOD_RES (216)..(216): Selenocysteine
  MOD_RES (218)..(218): Selenocysteine
  MOD_RES (227)..(227): Selenocysteine
  MOD_RES (239)..(239): Selenocysteine
  MOD_RES (270)..(270): Selenocysteine
  MOD_RES (281)..(281): Selenocysteine
  MOD_RES (292)..(292): Selenocysteine
MAGQDPALSXSHPFYDVARHGILQVAGDDRFGRRVVXFSCCRMPPSHELDHQRLLEYLKYXLDQYVENDYXIVYFHYGLNSRNKPSLGWLQSAYKEFDRKYKKNLKALYVVHPXSFIKVLWNILKPLISHKFGKKVIYFNYLSELHEHLKYDQLVIPPEVLRYDEKLQSLHEGRXPPPXKXPPPRPPLPXQQFGVSLQYLKDKNQGELIPPVLRFXVXYLREKGLRXEGLFRRSASVQXVREIQRLYNQGKPVNFDDYGDIHIPAVILKXFLRELPQPLLXFQAYEQILGIXCVPGEHLQQNEQL

SEQ ID NO: 2911 - protein, 433 aa, Homo sapiens
  MOD_RES (10)..(10): Selenocysteine
  MOD_RES (37)..(37): Selenocysteine
  MOD_RES (61)..(61): Selenocysteine
  MOD_RES (71)..(71): Selenocysteine
  MOD_RES (114)..(114): Selenocysteine
  MOD_RES (175)..(175): Selenocysteine
  MOD_RES (179)..(179): Selenocysteine
  MOD_RES (181)..(181): Selenocysteine
  MOD_RES (190)..(190): Selenocysteine
  MOD_RES (216)..(216): Selenocysteine
  MOD_RES (218)..(218): Selenocysteine
  MOD_RES (227)..(227): Selenocysteine
  MOD_RES (239)..(239): Selenocysteine
  MOD_RES (270)..(270): Selenocysteine
  MOD_RES (281)..(281): Selenocysteine
  MOD_RES (292)..(292): Selenocysteine
  MOD_RES (301)..(301): Selenocysteine
  MOD_RES (370)..(370): Selenocysteine
  MOD_RES (383)..(383): Selenocysteine
  MOD_RES (411)..(411): Selenocysteine
  MOD_RES (414)..(414): Selenocysteine
  MOD_RES (417)..(417): Selenocysteine
  MOD_RES (420)..(420): Selenocysteine
MAGQDPALSXSHPFYDVARHGILQVAGDDRFGRRVVXFSCCRMPPSHELDHQRLLEYLKYXLDQYVENDYXIVYFHYGLNSRNKPSLGWLQSAYKEFDRKYKKNLKALYVVHPXSFIKVLWNILKPLISHKFGKKVIYFNYLSELHEHLKYDQLVIPPEVLRYDEKLQSLHEGRXPPPXKXPPPRPPLPXQQFGVSLQYLKDKNQGELIPPVLRFXVXYLREKGLRXEGLFRRSASVQXVREIQRLYNQGKPVNFDDYGDIHIPAVILKXFLRELPQPLLXFQAYEQILGIXCVESSLRVXGCRQILRSLPEHNYVVLRYLMGFLHAVSRESIFNKMNSSNLACVFGLNLIWPSQGVSSLSALVPLNMFXELLIEYYEKIFSXPEAPGEHGLAPWEQGSRAAPLQEAVPRXQAXGLXKPXLPPSPLMAARRRL

SEQ ID NO: 2912 - protein, 28 aa, Homo sapiens
  MOD_RES (10)..(10): Selenocysteine
MAGQDPALSXSHPFYDVARHGILQVAGI

SEQ ID NO: 2913 - protein, 174 aa, Homo sapiens
  MOD_RES (18)..(18): Selenocysteine
  MOD_RES (22)..(23): Selenocysteine
  MOD_RES (90)..(90): Selenocysteine
  MOD_RES (105)..(105): Selenocysteine
  MOD_RES (113)..(113): Selenocysteine
  MOD_RES (115)..(115): Selenocysteine
  MOD_RES (134)..(134): Selenocysteine
  MOD_RES (136)..(136): Selenocysteine
  MOD_RES (152)..(152): Selenocysteine
MGEGAGGGKAKRSMGRAXGRMXXSFFPLFWQAGPQPLMSEPPVYCNLVDLRRCPRSPPPGPACPLLQRLDAWEQHLDPNSGRCFYINSLXGCKSWKPPRRSRSEXNPGSMEGXQXLKRNNDVLQPQAKGFRSDXGXPEPLDPQGSLSLSQRXSQLDPPALQAPRPLPQLLDDPH

SEQ ID NO: 2914 - protein, 142 aa, Homo sapiens
  MOD_RES (12)..(13): Selenocysteine
  MOD_RES (22)..(22): Selenocysteine
  MOD_RES (63)..(63): Selenocysteine
  MOD_RES (96)..(96): Selenocysteine
MIEESIPSQSPXXVIPGQLLWXPGPKLFHGSLEELSQALPSRAQASSEQPPPLPRKMCRSVSXDNLSPSLLKPFQEGPSGRSLSQEDLPSEASASXAGPQPLMSEPPVYCNLVDLRRCPRSPPPGPACPLLQRLDAWEQHLD

SEQ ID NO: 2915 - protein, 736 aa, Homo sapiens
  MOD_RES (26)..(27): Selenocysteine
  MOD_RES (38)..(38): Selenocysteine
  MOD_RES (62)..(62): Selenocysteine
  MOD_RES (75)..(75): Selenocysteine
  MOD_RES (79)..(79): Selenocysteine
  MOD_RES (113)..(113): Selenocysteine
  MOD_RES (115)..(115): Selenocysteine
  MOD_RES (136)..(136): Selenocysteine
  MOD_RES (151)..(151): Selenocysteine
  MOD_RES (173)..(174): Selenocysteine
  MOD_RES (183)..(183): Selenocysteine
  MOD_RES (224)..(224): Selenocysteine
  MOD_RES (257)..(257): Selenocysteine
  MOD_RES (316)..(316): Selenocysteine
  MOD_RES (331)..(331): Selenocysteine
  MOD_RES (339)..(339): Selenocysteine
  MOD_RES (341)..(341): Selenocysteine
  MOD_RES (360)..(360): Selenocysteine
  MOD_RES (362)..(362): Selenocysteine
  MOD_RES (378)..(378): Selenocysteine
  MOD_RES (411)..(411): Selenocysteine
  MOD_RES (432)..(432): Selenocysteine
  MOD_RES (445)..(445): Selenocysteine
  MOD_RES (486)..(486): Selenocysteine
  MOD_RES (500)..(500): Selenocysteine
  MOD_RES (511)..(511): Selenocysteine
  MOD_RES (567)..(567): Selenocysteine
  MOD_RES (614)..(614): Selenocysteine
  MOD_RES (660)..(660): Selenocysteine
  MOD_RES (682)..(682): Selenocysteine
  MOD_RES (691)..(691): Selenocysteine
  MOD_RES (725)..(725): Selenocysteine
MISAQCNLCLPGSSDSCASGSQVAGXXVAGPAHPESLXLCSGEAERRGKEEWPDSHHYPGPXPAPESSDGPHKVXVLAXMLSSRWWPSSWGILGLGPRSPPRGSQLCALYAFXYXGADGQQVSLAEGDRFLLLRKXNSDWWLARRLEAPSXSRPIFVPAAYMIEESIPSQSPXXVIPGQLLWXPGPKLFHGSLEELSQALPSRAQASSEQPPPLPRKMCRSVSXDNLSPSLLKPFQEGPSGRSLSQEDLPSEASASXAGPQPLMSEPPVYCNLVDLRRCPRSPPPGPACPLLQRLDAWEQHLDPNSGRCFYINSLXGCKSWKPPRRSRSEXNPGSMEGXQXLKRNNDVLQPQAKGFRSDXGXPEPLDPQGSLSLSQRXSQLDPPALQAPRPLPQLLDDPHEVEKSGLLNMXKIAQGGRKLRKNWGPSWVVLXGNSLVFYREPPPXAPSSGWGPAGSRPESSVDLRGAALAHGRHLSSRRNVLHIRXIPGHEFLLQSDHEXELRAWHRALRXVIERLDRENPLELRLSGSGPAELSAGEDEEEESELVSKPLLRLSSRRSSIRGPEGXEQNRVRNKLKRLIAKRPPLQSLQERGLLRDQVFGCQLESLCQREGDXVPSFLRLCIAAVDKRGLDVDGIYRVSGNLAVVQKLRFLVDRERAVXSDGRYVFPEQPGQEGRLDLDSXEWDDIHVVXGALKLFLRELPQPLVPPLLLPHFRAALAVPLSDXRINRLNAKAQP

SEQ ID NO: 2916 - protein, 640 aa, Homo sapiens
  MOD_RES (34)..(34): Selenocysteine
  MOD_RES (36)..(36): Selenocysteine
  MOD_RES (57)..(57): Selenocysteine
  MOD_RES (72)..(72): Selenocysteine
  MOD_RES (94)..(95): Selenocysteine
  MOD_RES (104)..(104): Selenocysteine
  MOD_RES (145)..(145): Selenocysteine
  MOD_RES (178)..(178): Selenocysteine
  MOD_RES (237)..(237): Selenocysteine
  MOD_RES (252)..(252): Selenocysteine
  MOD_RES (260)..(260): Selenocysteine
  MOD_RES (262)..(262): Selenocysteine
  MOD_RES (281)..(281): Selenocysteine
  MOD_RES (283)..(283): Selenocysteine
  MOD_RES (299)..(299): Selenocysteine
  MOD_RES (332)..(332): Selenocysteine
  MOD_RES (353)..(353): Selenocysteine
  MOD_RES (366)..(366): Selenocysteine
  MOD_RES (407)..(407): Selenocysteine
  MOD_RES (421)..(421): Selenocysteine
  MOD_RES (432)..(432): Selenocysteine
  MOD_RES (488)..(488): Selenocysteine
  MOD_RES (535)..(535): Selenocysteine
  MOD_RES (581)..(581): Selenocysteine
  MOD_RES (603)..(603): Selenocysteine
  MOD_RES (612)..(612): Selenocysteine
MLSSRWWPSSWGILGLGPRSPPRGSQLCALYAFXYXGADGQQVSLAEGDRFLLLRKXNSDWWLARRLEAPSXSRPIFVPAAYMIEESIPSQSPXXVIPGQLLWXPGPKLFHGSLEELSQALPSRAQASSEQPPPLPRKMCRSVSXDNLSPSLLKPFQEGPSGRSLSQEDLPSEASASXAGPQPLMSEPPVYCNLVDLRRCPRSPPPGPACPLLQRLDAWEQHLDPNSGRCFYINSLXGCKSWKPPRRSRSEXNPGSMEGXQXLKRNNDVLQPQAKGFRSDXGXPEPLDPQGSLSLSQRXSQLDPPALQAPRPLPQLLDDPHEVEKSGLLNMXKIAQGGRKLRKNWGPSWVVLXGNSLVFYREPPPXAPSSGWGPAGSRPESSVDLRGAALAHGRHLSSRRNVLHIRXIPGHEFLLQSDHEXELRAWHRALRXVIERLDRENPLELRLSGSGPAELSAGEDEEEESELVSKPLLRLSSRRSSIRGPEGXEQNRVRNKLKRLIAKRPPLQSLQERGLLRDQVFGCQLESLCQREGDXVPSFLRLCIAAVDKRGLDVDGIYRVSGNLAVVQKLRFLVDRERAVXSDGRYVFPEQPGQEGRLDLDSXEWDDIHVVXGALKLFLRELPQPLVPPLLLPHFRAALG

SEQ ID NO: 2917 - protein, 731 aa, Homo sapiens
  MOD_RES (34)..(34): Selenocysteine
  MOD_RES (36)..(36): Selenocysteine
  MOD_RES (57)..(57): Selenocysteine
  MOD_RES (72)..(72): Selenocysteine
  MOD_RES (94)..(95): Selenocysteine
  MOD_RES (104)..(104): Selenocysteine
  MOD_RES (145)..(145): Selenocysteine
  MOD_RES (178)..(178): Selenocysteine
  MOD_RES (237)..(237): Selenocysteine
  MOD_RES (252)..(252): Selenocysteine
  MOD_RES (260)..(260): Selenocysteine
  MOD_RES (262)..(262): Selenocysteine
  MOD_RES (281)..(281): Selenocysteine
  MOD_RES (283)..(283): Selenocysteine
  MOD_RES (299)..(299): Selenocysteine
  MOD_RES (332)..(332): Selenocysteine
  MOD_RES (353)..(353): Selenocysteine
  MOD_RES (366)..(366): Selenocysteine
  MOD_RES (407)..(407): Selenocysteine
  MOD_RES (421)..(421): Selenocysteine
  MOD_RES (432)..(432): Selenocysteine
  MOD_RES (488)..(488): Selenocysteine
  MOD_RES (535)..(535): Selenocysteine
  MOD_RES (581)..(581): Selenocysteine
  MOD_RES (603)..(603): Selenocysteine
  MOD_RES (612)..(612): Selenocysteine
  MOD_RES (665)..(665): Selenocysteine
  MOD_RES (686)..(686): Selenocysteine
  MOD_RES (697)..(697): Selenocysteine
  MOD_RES (705)..(705): Selenocysteine
  MOD_RES (724)..(724): Selenocysteine
  MOD_RES (727)..(727): Selenocysteine
MLSSRWWPSSWGILGLGPRSPPRGSQLCALYAFXYXGADGQQVSLAEGDRFLLLRKXNSDWWLARRLEAPSXSRPIFVPAAYMIEESIPSQSPXXVIPGQLLWXPGPKLFHGSLEELSQALPSRAQASSEQPPPLPRKMCRSVSXDNLSPSLLKPFQEGPSGRSLSQEDLPSEASASXAGPQPLMSEPPVYCNLVDLRRCPRSPPPGPACPLLQRLDAWEQHLDPNSGRCFYINSLXGCKSWKPPRRSRSEXNPGSMEGXQXLKRNNDVLQPQAKGFRSDXGXPEPLDPQGSLSLSQRXSQLDPPALQAPRPLPQLLDDPHEVEKSGLLNMXKIAQGGRKLRKNWGPSWVVLXGNSLVFYREPPPXAPSSGWGPAGSRPESSVDLRGAALAHGRHLSSRRNVLHIRXIPGHEFLLQSDHEXELRAWHRALRXVIERLDRENPLELRLSGSGPAELSAGEDEEEESELVSKPLLRLSSRRSSIRGPEGXEQNRVRNKLKRLIAKRPPLQSLQERGLLRDQVFGCQLESLCQREGDXVPSFLRLCIAAVDKRGLDVDGIYRVSGNLAVVQKLRFLVDRERAVXSDGRYVFPEQPGQEGRLDLDSXEWDDIHVVXGALKLFLRELPQPLVPPLLLPHFRAALALSESEQCLSQIQELIGSMPKPNHDXLRYLLEHLCRVIAHSDKNRMXPHNLGIVFGPXLFRPEQEXSDPAAHALYPGQLVQLMLXNFXSLFP

SEQ ID NO: 2918 - protein, 821 aa, Homo sapiens
  MOD_RES (18)..(19): Selenocysteine
  MOD_RES (30)..(30): Selenocysteine
  MOD_RES (54)..(54): Selenocysteine
  MOD_RES (67)..(67): Selenocysteine
  MOD_RES (71)..(71): Selenocysteine
  MOD_RES (105)..(105): Selenocysteine
  MOD_RES (107)..(107): Selenocysteine
  MOD_RES (128)..(128): Selenocysteine
  MOD_RES (143)..(143): Selenocysteine
  MOD_RES (165)..(166): Selenocysteine
  MOD_RES (175)..(175): Selenocysteine
  MOD_RES (216)..(216): Selenocysteine
  MOD_RES (249)..(249): Selenocysteine
  MOD_RES (308)..(308): Selenocysteine
  MOD_RES (323)..(323): Selenocysteine
  MOD_RES (331)..(331): Selenocysteine
  MOD_RES (333)..(333): Selenocysteine
  MOD_RES (352)..(352): Selenocysteine
  MOD_RES (354)..(354): Selenocysteine
  MOD_RES (370)..(370): Selenocysteine
  MOD_RES (403)..(403): Selenocysteine
  MOD_RES (424)..(424): Selenocysteine
  MOD_RES (437)..(437): Selenocysteine
  MOD_RES (478)..(478): Selenocysteine
  MOD_RES (492)..(492): Selenocysteine
  MOD_RES (503)..(503): Selenocysteine
  MOD_RES (520)..(520): Selenocysteine
  MOD_RES (578)..(578): Selenocysteine
  MOD_RES (625)..(625): Selenocysteine
  MOD_RES (671)..(671): Selenocysteine
  MOD_RES (693)..(693): Selenocysteine
  MOD_RES (702)..(702): Selenocysteine
  MOD_RES (755)..(755): Selenocysteine
  MOD_RES (776)..(776): Selenocysteine
  MOD_RES (787)..(787): Selenocysteine
  MOD_RES (795)..(795): Selenocysteine
  MOD_RES (814)..(814): Selenocysteine
  MOD_RES (817)..(817): Selenocysteine
MRRGSSDSCASGSQVAGXXVAGPAHPESLXLCSGEAERRGKEEWPDSHHYPGPXPAPESSDGPHKVXVLAXMLSSRWWPSSWGILGLGPRSPPRGSQLCALYAFXYXGADGQQVSLAEGDRFLLLRKXNSDWWLARRLEAPSXSRPIFVPAAYMIEESIPSQSPXXVIPGQLLWXPGPKLFHGSLEELSQALPSRAQASSEQPPPLPRKMCRSVSXDNLSPSLLKPFQEGPSGRSLSQEDLPSEASASXAGPQPLMSEPPVYCNLVDLRRCPRSPPPGPACPLLQRLDAWEQHLDPNSGRCFYINSLXGCKSWKPPRRSRSEXNPGSMEGXQXLKRNNDVLQPQAKGFRSDXGXPEPLDPQGSLSLSQRXSQLDPPALQAPRPLPQLLDDPHEVEKSGLLNMXKIAQGGRKLRKNWGPSWVVLXGNSLVFYREPPPXAPSSGWGPAGSRPESSVDLRGAALAHGRHLSSRRNVLHIRXIPGHEFLLQSDHEXELRAWHRALRXVIERLVRWVEARREAPXGRDQGSGDRENPLELRLSGSGPAELSAGEDEEEESELVSKPLLRLSSRRSSIRGPEGXEQNRVRNKLKRLIAKRPPLQSLQERGLLRDQVFGCQLESLCQREGDXVPSFLRLCIAAVDKRGLDVDGIYRVSGNLAVVQKLRFLVDRERAVXSDGRYVFPEQPGQEGRLDLDSXEWDDIHVVXGALKLFLRELPQPLVPPLLLPHFRAALALSESEQCLSQIQELIGSMPKPNHDXLRYLLEHLCRVIAHSDKNRMXPHNLGIVFGPXLFRPEQEXSDPAAHALYPGQLVQLMLXNFXSLFP

SEQ ID NO: 2919 - protein, 61 aa, Homo sapiens
  MOD_RES (53)..(53): Selenocysteine
MSEPPVYCNLVDLRRCPRSPPPGPACPLLQRLDAWEQHLDPNSGRCFYINSLXGCKSWKPP

SEQ ID NO: 2920 - protein, 153 aa, Homo sapiens
  MOD_RES (53)..(53): Selenocysteine
  MOD_RES (68)..(68): Selenocysteine
  MOD_RES (76)..(76): Selenocysteine
  MOD_RES (78)..(78): Selenocysteine
  MOD_RES (97)..(97): Selenocysteine
  MOD_RES (99)..(99): Selenocysteine
  MOD_RES (117)..(117): Selenocysteine
  MOD_RES (138)..(138): Selenocysteine
  MOD_RES (151)..(151): Selenocysteine
MSEPPVYCNLVDLRRCPRSPPPGPACPLLQRLDAWEQHLDPNSGRCFYINSLXGCKSWKPPRRSRSEXNPGSMEGXQXLKRNNDVLQPQAKGFRSDXGXPEPLDPQEVEKSGLLNMXKIAQGGRKLRKNWGPSWVVLXGNSLVFYREPPPXAP

SEQ ID NO: 2921 - protein, 131 aa, Homo sapiens
  MOD_RES (53)..(53): Selenocysteine
  MOD_RES (68)..(68): Selenocysteine
  MOD_RES (76)..(76): Selenocysteine
  MOD_RES (78)..(78): Selenocysteine
  MOD_RES (97)..(97): Selenocysteine
  MOD_RES (99)..(99): Selenocysteine
  MOD_RES (115)..(115): Selenocysteine
MSEPPVYCNLVDLRRCPRSPPPGPACPLLQRLDAWEQHLDPNSGRCFYINSLXGCKSWKPPRRSRSEXNPGSMEGXQXLKRNNDVLQPQAKGFRSDXGXPEPLDPQGSLSLSQRXSQLDPPALQAPRPLPQ

SEQ ID NO: 2922 - protein, 297 aa, Homo sapiens
  MOD_RES (53)..(53): Selenocysteine
  MOD_RES (68)..(68): Selenocysteine
  MOD_RES (76)..(76): Selenocysteine
  MOD_RES (78)..(78): Selenocysteine
  MOD_RES (97)..(97): Selenocysteine
  MOD_RES (99)..(99): Selenocysteine
  MOD_RES (115)..(115): Selenocysteine
  MOD_RES (148)..(148): Selenocysteine
  MOD_RES (169)..(169): Selenocysteine
  MOD_RES (182)..(182): Selenocysteine
  MOD_RES (223)..(223): Selenocysteine
  MOD_RES (237)..(237): Selenocysteine
  MOD_RES (248)..(248): Selenocysteine
MSEPPVYCNLVDLRRCPRSPPPGPACPLLQRLDAWEQHLDPNSGRCFYINSLXGCKSWKPPRRSRSEXNPGSMEGXQXLKRNNDVLQPQAKGFRSDXGXPEPLDPQGSLSLSQRXSQLDPPALQAPRPLPQLLDDPHEVEKSGLLNMXKIAQGGRKLRKNWGPSWVVLXGNSLVFYREPPPXAPSSGWGPAGSRPESSVDLRGAALAHGRHLSSRRNVLHIRXIPGHEFLLQSDHEXELRAWHRALRXVIERLDRENPLELRLSGSGPAELSAGEDEEEESELVSKPLLRLSSRRSS

SEQ ID NO: 2923 - protein, 547 aa, Homo sapiens
  MOD_RES (53)..(53): Selenocysteine
  MOD_RES (68)..(68): Selenocysteine
  MOD_RES (76)..(76): Selenocysteine
  MOD_RES (78)..(78): Selenocysteine
  MOD_RES (97)..(97): Selenocysteine
  MOD_RES (99)..(99): Selenocysteine
  MOD_RES (115)..(115): Selenocysteine
  MOD_RES (148)..(148): Selenocysteine
  MOD_RES (169)..(169): Selenocysteine
  MOD_RES (182)..(182): Selenocysteine
  MOD_RES (223)..(223): Selenocysteine
  MOD_RES (237)..(237): Selenocysteine
  MOD_RES (248)..(248): Selenocysteine
  MOD_RES (304)..(304): Selenocysteine
  MOD_RES (351)..(351): Selenocysteine
  MOD_RES (397)..(397): Selenocysteine
  MOD_RES (419)..(419): Selenocysteine
  MOD_RES (428)..(428): Selenocysteine
  MOD_RES (481)..(481): Selenocysteine
  MOD_RES (502)..(502): Selenocysteine
  MOD_RES (513)..(513): Selenocysteine
  MOD_RES (521)..(521): Selenocysteine
  MOD_RES (540)..(540): Selenocysteine
  MOD_RES (543)..(543): Selenocysteine
MSEPPVYCNLVDLRRCPRSPPPGPACPLLQRLDAWEQHLDPNSGRCFYINSLXGCKSWKPPRRSRSEXNPGSMEGXQXLKRNNDVLQPQAKGFRSDXGXPEPLDPQGSLSLSQRXSQLDPPALQAPRPLPQLLDDPHEVEKSGLLNMXKIAQGGRKLRKNWGPSWVVLXGNSLVFYREPPPXAPSSGWGPAGSRPESSVDLRGAALAHGRHLSSRRNVLHIRXIPGHEFLLQSDHEXELRAWHRALRXVIERLDRENPLELRLSGSGPAELSAGEDEEEESELVSKPLLRLSSRRSSIRGPEGXEQNRVRNKLKRLIAKRPPLQSLQERGLLRDQVFGCQLESLCQREGDXVPSFLRLCIAAVDKRGLDVDGIYRVSGNLAVVQKLRFLVDRERAVXSDGRYVFPEQPGQEGRLDLDSXEWDDIHVVXGALKLFLRELPQPLVPPLLLPHFRAALALSESEQCLSQIQELIGSMPKPNHDXLRYLLEHLCRVIAHSDKNRMXPHNLGIVFGPXLFRPEQEXSDPAAHALYPGQLVQLMLXNFXSLFP

SEQ ID NO: 2924 - protein, 168 aa, Homo sapiens
  MOD_RES (42)..(42): Selenocysteine
  MOD_RES (92)..(92): Selenocysteine
  MOD_RES (101)..(101): Selenocysteine
  MOD_RES (154)..(154): Selenocysteine
RNKLKRLIAKRPPLQSLQERGLLRDQVFGCQLESLCQREGDXVPSFLRLCIAAVDKRGLDVDGIYRVSGNLAVVQKLRFLVDREGRLDLDSXEWDDIHVVXGALKLFLRELPQPLVPPLLLPHFRAALALSESEQCLSQIQELIGSMPKPNHDXLRYLLEHLCRVIAH

SEQ ID NO: 2925 - protein, 156 aa, Homo sapiens
  MOD_RES (1)..(1): Any amino acid
  MOD_RES (5)..(5): Selenocysteine
  MOD_RES (51)..(51): Selenocysteine
  MOD_RES (90)..(90): Selenocysteine
  MOD_RES (111)..(111): Selenocysteine
  MOD_RES (122)..(122): Selenocysteine
  MOD_RES (130)..(130): Selenocysteine
  MOD_RES (149)..(149): Selenocysteine
  MOD_RES (152)..(152): Selenocysteine
XEGDXVPSFLRLCIAAVDKRGLDVDGIYRVSGNLAVVQKLRFLVDRERAVXSDGRYVFPEQPGQALSESEQCLSQIQELIGSMPKPNHDXLRYLLEHLCRVIAHSDKNRMXPHNLGIVFGPXLFRPEQEXSDPAAHALYPGQLVQLMLXNFXSLFP

SEQ ID NO: 2926 - protein, 92 aa, Homo sapiens
  MOD_RES (7)..(7): Selenocysteine
  MOD_RES (73)..(73): Selenocysteine
  MOD_RES (76)..(76): Selenocysteine
  MOD_RES (91)..(91): Selenocysteine
MAEQEPXAEQLAQIAAENEEDEHSVNYKPPAQKSIQEIQELDKDDESLRKYKEALLGRVAVSADPNVPNVVVXGLXLVCSSAPGPLELDLXG

SEQ ID NO: 2927 - protein, 249 aa, Homo sapiens
  MOD_RES (7)..(7): Selenocysteine
  MOD_RES (73)..(73): Selenocysteine
  MOD_RES (76)..(76): Selenocysteine
  MOD_RES (91)..(91): Selenocysteine
  MOD_RES (132)..(132): Selenocysteine
  MOD_RES (142)..(142): Selenocysteine
  MOD_RES (146)..(148): Selenocysteine
  MOD_RES (151)..(152): Selenocysteine
  MOD_RES (164)..(164): Selenocysteine
  MOD_RES (167)..(167): Selenocysteine
  MOD_RES (177)..(177): Selenocysteine
  MOD_RES (181)..(182): Selenocysteine
  MOD_RES (222)..(222): Selenocysteine
  MOD_RES (231)..(231): Selenocysteine
MAEQEPXAEQLAQIAAENEEDEHSVNYKPPAQKSIQEIQELDKDDESLRKYKEALLGRVAVSADPNVPNVVVXGLXLVCSSAPGPLELDLXGDLESFKKQSFVLKEGVEYRIKISFRVNREIVSGMKYIQHXYRKGVKIDKXDYMXXXRPXXCPGSGISPSRRXGRXEPSQRRAGQXDGRXXDRRMCPPQPLPSPYQSADRPSVPLPPWSASLAWLNRVPPXPLLSPPPPXGPASSVSCLVAASACAVG

SEQ ID NO: 2928 - protein, 204 aa, Homo sapiens
  MOD_RES (7)..(7): Selenocysteine
  MOD_RES (73)..(73): Selenocysteine
  MOD_RES (76)..(76): Selenocysteine
  MOD_RES (91)..(91): Selenocysteine
  MOD_RES (132)..(132): Selenocysteine
  MOD_RES (142)..(142): Selenocysteine
  MOD_RES (160)..(160): Selenocysteine
  MOD_RES (182)..(182): Selenocysteine
  MOD_RES (187)..(187): Selenocysteine
  MOD_RES (197)..(197): Selenocysteine
MAEQEPXAEQLAQIAAENEEDEHSVNYKPPAQKSIQEIQELDKDDESLRKYKEALLGRVAVSADPNVPNVVVXGLXLVCSSAPGPLELDLXGDLESFKKQSFVLKEGVEYRIKISFRVNREIVSGMKYIQHXYRKGVKIDKXDYMVGSYGPRAEEYEFLXPVEEAPKGMLARGSYSIKSRFXDDDKXDHLSWEWNLXIKKDWKD

SEQ ID NO: 2929 - protein, 194 aa, Homo sapiens
  MOD_RES (7)..(7): Selenocysteine
  MOD_RES (73)..(73): Selenocysteine
  MOD_RES (76)..(76): Selenocysteine
  MOD_RES (91)..(91): Selenocysteine
  MOD_RES (132)..(132): Selenocysteine
  MOD_RES (142)..(142): Selenocysteine
  MOD_RES (160)..(160): Selenocysteine
MAEQEPXAEQLAQIAAENEEDEHSVNYKPPAQKSIQEIQELDKDDESLRKYKEALLGRVAVSADPNVPNVVVXGLXLVCSSAPGPLELDLXGDLESFKKQSFVLKEGVEYRIKISFRVNREIVSGMKYIQHXYRKGVKIDKXDYMVGSYGPRAEEYEFLXPVEEAPKGSISPSHPRPGFRRERSSHSPGPVVAP

SEQ ID NO: 2930 - protein, 235 aa, Homo sapiens
  MOD_RES (7)..(7): Selenocysteine
  MOD_RES (73)..(73): Selenocysteine
  MOD_RES (76)..(76): Selenocysteine
  MOD_RES (91)..(91): Selenocysteine
  MOD_RES (132)..(132): Selenocysteine
  MOD_RES (142)..(142): Selenocysteine
  MOD_RES (160)..(160): Selenocysteine
MAEQEPXAEQLAQIAAENEEDEHSVNYKPPAQKSIQEIQELDKDDESLRKYKEALLGRVAVSADPNVPNVVVXGLXLVCSSAPGPLELDLXGDLESFKKQSFVLKEGVEYRIKISFRVNREIVSGMKYIQHXYRKGVKIDKXDYMVGSYGPRAEEYEFLXPVEEAPKGSISPSHPRPGFRRERSSHSPGPVVAPGRVRLLLRGGAGVWDARPRGGRAVLQPRCSLASPLVAVGPV

SEQ ID NO: 2931 - protein, 160 aa, Homo sapiens
  MOD_RES (7)..(7): Selenocysteine
  MOD_RES (73)..(73): Selenocysteine
  MOD_RES (76)..(76): Selenocysteine
  MOD_RES (91)..(91): Selenocysteine
  MOD_RES (132)..(132): Selenocysteine
  MOD_RES (143)..(143): Selenocysteine
  MOD_RES (153)..(153): Selenocysteine
MAEQEPXAEQLAQIAAENEEDEHSVNYKPPAQKSIQEIQELDKDDESLRKYKEALLGRVAVSADPNVPNVVVXGLXLVCSSAPGPLELDLXGDLESFKKQSFVLKEGVEYRIKISFRVNREIVSGMKYIQHXYRKGVKNDDKXDHLSWEWNLXIKKDWKD

SEQ ID NO: 2932 - protein, 129 aa, Homo sapiens
  MOD_RES (7)..(7): Selenocysteine
  MOD_RES (67)..(67): Selenocysteine
  MOD_RES (85)..(85): Selenocysteine
  MOD_RES (107)..(107): Selenocysteine
  MOD_RES (112)..(112): Selenocysteine
  MOD_RES (122)..(122): Selenocysteine
MAEQEPXAEQLAQIAAENEEDEHSVNYKPPAQKSIQEIQELDKDDESLRKYKEALLGRVAVSAVDKXDYMVGSYGPRAEEYEFLXPVEEAPKGMLARGSYSIKSRFXDDDKXDHLSWEWNLXIKKDWKD

SEQ ID NO: 2933 - protein, 88 aa, Homo sapiens
  MOD_RES (2)..(2): Selenocysteine
  MOD_RES (51)..(51): Selenocysteine
  MOD_RES (60)..(60): Selenocysteine
  MOD_RES (70)..(70): Selenocysteine
  MOD_RES (73)..(73): Selenocysteine
  MOD_RES (84)..(84): Selenocysteine
  MOD_RES (88)..(88): Selenocysteine
MXEKAPEPHVEEDDDDELDSKLNYKPPPQKSLKELQEMDKDDESLIKYKKXLLGDGPVVXDPKAPNVVVXRLXLVCESAPGPIXMDLX

SEQ ID NO: 2934 - protein, 112 aa, Homo sapiens
  MOD_RES (2)..(2): Selenocysteine
  MOD_RES (51)..(51): Selenocysteine
  MOD_RES (60)..(60): Selenocysteine
  MOD_RES (70)..(70): Selenocysteine
  MOD_RES (73)..(73): Selenocysteine
  MOD_RES (84)..(84): Selenocysteine
  MOD_RES (88)..(88): Selenocysteine
  MOD_RES (98)..(98): Selenocysteine
MXEKAPEPHVEEDDDDELDSKLNYKPPPQKSLKELQEMDKDDESLIKYKKXLLGDGPVVXDPKAPNVVVXRLXLVCESAPGPIXMDLXGDLEALKKEXIVLKEGSEYRVKIH

SEQ ID NO: 2935 - protein, 159 aa, Homo sapiens
  MOD_RES (2)..(2): Selenocysteine
  MOD_RES (51)..(51): Selenocysteine
  MOD_RES (60)..(60): Selenocysteine
  MOD_RES (70)..(70): Selenocysteine
  MOD_RES (73)..(73): Selenocysteine
  MOD_RES (84)..(84): Selenocysteine
  MOD_RES (88)..(88): Selenocysteine
  MOD_RES (98)..(98): Selenocysteine
  MOD_RES (129)..(129): Selenocysteine
  MOD_RES (132)..(132): Selenocysteine
  MOD_RES (140)..(140): Selenocysteine
  MOD_RES (157)..(157): Selenocysteine
MXEKAPEPHVEEDDDDELDSKLNYKPPPQKSLKELQEMDKDDESLIKYKKXLLGDGPVVXDPKAPNVVVXRLXLVCESAPGPIXMDLXGDLEALKKEXIVLKEGSEYRVKIHFKVNRDIVSGLKYVQHXYRXGVKVDKAXFMVGSYGPRPEEYEFLXPV

SEQ ID NO: 2936 - protein, 201 aa, Homo sapiens
  MOD_RES (2)..(2): Selenocysteine
  MOD_RES (51)..(51): Selenocysteine
  MOD_RES (60)..(60): Selenocysteine
  MOD_RES (70)..(70): Selenocysteine
  MOD_RES (73)..(73): Selenocysteine
  MOD_RES (84)..(84): Selenocysteine
  MOD_RES (88)..(88): Selenocysteine
  MOD_RES (98)..(98): Selenocysteine
  MOD_RES (129)..(129): Selenocysteine
  MOD_RES (132)..(132): Selenocysteine
  MOD_RES (140)..(140): Selenocysteine
  MOD_RES (157)..(157): Selenocysteine
  MOD_RES (171)..(171): Selenocysteine
  MOD_RES (179)..(179): Selenocysteine
  MOD_RES (200)..(200): Selenocysteine
MXEKAPEPHVEEDDDDELDSKLNYKPPPQKSLKELQEMDKDDESLIKYKKXLLGDGPVVXDPKAPNVVVXRLXLVCESAPGPIXMDLXGDLEALKKEXIVLKEGSEYRVKIHFKVNRDIVSGLKYVQHXYRXGVKVDKAXFMVGSYGPRPEEYEFLXPVEEAPKGMLARGXYHNKSFFXDDDKQDHLSWEWNLSIKKEWXE

SEQ ID NO: 2937 - protein, 195 aa, Homo sapiens
  MOD_RES (1)..(1): Any amino acid
  MOD_RES (46)..(46): Selenocysteine
  MOD_RES (55)..(55): Selenocysteine
  MOD_RES (65)..(65): Selenocysteine
  MOD_RES (68)..(68): Selenocysteine
  MOD_RES (79)..(79): Selenocysteine
  MOD_RES (83)..(83): Selenocysteine
  MOD_RES (92)..(92): Selenocysteine
  MOD_RES (123)..(123): Selenocysteine
  MOD_RES (126)..(126): Selenocysteine
  MOD_RES (134)..(134): Selenocysteine
  MOD_RES (151)..(151): Selenocysteine
  MOD_RES (165)..(165): Selenocysteine
  MOD_RES (173)..(173): Selenocysteine
  MOD_RES (194)..(194): Selenocysteine
XEPHVEEDDDDELDSKLNYKPPPQKSLKELQEMDKDDESLIKYKKXLLGDGPVVXDPKAPNVVVXRLXLVCESAPGPIXMDLXDLEALKKEXIVLKEGSEYRVKIHFKVNRDIVSGLKYVQHXYRXGVKVDKAXFMVGSYGPRPEEYEFLXPVEEAPKGMLARGXYHNKSFFXDDDKQDHLSWEWNLSIKKEWXE

SEQ ID NO: 2938 - protein, 116 aa, Homo sapiens
  MOD_RES (4)..(4): Selenocysteine
  MOD_RES (45)..(45): Selenocysteine
  MOD_RES (55)..(55): Selenocysteine
  MOD_RES (73)..(73): Selenocysteine
  MOD_RES (95)..(95): Selenocysteine
  MOD_RES (100)..(100): Selenocysteine
MDLXGDLAVLKDQVFVLKEGVDYRVKISFKVHREIVSGLKCLHHXYRRGLRVDKXVYMVGSYGPSAQEYEFVXPVEEAPRGALVRGPYLVVSLFXDDDRXHHLSWEWGLCICQDWK

SEQ ID NO: 2939 - protein, 178 aa, Homo sapiens
  MOD_RES (94)..(94): Selenocysteine
  MOD_RES (97)..(97): Selenocysteine
  MOD_RES (112)..(112): Selenocysteine
  MOD_RES (147)..(147): Selenocysteine
  MOD_RES (157)..(157): Selenocysteine
  MOD_RES (175)..(175): Selenocysteine
MLGLDACELGAQLLELLRLALCARVLLADKEGGPPAVDEVLDEAVPEYRAPGRKSLLEIRQLDPDDRSLAKYKRVLLGPLPPAVDPSLPNVQVXRLXLLSEQAPGPVVMDLXGDLAVLKDQVFVLKEGVDYRVHREIVSGLKCLHHXYRRGLRVDKXVYMVGSYGPSAQEYEFVXPVE

SEQ ID NO: 2940 - protein, 225 aa, Homo sapiens
  MOD_RES (94)..(94): Selenocysteine
  MOD_RES (97)..(97): Selenocysteine
  MOD_RES (112)..(112): Selenocysteine
  MOD_RES (153)..(153): Selenocysteine
  MOD_RES (163)..(163): Selenocysteine
  MOD_RES (181)..(181): Selenocysteine
  MOD_RES (203)..(203): Selenocysteine
  MOD_RES (208)..(208): Selenocysteine
MLGLDACELGAQLLELLRLALCARVLLADKEGGPPAVDEVLDEAVPEYRAPGRKSLLEIRQLDPDDRSLAKYKRVLLGPLPPAVDPSLPNVQVXRLXLLSEQAPGPVVMDLXGDLAVLKDQVFVLKEGVDYRVKISFKVHREIVSGLKCLHHXYRRGLRVDKXVYMVGSYGPSAQEYEFVXPVEEAPRGALVRGPYLVVSLFXDDDRXHHLSWEWGLCICQDWKD

SEQ ID NO: 2941 - protein, 76 aa, Homo sapiens
  MOD_RES (35)..(35): Selenocysteine
  MOD_RES (39)..(39): Selenocysteine
  MOD_RES (66)..(66): Selenocysteine
  MOD_RES (69)..(69): Selenocysteine
MSASCDGCVGSRPPVHLASGYSLADLLVLEMGMGXQCWXEDQRRWSSLWPWSHLSSDPSLPNVQVXRLXLLSEQAP

SEQ ID NO: 2942 - protein, 136 aa, Homo sapiens
  MOD_RES (35)..(35): Selenocysteine
  MOD_RES (39)..(39): Selenocysteine
  MOD_RES (126)..(126): Selenocysteine
  MOD_RES (129)..(129): Selenocysteine
MSASCDGCVGSRPPVHLASGYSLADLLVLEMGMGXQCWXEDQRRWSSLWPWSHLSSVLLADKEGGPPAVDEVLDEAVPEYRAPGRKSLLEIRQLDPDDRSLAKYKRVLLGPLPPAVDPSLPNVQVXRLXLLSEQAP

SEQ ID NO: 2943 - protein, 275 aa, Homo sapiens
  MOD_RES (18)..(18): Selenocysteine
  MOD_RES (44)..(44): Selenocysteine
  MOD_RES (66)..(66): Selenocysteine
  MOD_RES (111)..(111): Selenocysteine
  MOD_RES (117)..(117): Selenocysteine
  MOD_RES (169)..(169): Selenocysteine
  MOD_RES (179)..(179): Selenocysteine
  MOD_RES (211)..(211): Selenocysteine
  MOD_RES (232)..(232): Selenocysteine
FFRKKVMGNRRSDEPAKXKKGLSSILDAARWNRGEPQAEKPGAXDRKGGVGMPSRDRNIGAPGQDXPGVSLHPLSLDSPDREPGADAPLELGDSSPQGPMSLESLAPPESXDEGAEXERRWKRLSGRLGRSESLRVSDRRRPSRGSLGAKGRGGGRSRSDVDMDPSSAXAVLGPARRAXPEPGDEGEPGRSGLELEPEEPPGWRELVPPDXLHSLPKSQVKRQEVISELLVXEAAHVRMLRVLHDLFFQPMAECLFFPLEELQNIFPSLDELIEV

SEQ ID NO: 2944 - protein, 927 aa, Homo sapiens
  MOD_RES (6)..(6): Selenocysteine
  MOD_RES (52)..(52): Selenocysteine
  MOD_RES (122)..(122): Selenocysteine
  MOD_RES (140)..(140): Selenocysteine
  MOD_RES (181)..(181): Selenocysteine
  MOD_RES (222)..(222): Selenocysteine
  MOD_RES (225)..(225): Selenocysteine
  MOD_RES (248)..(248): Selenocysteine
  MOD_RES (276)..(276): Selenocysteine
  MOD_RES (314)..(314): Selenocysteine
  MOD_RES (336)..(336): Selenocysteine
  MOD_RES (381)..(381): Selenocysteine
  MOD_RES (387)..(387): Selenocysteine
  MOD_RES (421)..(421): Selenocysteine
  MOD_RES (442)..(442): Selenocysteine
  MOD_RES (575)..(575): Selenocysteine
  MOD_RES (581)..(581): Selenocysteine
  MOD_RES (594)..(594): Selenocysteine
  MOD_RES (598)..(598): Selenocysteine
  MOD_RES (659)..(659): Selenocysteine
  MOD_RES (670)..(670): Selenocysteine
  MOD_RES (674)..(674): Selenocysteine
  MOD_RES (708)..(708): Selenocysteine
  MOD_RES (710)..(710): Selenocysteine
  MOD_RES (712)..(712): Selenocysteine
  MOD_RES (717)..(717): Selenocysteine
  MOD_RES (726)..(726): Selenocysteine
  MOD_RES (730)..(730): Selenocysteine
  MOD_RES (735)..(735): Selenocysteine
  MOD_RES (745)..(745): Selenocysteine
  MOD_RES (759)..(759): Selenocysteine
  MOD_RES (771)..(771): Selenocysteine
  MOD_RES (773)..(773): Selenocysteine
  MOD_RES (795)..(795): Selenocysteine
  MOD_RES (812)..(812): Selenocysteine
  MOD_RES (819)..(819): Selenocysteine
  MOD_RES (841)..(841): Selenocysteine
  MOD_RES (882)..(882): Selenocysteine
  MOD_RES (895)..(895): Selenocysteine
  MOD_RES (927)..(927): Selenocysteine
MASLSXWSSPAEPREMEDFARGAASPGPSRPGLVPVSIIGAEDEDFENELEXNSEEQNSQFQSLEQVKRRPAHLMALLQHVALQFEPGPLLCCLHADMLGSLGPKEAKKAFLDFYHSFLEKXAVLRVPVPPNVAFELDRXRADLISEDVQRRFVQEVVQSQQVAVGRQLEDFRSKRLMGMXPWEQELAQLEAWVGRDRASYEARERHVAERLLMHLEEMQHXISXDEEKSAAVVNAIGLYMRHLGVRXKSGDKKSGRNFFRKKVMGNRRSDEPAKXKKGLSSILDAARWNRGEPQVPDFRHLKAEVDAEKPGAXDRKGGVGMPSRDRNIGAPGQDXPGVSLHPLSLDSPDREPGADAPLELGDSSPQGPMSLESLAPPESXDEGAEXESPEPGDEGEPGRSGLELEPEEPPGWRELVPPDXLHSLPKSQVKRQEVISELLVXEAAHVRMLRVLHDLFFQPMAECLFFPLEELQNIFPSLDELIEVHSLFLDRLMKRRQESGYLIEEIGDVLLARFDGAEGSWFQKISSRFCSRQSFALEQLKAKQRKDPRFCAFVQEAESRPRCRRLQLKDMIPXEMQRLXKYPLLLQSIGQNXEEPXEREKVELAAECCREILHHVNQAVRDMEDLLRLKDYQRRLDLSHLRQSSDPMLSEFKNLDIXKKKLVHEGPLXWRVXKDKAVEVHVLLLDDLLLLLQRQDERLLLKSHSRXLXPXPDGKXMLRPVLRLXSAMXREVAXDHKAFYVLFXWDQEAQIYELVAQXVSERKNWCALIXEXAGSLKVPAPASRPKPRPSPSSXREPLLSSSENGNGGREXSPADARXERILSDLLPFCRPGPEGQLAAXALRKVLSLKQLLFPAEEDNGAGPPRDGDGVPGGGPLSPARXQEIQENLLSLEEXMKQLEELEEEFCRLRPLLSQLGGNSVPQPGCX

SEQ ID NO: 2945 - protein, 948 aa, Homo sapiens
  MOD_RES (6)..(6): Selenocysteine
  MOD_RES (52)..(52): Selenocysteine
  MOD_RES (107)..(107): Selenocysteine
  MOD_RES (148)..(148): Selenocysteine
  MOD_RES (189)..(189): Selenocysteine
  MOD_RES (192)..(192): Selenocysteine
  MOD_RES (215)..(215): Selenocysteine
  MOD_RES (243)..(243): Selenocysteine
  MOD_RES (281)..(281): Selenocysteine
  MOD_RES (303)..(303): Selenocysteine
  MOD_RES (348)..(348): Selenocysteine
  MOD_RES (354)..(354): Selenocysteine
  MOD_RES (388)..(388): Selenocysteine
  MOD_RES (409)..(409): Selenocysteine
  MOD_RES (542)..(542): Selenocysteine
  MOD_RES (548)..(548): Selenocysteine
  MOD_RES (561)..(561): Selenocysteine
  MOD_RES (565)..(565): Selenocysteine
  MOD_RES (626)..(626): Selenocysteine
  MOD_RES (637)..(637): Selenocysteine
  MOD_RES (641)..(641): Selenocysteine
  MOD_RES (675)..(675): Selenocysteine
  MOD_RES (677)..(677): Selenocysteine
  MOD_RES (679)..(679): Selenocysteine
  MOD_RES (684)..(684): Selenocysteine
  MOD_RES (693)..(693): Selenocysteine
  MOD_RES (697)..(697): Selenocysteine
  MOD_RES (702)..(702): Selenocysteine
  MOD_RES (712)..(712): Selenocysteine
  MOD_RES (726)..(726): Selenocysteine
  MOD_RES (738)..(738): Selenocysteine
  MOD_RES (740)..(740): Selenocysteine
  MOD_RES (762)..(762): Selenocysteine
  MOD_RES (779)..(779): Selenocysteine
  MOD_RES (786)..(786): Selenocysteine
  MOD_RES (808)..(808): Selenocysteine
  MOD_RES (823)..(823): Selenocysteine
  MOD_RES (936)..(936): Selenocysteine
  MOD_RES (938)..(938): Selenocysteine
MASLSXWSSPAEPREMEDFARGAASPGPSRPGLVPVSIIGAEDEDFENELEXNSEEQNSQFQSLEQVKRRPAHLMALLQHVALQFEPGPLVLRVPVPPNVAFELDRXRADLISEDVQRRFVQEVVQSQQVAVGRQLEDFRSKRLMGMXPWEQELAQLEAWVGRDRASYEARERHVAERLLMHLEEMQHXISXDEEKSAAVVNAIGLYMRHLGVRXKSGDKKSGRNFFRKKVMGNRRSDEPAKXKKGLSSILDAARWNRGEPQVPDFRHLKAEVDAEKPGAXDRKGGVGMPSRDRNIGAPGQDXPGVSLHPLSLDSPDREPGADAPLELGDSSPQGPMSLESLAPPESXDEGAEXESPEPGDEGEPGRSGLELEPEEPPGWRELVPPDXLHSLPKSQVKRQEVISELLVXEAAHVRMLRVLHDLFFQPMAECLFFPLEELQNIFPSLDELIEVHSLFLDRLMKRRQESGYLIEEIGDVLLARFDGAEGSWFQKISSRFCSRQSFALEQLKAKQRKDPRFCAFVQEAESRPRCRRLQLKDMIPXEMQRLXKYPLLLQSIGQNXEEPXEREKVELAAECCREILHHVNQAVRDMEDLLRLKDYQRRLDLSHLRQSSDPMLSEFKNLDIXKKKLVHEGPLXWRVXKDKAVEVHVLLLDDLLLLLQRQDERLLLKSHSRXLXPXPDGKXMLRPVLRLXSAMXREVAXDHKAFYVLFXWDQEAQIYELVAQXVSERKNWCALIXEXAGSLKVPAPASRPKPRPSPSSXREPLLSSSENGNGGREXSPADARXERILSDLLPFCRPGPEGQLAAXALRKGVGGGILPPEXPPVSAWGELCPPAWLHLRFPPRKAFCKKERNGGEDVRDHPHPHSCRSISHPEGLRRGSCGPRLGGAQLGLLAPHEPRPSLPPALCLGDSGLHSGGHHGDPGHLSIACGGHPSXPXPKCLRSVFIP

SEQ ID NO: 2946 - protein, 912 aa, Homo sapiens
  MOD_RES (37)..(37): Selenocysteine
  MOD_RES (107)..(107): Selenocysteine
  MOD_RES (125)..(125): Selenocysteine
  MOD_RES (166)..(166): Selenocysteine
  MOD_RES (207)..(207): Selenocysteine
  MOD_RES (210)..(210): Selenocysteine
  MOD_RES (233)..(233): Selenocysteine
  MOD_RES (261)..(261): Selenocysteine
  MOD_RES (299)..(299): Selenocysteine
  MOD_RES (321)..(321): Selenocysteine
  MOD_RES (366)..(366): Selenocysteine
  MOD_RES (372)..(372): Selenocysteine
  MOD_RES (406)..(406): Selenocysteine
  MOD_RES (427)..(427): Selenocysteine
  MOD_RES (560)..(560): Selenocysteine
  MOD_RES (566)..(566): Selenocysteine
  MOD_RES (579)..(579): Selenocysteine
  MOD_RES (583)..(583): Selenocysteine
  MOD_RES (644)..(644): Selenocysteine
  MOD_RES (655)..(655): Selenocysteine
  MOD_RES (659)..(659): Selenocysteine
  MOD_RES (693)..(693): Selenocysteine
  MOD_RES (695)..(695): Selenocysteine
  MOD_RES (697)..(697): Selenocysteine
  MOD_RES (702)..(702): Selenocysteine
  MOD_RES (711)..(711): Selenocysteine
  MOD_RES (715)..(715): Selenocysteine
  MOD_RES (720)..(720): Selenocysteine
  MOD_RES (730)..(730): Selenocysteine
  MOD_RES (744)..(744): Selenocysteine
  MOD_RES (756)..(756): Selenocysteine
  MOD_RES (758)..(758): Selenocysteine
  MOD_RES (780)..(780): Selenocysteine
  MOD_RES (797)..(797): Selenocysteine
  MOD_RES (804)..(804): Selenocysteine
  MOD_RES (826)..(826): Selenocysteine
  MOD_RES (867)..(867): Selenocysteine
  MOD_RES (880)..(880): Selenocysteine
  MOD_RES (912)..(912): Selenocysteine
MEDFARGAASPGPSRPGLVPVSIIGAEDEDFENELEXNSEEQNSQFQSLEQVKRRPAHLMALLQHVALQFEPGPLLCCLHADMLGSLGPKEAKKAFLDFYHSFLEKXAVLRVPVPPNVAFELDRXRADLISEDVQRRFVQEVVQSQQVAVGRQLEDFRSKRLMGMXPWEQELAQLEAWVGRDRASYEARERHVAERLLMHLEEMQHXISXDEEKSAAVVNAIGLYMRHLGVRXKSGDKKSGRNFFRKKVMGNRRSDEPAKXKKGLSSILDAARWNRGEPQVPDFRHLKAEVDAEKPGAXDRKGGVGMPSRDRNIGAPGQDXPGVSLHPLSLDSPDREPGADAPLELGDSSPQGPMSLESLAPPESXDEGAEXESPEPGDEGEPGRSGLELEPEEPPGWRELVPPDXLHSLPKSQVKRQEVISELLVXEAAHVRMLRVLHDLFFQPMAECLFFPLEELQNIFPSLDELIEVHSLFLDRLMKRRQESGYLIEEIGDVLLARFDGAEGSWFQKISSRFCSRQSFALEQLKAKQRKDPRFCAFVQEAESRPRCRRLQLKDMIPXEMQRLXKYPLLLQSIGQNXEEPXEREKVELAAECCREILHHVNQAVRDMEDLLRLKDYQRRLDLSHLRQSSDPMLSEFKNLDIXKKKLVHEGPLXWRVXKDKAVEVHVLLLDDLLLLLQRQDERLLLKSHSRXLXPXPDGKXMLRPVLRLXSAMXREVAXDHKAFYVLFXWDQEAQIYELVAQXVSERKNWCALIXEXAGSLKVPAPASRPKPRPSPSSXREPLLSSSENGNGGREXSPADARXERILSDLLPFCRPGPEGQLAAXALRKVLSLKQLLFPAEEDNGAGPPRDGDGVPGGGPLSPARXQEIQENLLSLEEXMKQLEELEEEFCRLRPLLSQLGGNSVPQPGCX

SEQ ID NO: 2947 - protein, 968 aa, Homo sapiens
  MOD_RES (37)..(37): Selenocysteine
  MOD_RES (107)..(107): Selenocysteine
  MOD_RES (125)..(125): Selenocysteine
  MOD_RES (166)..(166): Selenocysteine
  MOD_RES (207)..(207): Selenocysteine
  MOD_RES (210)..(210): Selenocysteine
  MOD_RES (233)..(233): Selenocysteine
  MOD_RES (261)..(261): Selenocysteine
  MOD_RES (299)..(299): Selenocysteine
  MOD_RES (321)..(321): Selenocysteine
  MOD_RES (366)..(366): Selenocysteine
  MOD_RES (372)..(372): Selenocysteine
  MOD_RES (420)..(420): Selenocysteine
  MOD_RES (430)..(430): Selenocysteine
  MOD_RES (462)..(462): Selenocysteine
  MOD_RES (483)..(483): Selenocysteine
  MOD_RES (616)..(616): Selenocysteine
  MOD_RES (622)..(622): Selenocysteine
  MOD_RES (635)..(635): Selenocysteine
  MOD_RES (639)..(639): Selenocysteine
  MOD_RES (700)..(700): Selenocysteine
  MOD_RES (711)..(711): Selenocysteine
  MOD_RES (715)..(715): Selenocysteine
  MOD_RES (749)..(749): Selenocysteine
  MOD_RES (751)..(751): Selenocysteine
  MOD_RES (753)..(753): Selenocysteine
  MOD_RES (758)..(758): Selenocysteine
  MOD_RES (767)..(767): Selenocysteine
  MOD_RES (771)..(771): Selenocysteine
  MOD_RES (776)..(776): Selenocysteine
  MOD_RES (786)..(786): Selenocysteine
  MOD_RES (800)..(800): Selenocysteine
  MOD_RES (812)..(812): Selenocysteine
  MOD_RES (814)..(814): Selenocysteine
  MOD_RES (836)..(836): Selenocysteine
  MOD_RES (853)..(853): Selenocysteine
  MOD_RES (860)..(860): Selenocysteine
  MOD_RES (882)..(882): Selenocysteine
  MOD_RES (923)..(923): Selenocysteine
  MOD_RES (936)..(936): Selenocysteine
  MOD_RES (968)..(968): Selenocysteine
MEDFARGAASPGPSRPGLVPVSIIGAEDEDFENELEXNSEEQNSQFQSLEQVKRRPAHLMALLQHVALQFEPGPLLCCLHADMLGSLGPKEAKKAFLDFYHSFLEKXAVLRVPVPPNVAFELDRXRADLISEDVQRRFVQEVVQSQQVAVGRQLEDFRSKRLMGMXPWEQELAQLEAWVGRDRASYEARERHVAERLLMHLEEMQHXISXDEEKSAAVVNAIGLYMRHLGVRXKSGDKKSGRNFFRKKVMGNRRSDEPAKXKKGLSSILDAARWNRGEPQVPDFRHLKAEVDAEKPGAXDRKGGVGMPSRDRNIGAPGQDXPGVSLHPLSLDSPDREPGADAPLELGDSSPQGPMSLESLAPPESXDEGAEXERLSGRLGRSESLRVSDRRRPSRGSLGAKGRGGGRSRSDVDMDPSSAXAVLGPARRAXPEPGDEGEPGRSGLELEPEEPPGWRELVPPDXLHSLPKSQVKRQEVISELLVXEAAHVRMLRVLHDLFFQPMAECLFFPLEELQNIFPSLDELIEVHSLFLDRLMKRRQESGYLIEEIGDVLLARFDGAEGSWFQKISSRFCSRQSFALEQLKAKQRKDPRFCAFVQEAESRPRCRRLQLKDMIPXEMQRLXKYPLLLQSIGQNXEEPXEREKVELAAECCREILHHVNQAVRDMEDLLRLKDYQRRLDLSHLRQSSDPMLSEFKNLDIXKKKLVHEGPLXWRVXKDKAVEVHVLLLDDLLLLLQRQDERLLLKSHSRXLXPXPDGKXMLRPVLRLXSAMXREVAXDHKAFYVLFXWDQEAQIYELVAQXVSERKNWCALIXEXAGSLKVPAPASRPKPRPSPSSXREPLLSSSENGNGGREXSPADARXERILSDLLPFCRPGPEGQLAAXALRKVLSLKQLLFPAEEDNGAGPPRDGDGVPGGGPLSPARXQEIQENLLSLEEXMKQLEELEEEFCRLRPLLSQLGGNSVPQPGCX

SEQ ID NO: 2948 - protein, 879 aa, Homo sapiens
  MOD_RES (37)..(37): Selenocysteine
  MOD_RES (92)..(92): Selenocysteine
  MOD_RES (133)..(133): Selenocysteine
  MOD_RES (174)..(174): Selenocysteine
  MOD_RES (177)..(177): Selenocysteine
  MOD_RES (200)..(200): Selenocysteine
  MOD_RES (228)..(228): Selenocysteine
  MOD_RES (266)..(266): Selenocysteine
  MOD_RES (288)..(288): Selenocysteine
  MOD_RES (333)..(333): Selenocysteine
  MOD_RES (339)..(339): Selenocysteine
  MOD_RES (373)..(373): Selenocysteine
  MOD_RES (394)..(394): Selenocysteine
  MOD_RES (527)..(527): Selenocysteine
  MOD_RES (533)..(533): Selenocysteine
  MOD_RES (546)..(546): Selenocysteine
  MOD_RES (550)..(550): Selenocysteine
  MOD_RES (611)..(611): Selenocysteine
  MOD_RES (622)..(622): Selenocysteine
  MOD_RES (626)..(626): Selenocysteine
  MOD_RES (660)..(660): Selenocysteine
  MOD_RES (662)..(662): Selenocysteine
  MOD_RES (664)..(664): Selenocysteine
  MOD_RES (669)..(669): Selenocysteine
  MOD_RES (678)..(678): Selenocysteine
  MOD_RES (682)..(682): Selenocysteine
  MOD_RES (687)..(687): Selenocysteine
  MOD_RES (697)..(697): Selenocysteine
  MOD_RES (711)..(711): Selenocysteine
  MOD_RES (723)..(723): Selenocysteine
  MOD_RES (725)..(725): Selenocysteine
  MOD_RES (747)..(747): Selenocysteine
  MOD_RES (764)..(764): Selenocysteine
  MOD_RES (771)..(771): Selenocysteine
  MOD_RES (793)..(793): Selenocysteine
  MOD_RES (834)..(834): Selenocysteine
  MOD_RES (847)..(847): Selenocysteine
  MOD_RES (879)..(879): Selenocysteine
MEDFARGAASPGPSRPGLVPVSIIGAEDEDFENELEXNSEEQNSQFQSLEQVKRRPAHLMALLQHVALQFEPGPLVLRVPVPPNVAFELDRXRADLISEDVQRRFVQEVVQSQQVAVGRQLEDFRSKRLMGMXPWEQELAQLEAWVGRDRASYEARERHVAERLLMHLEEMQHXISXDEEKSAAVVNAIGLYMRHLGVRXKSGDKKSGRNFFRKKVMGNRRSDEPAKXKKGLSSILDAARWNRGEPQVPDFRHLKAEVDAEKPGAXDRKGGVGMPSRDRNIGAPGQDXPGVSLHPLSLDSPDREPGADAPLELGDSSPQGPMSLESLAPPESXDEGAEXESPEPGDEGEPGRSGLELEPEEPPGWRELVPPDXLHSLPKSQVKRQEVISELLVXEAAHVRMLRVLHDLFFQPMAECLFFPLEELQNIFPSLDELIEVHSLFLDRLMKRRQESGYLIEEIGDVLLARFDGAEGSWFQKISSRFCSRQSFALEQLKAKQRKDPRFCAFVQEAESRPRCRRLQLKDMIPXEMQRLXKYPLLLQSIGQNXEEPXEREKVELAAECCREILHHVNQAVRDMEDLLRLKDYQRRLDLSHLRQSSDPMLSEFKNLDIXKKKLVHEGPLXWRVXKDKAVEVHVLLLDDLLLLLQRQDERLLLKSHSRXLXPXPDGKXMLRPVLRLXSAMXREVAXDHKAFYVLFXWDQEAQIYELVAQXVSERKNWCALIXEXAGSLKVPAPASRPKPRPSPSSXREPLLSSSENGNGGREXSPADARXERILSDLLPFCRPGPEGQLAAXALRKVLSLKQLLFPAEEDNGAGPPRDGDGVPGGGPLSPARXQEIQENLLSLEEXMKQLEELEEEFCRLRPLLSQLGGNSVPQPGCX

SEQ ID NO: 2949 - protein, 702 aa, Homo sapiens
  MOD_RES (1)..(1): Any amino acid
  MOD_RES (19)..(19): Selenocysteine
  MOD_RES (64)..(64): Selenocysteine
  MOD_RES (70)..(70): Selenocysteine
  MOD_RES (122)..(122): Selenocysteine
  MOD_RES (132)..(132): Selenocysteine
  MOD_RES (164)..(164): Selenocysteine
  MOD_RES (185)..(185): Selenocysteine
  MOD_RES (318)..(318): Selenocysteine
  MOD_RES (324)..(324): Selenocysteine
  MOD_RES (337)..(337): Selenocysteine
  MOD_RES (341)..(341): Selenocysteine
  MOD_RES (402)..(402): Selenocysteine
  MOD_RES (413)..(413): Selenocysteine
  MOD_RES (417)..(417): Selenocysteine
  MOD_RES (451)..(451): Selenocysteine
  MOD_RES (453)..(453): Selenocysteine
  MOD_RES (455)..(455): Selenocysteine
  MOD_RES (460)..(460): Selenocysteine
  MOD_RES (469)..(469): Selenocysteine
  MOD_RES (473)..(473): Selenocysteine
  MOD_RES (478)..(478): Selenocysteine
  MOD_RES (488)..(488): Selenocysteine
  MOD_RES (502)..(502): Selenocysteine
  MOD_RES (514)..(514): Selenocysteine
  MOD_RES (516)..(516): Selenocysteine
  MOD_RES (538)..(538): Selenocysteine
  MOD_RES (555)..(555): Selenocysteine
  MOD_RES (562)..(562): Selenocysteine
  MOD_RES (584)..(584): Selenocysteine
  MOD_RES (599)..(599): Selenocysteine
  MOD_RES (627)..(629): Selenocysteine
  MOD_RES (634)..(634): Selenocysteine
  MOD_RES (642)..(642): Selenocysteine
  MOD_RES (646)..(646): Selenocysteine
  MOD_RES (650)..(650): Selenocysteine
  MOD_RES (654)..(654): Selenocysteine
  MOD_RES (685)..(685): Selenocysteine
  MOD_RES (699)..(699): Selenocysteine
XGVGMPSRDRNIGAPGQDXPGVSLHPLSLDSPDREPGADAPLELGDSSPQGPMSLESLAPPESXDEGAEXERRWKRLSGRLGRSESLRVSDRRRPSRGSLGAKGRGGGRSRSDVDMDPSSAXAVLGPARRAXPEPGDEGEPGRSGLELEPEEPPGWRELVPPDXLHSLPKSQVKRQEVISELLVXEAAHVRMLRVLHDLFFQPMAECLFFPLEELQNIFPSLDELIEVHSLFLDRLMKRRQESGYLIEEIGDVLLARFDGAEGSWFQKISSRFCSRQSFALEQLKAKQRKDPRFCAFVQEAESRPRCRRLQLKDMIPXEMQRLXKYPLLLQSIGQNXEEPXEREKVELAAECCREILHHVNQAVRDMEDLLRLKDYQRRLDLSHLRQSSDPMLSEFKNLDIXKKKLVHEGPLXWRVXKDKAVEVHVLLLDDLLLLLQRQDERLLLKSHSRXLXPXPDGKXMLRPVLRLXSAMXREVAXDHKAFYVLFXWDQEAQIYELVAQXVSERKNWCALIXEXAGSLKVPAPASRPKPRPSPSSXREPLLSSSENGNGGREXSPADARXERILSDLLPFCRPGPEGQLAAXALRKGVGGGILPPEXPPVSAWGELCPPAWLHLRFPPRKHPILXXXCEVGXAMMDAHFXDVEXEVLXGKVXWPKSHRDEVSLDLNAGARWRWRRCVQDPCWXRKPGPGLEHGPAHXQPG

SEQ ID NO: 2950 - protein, 128 aa, Homo sapiens
  MOD_RES (1)..(1): Any amino acid
  MOD_RES (5)..(7): Selenocysteine
  MOD_RES (12)..(12): Selenocysteine
  MOD_RES (20)..(20): Selenocysteine
  MOD_RES (24)..(24): Selenocysteine
  MOD_RES (28)..(28): Selenocysteine
  MOD_RES (32)..(32): Selenocysteine
  MOD_RES (52)..(52): Selenocysteine
  MOD_RES (67)..(67): Selenocysteine
  MOD_RES (80)..(80): Selenocysteine
  MOD_RES (84)..(84): Selenocysteine
  MOD_RES (92)..(92): Selenocysteine
  MOD_RES (96)..(96): Selenocysteine
  MOD_RES (119)..(119): Selenocysteine
XPILXXXCEVGXAMMDAHFXDVEXEVLXGKVXWPKSHRDEVSLDLNAVDARXNGQARGGGGDDASRXPAGHASLDRDWNXDPHXRSLDRRYXDRGXYGYSQAPPRQVPHHLLWGKAALXWAAPGGFYP

SEQ ID NO: 2951 - protein, 291 aa, Homo sapiens
  MOD_RES (1)..(1): Any amino acid
  MOD_RES (15)..(15): Selenocysteine
  MOD_RES (21)..(21): Selenocysteine
  MOD_RES (34)..(34): Selenocysteine
  MOD_RES (38)..(38): Selenocysteine
  MOD_RES (99)..(99): Selenocysteine
  MOD_RES (110)..(110): Selenocysteine
  MOD_RES (114)..(114): Selenocysteine
  MOD_RES (148)..(148): Selenocysteine
  MOD_RES (150)..(150): Selenocysteine
  MOD_RES (152)..(152): Selenocysteine
  MOD_RES (157)..(157): Selenocysteine
  MOD_RES (166)..(166): Selenocysteine
  MOD_RES (170)..(170): Selenocysteine
  MOD_RES (175)..(175): Selenocysteine
  MOD_RES (185)..(185): Selenocysteine
  MOD_RES (199)..(199): Selenocysteine
  MOD_RES (206)..(206): Selenocysteine
  MOD_RES (223)..(223): Selenocysteine
  MOD_RES (230)..(230): Selenocysteine
  MOD_RES (252)..(252): Selenocysteine
XPRCRRLQLKDMIPXEMQRLXKYPLLLQSIGQNXEEPXEREKVELAAECCREILHHVNQAVRDMEDLLRLKDYQRRLDLSHLRQSSDPMLSEFKNLDIXKKKLVHEGPLXWRVXKDKAVEVHVLLLDDLLLLLQRQDERLLLKSHSRXLXPXPDGKXMLRPVLRLXSAMXREVAXDHKAFYVLFXWDQEAQIYELVAQXVSERKNXREPLLSSSENGNGGREXSPADARXERILSDLLPFCRPGPEGQLAAXALRKVLSLKQLLFPAEEDNGAGPPRDGDGVPGGGPLSPA

SEQ ID NO: 2952 - protein, 307 aa, Homo sapiens
  MOD_RES (1)..(1): Any amino acid
  MOD_RES (2)..(2): Selenocysteine
  MOD_RES (38)..(38): Selenocysteine
  MOD_RES (92)..(92): Selenocysteine
  MOD_RES (102)..(102): Selenocysteine
  MOD_RES (134)..(134): Selenocysteine
  MOD_RES (155)..(155): Selenocysteine
  MOD_RES (288)..(288): Selenocysteine
  MOD_RES (294)..(294): Selenocysteine
  MOD_RES (307)..(307): Selenocysteine
XXSVPALVSPRLCPCPGFSSSLFLSWSLLVSVPGICLXLSLASGSRLSGRLGRSESLRVSDRRRPSRGSLGAKGRGGGRSRSDVDMDPSSAXAVLGPARRAXPEPGDEGEPGRSGLELEPEEPPGWRELVPPDXLHSLPKSQVKRQEVISELLVXEAAHVRMLRVLHDLFFQPMAECLFFPLEELQNIFPSLDELIEVHSLFLDRLMKRRQESGYLIEEIGDVLLARFDGAEGSWFQKISSRFCSRQSFALEQLKAKQRKDPRFCAFVQEAESRPRCRRLQLKDMIPXEMQRLXKYPLLLQSIGQNX

SEQ ID NO: 2953 - protein, 68 aa, Homo sapiens
  MOD_RES (1)..(1): Any amino acid
  MOD_RES (29)..(29): Selenocysteine
  MOD_RES (31)..(31): Selenocysteine
  MOD_RES (33)..(33): Selenocysteine
  MOD_RES (38)..(38): Selenocysteine
  MOD_RES (47)..(47): Selenocysteine
  MOD_RES (51)..(51): Selenocysteine
  MOD_RES (56)..(56): Selenocysteine
XVHVLLLDDLLLLLQRQDERLLLKSHSRXLXPXPDGKXMLRPVLRLXSAMXREVAXAGVLSSLRLPDP

SEQ ID NO: 2954 - protein, 88 aa, Homo sapiens
  MOD_RES (1)..(1): Any amino acid
  MOD_RES (34)..(34): Selenocysteine
  MOD_RES (74)..(74): Selenocysteine
  MOD_RES (76)..(76): Selenocysteine
XVQRRFVQEVVQSQQVAVGRQLEDFRSKRLMGMXPWEQELAQLEAWVGRDRASYEARERHVAERLLMHLEEMQXAXLRCILGGWGPQA

SEQ ID NO: 2955 - protein, 988 aa, Homo sapiens
  MOD_RES (5)..(5): Selenocysteine
  MOD_RES (12)..(12): Selenocysteine
  MOD_RES (25)..(25): Selenocysteine
  MOD_RES (57)..(57): Selenocysteine
  MOD_RES (114)..(114): Selenocysteine
  MOD_RES (172)..(172): Selenocysteine
  MOD_RES (180)..(180): Selenocysteine
  MOD_RES (183)..(183): Selenocysteine
  MOD_RES (202)..(203): Selenocysteine
  MOD_RES (229)..(229): Selenocysteine
  MOD_RES (244)..(244): Selenocysteine
  MOD_RES (248)..(248): Selenocysteine
  MOD_RES (298)..(298): Selenocysteine
  MOD_RES (309)..(309): Selenocysteine
  MOD_RES (325)..(325): Selenocysteine
  MOD_RES (364)..(364): Selenocysteine
  MOD_RES (415)..(415): Selenocysteine
  MOD_RES (437)..(437): Selenocysteine
  MOD_RES (474)..(474): Selenocysteine
  MOD_RES (477)..(477): Selenocysteine
  MOD_RES (482)..(482): Selenocysteine
  MOD_RES (484)..(484): Selenocysteine
  MOD_RES (548)..(548): Selenocysteine
  MOD_RES (563)..(563): Selenocysteine
  MOD_RES (599)..(599): Selenocysteine
  MOD_RES (609)..(609): Selenocysteine
  MOD_RES (614)..(614): Selenocysteine
  MOD_RES (638)..(638): Selenocysteine
  MOD_RES (643)..(643): Selenocysteine
  MOD_RES (650)..(650): Selenocysteine
  MOD_RES (698)..(698): Selenocysteine
  MOD_RES (714)..(714): Selenocysteine
  MOD_RES (746)..(746): Selenocysteine
  MOD_RES (750)..(750): Selenocysteine
  MOD_RES (756)..(756): Selenocysteine
  MOD_RES (758)..(758): Selenocysteine
  MOD_RES (769)..(769): Selenocysteine
  MOD_RES (784)..(784): Selenocysteine
  MOD_RES (797)..(797): Selenocysteine
  MOD_RES (817)..(817): Selenocysteine
  MOD_RES (838)..(838): Selenocysteine
  MOD_RES (895)..(895): Selenocysteine
  MOD_RES (924)..(924): Selenocysteine
  MOD_RES (977)..(977): Selenocysteine
AKDGXKDGLERXRAAVKRGRSFIRXKSLIAQDHRSSLEEEQNLFIDVDCKHPEAILXPMPEGLSQQQVVRRYILGSVVDSEKNYVDALKRILEQYEKPLSEMEPKVLSERKLKXVFYRVKEILQCHSLFQIALASRVSEWDSVEMIGDVFVASFSKSMVLDAYSEYVNNFSXAVAVLKKXCAXKPAFLEFLKQEQEASPDRXXLYSLMMKPIQRFPQFILLLQDMLKNXSKGHPDRLPLQMALXELEXLAEKLNERKRDADQRCEVKQIAKAINERYLNKLLSSGSRYLIRSDDMIEXVYNDRGEIVKXKERRVFMLNDVLMCAXVSSRPSHDSRVMSSQRYLLKWSVPLGHVDAIEYGSSAGXGEHSRHLAVHPPESLAVVANAKPNKVYMGPGQLYQDLQNLLHDLNVIGQIXQLIGNLKGNYQNLNQSVAHDWXSGLQRLILKKEDEIRAADCCRIQLQLPGKQDKSGRPXFFXAVFNXFXPAIKESWVNSLQMAKLALEEENHMGWFCVEDDGNHIKKEKHPLLVGHMPVMVAKQQEFKIGSCXHQMGQIAIVSFQNSXPKVIECFNVESRILCMLYVPVEEKRREPGAPPDPEXPAVRASDVPXICVGXEEGSISIYKSSQGSKKVRLQHFFXPEKSXVMSLACXSQSLYAGLVNGAVASYARAPDGSWDSEPQKVIKLGVLPVRSLLMMEDXLWAASGGQVFIISVEXHAVEGQLEAHQEEGMVISHMAVSGVGIWIAFXSGSXLRLFHXEXLKHLQDINIAXPVHNMLPGHQRLSVXSLLVCHGLLMVGXSLGVLVALPVPRLQGIPKVXGRGMVSYHAHNSPVKFIVLAXALHEKDKDKSRDSLAPGPEPQDEDQKDALPSGGAGSSLSQGDPDAAIWLGDSLGSMXQKSDLSSSSGSLSLSHGSSSLEHRSEDSXIYDLLKDPVSLRSKARRAKKAKASSALVVCGGQGHRRVHRKARQPHQEELAPXVMVWQIPLLNI

SEQ ID NO: 2956 - protein, 1306 aa, Homo sapiens
  MOD_RES (20)..(20): Selenocysteine
  MOD_RES (52)..(52): Selenocysteine
  MOD_RES (64)..(64): Selenocysteine
  MOD_RES (74)..(75): Selenocysteine
  MOD_RES (81)..(81): Selenocysteine
  MOD_RES (98)..(98): Selenocysteine
  MOD_RES (107)..(107): Selenocysteine
  MOD_RES (155)..(155): Selenocysteine
  MOD_RES (163)..(163): Selenocysteine
  MOD_RES (167)..(167): Selenocysteine
  MOD_RES (182)..(182): Selenocysteine
  MOD_RES (204)..(204): Selenocysteine
  MOD_RES (294)..(294): Selenocysteine
  MOD_RES (301)..(301): Selenocysteine
  MOD_RES (314)..(314): Selenocysteine
  MOD_RES (346)..(346): Selenocysteine
  MOD_RES (403)..(403): Selenocysteine
  MOD_RES (461)..(461): Selenocysteine
  MOD_RES (469)..(469): Selenocysteine
  MOD_RES (472)..(472): Selenocysteine
  MOD_RES (491)..(492): Selenocysteine
  MOD_RES (518)..(518): Selenocysteine
  MOD_RES (533)..(533): Selenocysteine
  MOD_RES (537)..(537): Selenocysteine
  MOD_RES (587)..(587): Selenocysteine
  MOD_RES (598)..(598): Selenocysteine
  MOD_RES (614)..(614): Selenocysteine
  MOD_RES (653)..(653): Selenocysteine
  MOD_RES (704)..(704): Selenocysteine
  MOD_RES (726)..(726): Selenocysteine
  MOD_RES (763)..(763): Selenocysteine
  MOD_RES (766)..(766): Selenocysteine
  MOD_RES (771)..(771): Selenocysteine
  MOD_RES (773)..(773): Selenocysteine
  MOD_RES (855)..(855): Selenocysteine
  MOD_RES (866)..(866): Selenocysteine
  MOD_RES (881)..(881): Selenocysteine
  MOD_RES (917)..(917): Selenocysteine
  MOD_RES (927)..(927): Selenocysteine
  MOD_RES (932)..(932): Selenocysteine
  MOD_RES (956)..(956): Selenocysteine
  MOD_RES (961)..(961): Selenocysteine
  MOD_RES (968)..(968): Selenocysteine
  MOD_RES (1016)..(1016): Selenocysteine
  MOD_RES (1032)..(1032): Selenocysteine
  MOD_RES (1064)..(1064): Selenocysteine
  MOD_RES (1068)..(1068): Selenocysteine
  MOD_RES (1074)..(1074): Selenocysteine
  MOD_RES (1076)..(1076): Selenocysteine
  MOD_RES (1087)..(1087): Selenocysteine
  MOD_RES (1102)..(1102): Selenocysteine
  MOD_RES (1115)..(1115): Selenocysteine
  MOD_RES (1135)..(1135): Selenocysteine
  MOD_RES (1156)..(1156): Selenocysteine
  MOD_RES (1213)..(1213): Selenocysteine
  MOD_RES (1242)..(1242): Selenocysteine
  MOD_RES (1295)..(1295): Selenocysteine
MDQREPLPPAPAENEMKYDXNNNEEEEGEQFDFDSGDEIPEADRQAPSAPEXGGAGASEAPAPXGGEDGAGAEXXPVAEPXKLVLPMKVNPYSVIDIXPFQEDQPPXPVPSAEEENVGLHVPCGYLVPVPCGYAVPSNLPLLLPAYSSPVIICAXSLDEEAEXPEVXEDRQPNSLSSEEPPXSEDQVGREDSALARWAADPANXAWMENPEEAIYDDVPRENSDSEPDEMIYDDVENGDEGGNSSLEYGWSSSEFESYEEQSDSECKNGIPRSFLRSNHKKQMQKLVKAAKDGXKDGLERXRAAVKRGRSFIRXKSLIAQDHRSSLEEEQNLFIDVDCKHPEAILXPMPEGLSQQQVVRRYILGSVVDSEKNYVDALKRILEQYEKPLSEMEPKVLSERKLKXVFYRVKEILQCHSLFQIALASRVSEWDSVEMIGDVFVASFSKSMVLDAYSEYVNNFSXAVAVLKKXCAXKPAFLEFLKQEQEASPDRXXLYSLMMKPIQRFPQFILLLQDMLKNXSKGHPDRLPLQMALXELEXLAEKLNERKRDADQRCEVKQIAKAINERYLNKLLSSGSRYLIRSDDMIEXVYNDRGEIVKXKERRVFMLNDVLMCAXVSSRPSHDSRVMSSQRYLLKWSVPLGHVDAIEYGSSAGXGEHSRHLAVHPPESLAVVANAKPNKVYMGPGQLYQDLQNLLHDLNVIGQIXQLIGNLKGNYQNLNQSVAHDWXSGLQRLILKKEDEIRAADCCRIQLQLPGKQDKSGRPXFFXAVFNXFXPAIKESWVNSLQMAKLALEEENHMGWFCVEDDGNHIKKEKHPLLVGHMPVMVAKQQEFKIECAAYNPEPYLNNESQPDSFSXAHGFLWIGSCXHQMGQIAIVSFQNSXPKVIECFNVESRILCMLYVPVEEKRREPGAPPDPEXPAVRASDVPXICVGXEEGSISIYKSSQGSKKVRLQHFFXPEKSXVMSLACXSQSLYAGLVNGAVASYARAPDGSWDSEPQKVIKLGVLPVRSLLMMEDXLWAASGGQVFIISVEXHAVEGQLEAHQEEGMVISHMAVSGVGIWIAFXSGSXLRLFHXEXLKHLQDINIAXPVHNMLPGHQRLSVXSLLVCHGLLMVGXSLGVLVALPVPRLQGIPKVXGRGMVSYHAHNSPVKFIVLAXALHEKDKDKSRDSLAPGPEPQDEDQKDALPSGGAGSSLSQGDPDAAIWLGDSLGSMXQKSDLSSSSGSLSLSHGSSSLEHRSEDSXIYDLLKDPVSLRSKARRAKKAKASSALVVCGGQGHRRVHRKARQPHQEELAPXVMVWQIPLLNI

SEQ ID NO: 2957 - protein, 1344 aa, Homo sapiens
  MOD_RES (20)..(20): Selenocysteine
  MOD_RES (52)..(52): Selenocysteine
  MOD_RES (64)..(64): Selenocysteine
  MOD_RES (74)..(75): Selenocysteine
  MOD_RES (81)..(81): Selenocysteine
  MOD_RES (98)..(98): Selenocysteine
  MOD_RES (107)..(107): Selenocysteine
  MOD_RES (155)..(155): Selenocysteine
  MOD_RES (162)..(162): Selenocysteine
  MOD_RES (166)..(166): Selenocysteine
  MOD_RES (181)..(181): Selenocysteine
  MOD_RES (203)..(203): Selenocysteine
  MOD_RES (287)..(287): Selenocysteine
  MOD_RES (304)..(304): Selenocysteine
  MOD_RES (332)..(332): Selenocysteine
  MOD_RES (339)..(339): Selenocysteine
  MOD_RES (352)..(352): Selenocysteine
  MOD_RES (384)..(384): Selenocysteine
  MOD_RES (441)..(441): Selenocysteine
  MOD_RES (499)..(499): Selenocysteine
  MOD_RES (507)..(507): Selenocysteine
  MOD_RES (510)..(510): Selenocysteine
  MOD_RES (529)..(530): Selenocysteine
  MOD_RES (556)..(556): Selenocysteine
  MOD_RES (571)..(571): Selenocysteine
  MOD_RES (575)..(575): Selenocysteine
  MOD_RES (625)..(625): Selenocysteine
  MOD_RES (636)..(636): Selenocysteine
  MOD_RES (652)..(652): Selenocysteine
  MOD_RES (691)..(691): Selenocysteine
  MOD_RES (742)..(742): Selenocysteine
  MOD_RES (764)..(764): Selenocysteine
  MOD_RES (801)..(801): Selenocysteine
  MOD_RES (804)..(804): Selenocysteine
  MOD_RES (809)..(809): Selenocysteine
  MOD_RES (811)..(811): Selenocysteine
  MOD_RES (893)..(893): Selenocysteine
  MOD_RES (904)..(904): Selenocysteine
  MOD_RES (919)..(919): Selenocysteine
  MOD_RES (955)..(955): Selenocysteine
  MOD_RES (965)..(965): Selenocysteine
  MOD_RES (970)..(970): Selenocysteine
  MOD_RES (994)..(994): Selenocysteine
  MOD_RES (999)..(999): Selenocysteine
  MOD_RES (1006)..(1006): Selenocysteine
  MOD_RES (1054)..(1054): Selenocysteine
  MOD_RES (1070)..(1070): Selenocysteine
  MOD_RES (1102)..(1102): Selenocysteine
  MOD_RES (1106)..(1106): Selenocysteine
  MOD_RES (1112)..(1112): Selenocysteine
  MOD_RES (1114)..(1114): Selenocysteine
  MOD_RES (1125)..(1125): Selenocysteine
  MOD_RES (1140)..(1140): Selenocysteine
  MOD_RES (1153)..(1153): Selenocysteine
  MOD_RES (1173)..(1173): Selenocysteine
  MOD_RES (1194)..(1194): Selenocysteine
  MOD_RES (1251)..(1251): Selenocysteine
  MOD_RES (1280)..(1280): Selenocysteine
  MOD_RES (1333)..(1333): Selenocysteine
MDQREPLPPAPAENEMKYDXNNNEEEEGEQFDFDSGDEIPEADRQAPSAPEXGGAGASEAPAPXGGEDGAGAEXXPVAEPXKLVLPMKVNPYSVIDIXPFQEDQPPXPVPSAEEENVGLHVPCGYLVPVPCGYAVPSNLPLLLPAYSSPVIICAXSLDEEEXPEVXEDRQPNSLSSEEPPXSEDQVGREDSALARWAADPANXAWMENPEEAIYDDVPRENSDSEPDEMIYDDVENGDEGGNSSLEYGWSSSEFESYEEQSDSECKNGIPRSFLRSNHKKQLSHDLXRLKEHYEKKMRDLMASXVGVVEIQQLRQKHELKMQKLVKAAKDGXKDGLERXRAAVKRGRSFIRXKSLIAQDHRSSLEEEQNLFIDVDCKHPEAILXPMPEGLSQQQVVRRYILGSVVDSEKNYVDALKRILEQYEKPLSEMEPKVLSERKLKXVFYRVKEILQCHSLFQIALASRVSEWDSVEMIGDVFVASFSKSMVLDAYSEYVNNFSXAVAVLKKXCAXKPAFLEFLKQEQEASPDRXXLYSLMMKPIQRFPQFILLLQDMLKNXSKGHPDRLPLQMALXELEXLAEKLNERKRDADQRCEVKQIAKAINERYLNKLLSSGSRYLIRSDDMIEXVYNDRGEIVKXKERRVFMLNDVLMCAXVSSRPSHDSRVMSSQRYLLKWSVPLGHVDAIEYGSSAGXGEHSRHLAVHPPESLAVVANAKPNKVYMGPGQLYQDLQNLLHDLNVIGQIXQLIGNLKGNYQNLNQSVAHDWXSGLQRLILKKEDEIRAADCCRIQLQLPGKQDKSGRPXFFXAVFNXFXPAIKESWVNSLQMAKLALEEENHMGWFCVEDDGNHIKKEKHPLLVGHMPVMVAKQQEFKIECAAYNPEPYLNNESQPDSFSXAHGFLWIGSCXHQMGQIAIVSFQNSXPKVIECFNVESRILCMLYVPVEEKRREPGAPPDPEXPAVRASDVPXICVGXEEGSISIYKSSQGSKKVRLQHFFXPEKSXVMSLACXSQSLYAGLVNGAVASYARAPDGSWDSEPQKVIKLGVLPVRSLLMMEDXLWAASGGQVFIISVEXHAVEGQLEAHQEEGMVISHMAVSGVGIWIAFXSGSXLRLFHXEXLKHLQDINIAXPVHNMLPGHQRLSVXSLLVCHGLLMVGXSLGVLVALPVPRLQGIPKVXGRGMVSYHAHNSPVKFIVLAXALHEKDKDKSRDSLAPGPEPQDEDQKDALPSGGAGSSLSQGDPDAAIWLGDSLGSMXQKSDLSSSSGSLSLSHGSSSLEHRSEDSXIYDLLKDPVSLRSKARRAKKAKASSALVVCGGQGHRRVHRKARQPHQEELAPXVMVWQIPLLNI

SEQ ID NO: 2958 - protein, 380 aa, Homo sapiens
  MOD_RES (88)..(88): Selenocysteine
  MOD_RES (95)..(95): Selenocysteine
  MOD_RES (108)..(108): Selenocysteine
  MOD_RES (140)..(140): Selenocysteine
  MOD_RES (197)..(197): Selenocysteine
  MOD_RES (255)..(255): Selenocysteine
  MOD_RES (263)..(263): Selenocysteine
  MOD_RES (266)..(266): Selenocysteine
  MOD_RES (285)..(286): Selenocysteine
  MOD_RES (312)..(312): Selenocysteine
  MOD_RES (327)..(327): Selenocysteine
  MOD_RES (331)..(331): Selenocysteine
MENPEEAIYDDVPRENSDSEPDEMIYDDVENGDEGGNSSLEYGWSSSEFESYEEQSDSECKNGIPRSFLRSNHKKQMQKLVKAAKDGXKDGLERXRAAVKRGRSFIRXKSLIAQDHRSSLEEEQNLFIDVDCKHPEAILXPMPEGLSQQQVVRRYILGSVVDSEKNYVDALKRILEQYEKPLSEMEPKVLSERKLKXVFYRVKEILQCHSLFQIALASRVSEWDSVEMIGDVFVASFSKSMVLDAYSEYVNNFSXAVAVLKKXCAXKPAFLEFLKQEQEASPDRXXLYSLMMKPIQRFPQFILLLQDMLKNXSKGHPDRLPLQMALXELEXLAEKLNERKRDADQRCEVKQIAKAINERYLNKVERGFLQLYSKIIFALC

SEQ ID NO: 2959 - protein, 1368 aa, Homo sapiens
  MOD_RES (44)..(44): Selenocysteine
  MOD_RES (76)..(76): Selenocysteine
  MOD_RES (88)..(88): Selenocysteine
  MOD_RES (98)..(99): Selenocysteine
  MOD_RES (105)..(105): Selenocysteine
  MOD_RES (122)..(122): Selenocysteine
  MOD_RES (131)..(131): Selenocysteine
  MOD_RES (179)..(179): Selenocysteine
  MOD_RES (187)..(187): Selenocysteine
  MOD_RES (191)..(191): Selenocysteine
  MOD_RES (206)..(206): Selenocysteine
  MOD_RES (228)..(228): Selenocysteine
  MOD_RES (312)..(312): Selenocysteine
  MOD_RES (329)..(329): Selenocysteine
  MOD_RES (357)..(357): Selenocysteine
  MOD_RES (364)..(364): Selenocysteine
  MOD_RES (377)..(377): Selenocysteine
  MOD_RES (409)..(409): Selenocysteine
  MOD_RES (466)..(466): Selenocysteine
  MOD_RES (524)..(524): Selenocysteine
  MOD_RES (532)..(532): Selenocysteine
  MOD_RES (535)..(535): Selenocysteine
  MOD_RES (553)..(554): Selenocysteine
  MOD_RES (580)..(580): Selenocysteine
  MOD_RES (595)..(595): Selenocysteine
  MOD_RES (599)..(599): Selenocysteine
  MOD_RES (649)..(649): Selenocysteine
  MOD_RES (660)..(660): Selenocysteine
  MOD_RES (676)..(676): Selenocysteine
  MOD_RES (715)..(715): Selenocysteine
  MOD_RES (766)..(766): Selenocysteine
  MOD_RES (788)..(788): Selenocysteine
  MOD_RES (825)..(825): Selenocysteine
  MOD_RES (828)..(828): Selenocysteine
  MOD_RES (833)..(833): Selenocysteine
  MOD_RES (835)..(835): Selenocysteine
  MOD_RES (917)..(917): Selenocysteine
  MOD_RES (928)..(928): Selenocysteine
  MOD_RES (943)..(943): Selenocysteine
  MOD_RES (979)..(979): Selenocysteine
  MOD_RES (989)..(989): Selenocysteine
  MOD_RES (994)..(994): Selenocysteine
  MOD_RES (1018)..(1018): Selenocysteine
  MOD_RES (1023)..(1023): Selenocysteine
  MOD_RES (1030)..(1030): Selenocysteine
  MOD_RES (1078)..(1078): Selenocysteine
  MOD_RES (1094)..(1094): Selenocysteine
  MOD_RES (1126)..(1126): Selenocysteine
  MOD_RES (1130)..(1130): Selenocysteine
  MOD_RES (1136)..(1136): Selenocysteine
  MOD_RES (1138)..(1138): Selenocysteine
  MOD_RES (1149)..(1149): Selenocysteine
  MOD_RES (1164)..(1164): Selenocysteine
  MOD_RES (1177)..(1177): Selenocysteine
  MOD_RES (1197)..(1197): Selenocysteine
  MOD_RES (1218)..(1218): Selenocysteine
  MOD_RES (1275)..(1275): Selenocysteine
  MOD_RES (1304)..(1304): Selenocysteine
  MOD_RES (1357)..(1357): Selenocysteine
MRPPGFLSRAPSLNRAERGIWSCSMDQREPLPPAPAENEMKYDXNNNEEEEGEQFDFDSGDEIPEADRQAPSAPEXGGAGASEAPAPXGGEDGAGAEXXPVAEPXKLVLPMKVNPYSVIDIXPFQEDQPPXPVPSAEEENVGLHVPCGYLVPVPCGYAVPSNLPLLLPAYSSPVIICAXSLDEEAEXPEVXEDRQPNSLSSEEPPXSEDQVGREDSALARWAADPANXAWMENPEEAIYDDVPRENSDSEPDEMIYDDVENGDEGGNSSLEYGWSSSEFESYEEQSDSECKNGIPRSFLRSNHKKQLSHDLXRLKEHYEKKMRDLMASXVGVVEIQQLRQKHELKMQKLVKAAKDGXKDGLERXRAAVKRGRSFIRXKSLIAQDHRSSLEEEQNLFIDVDCKHPEAILXPMPEGLSQQQVVRRYILGSVVDSEKNYVDALKRILEQYEKPLSEMEPKVLSERKLKXVFYRVKEILQCHSLFQIALASRVSEWDSVEMIGDVFVASFSKSMVLDAYSEYVNNFSXAVAVLKKXCAXKPAFLEFLKEQEASPDRXXLYSLMMKPIQRFPQFILLLQDMLKNXSKGHPDRLPLQMALXELEXLAEKLNERKRDADQRCEVKQIAKAINERYLNKLLSSGSRYLIRSDDMIEXVYNDRGEIVKXKERRVFMLNDVLMCAXVSSRPSHDSRVMSSQRYLLKWSVPLGHVDAIEYGSSAGXGEHSRHLAVHPPESLAVVANAKPNKVYMGPGQLYQDLQNLLHDLNVIGQIXQLIGNLKGNYQNLNQSVAHDWXSGLQRLILKKEDEIRAADCCRIQLQLPGKQDKSGRPXFFXAVFNXFXPAIKESWVNSLQMAKLALEEENHMGWFCVEDDGNHIKKEKHPLLVGHMPVMVAKQQEFKIECAAYNPEPYLNNESQPDSFSXAHGFLWIGSCXHQMGQIAIVSFQNSXPKVIECFNVESRILCMLYVPVEEKRREPGAPPDPEXPAVRASDVPXICVGXEEGSISIYKSSQGSKKVRLQHFFXPEKSXVMSLACXSQSLYAGLVNGAVASYARAPDGSWDSEPQKVIKLGVLPVRSLLMMEDXLWAASGGQVFIISVEXHAVEGQLEAHQEEGMVISHMAVSGVGIWIAFXSGSXLRLFHXEXLKHLQDINIAXPVHNMLPGHQRLSVXSLLVCHGLLMVGXSLGVLVALPVPRLQGIPKVXGRGMVSYHAHNSPVKFIVLAXALHEKDKDKSRDSLAPGPEPQDEDQKDALPSGGAGSSLSQGDPDAAIWLGDSLGSMXQKSDLSSSSGSLSLSHGSSSLEHRSEDSXIYDLLKDPVSLRSKARRAKKAKASSALVVCGGQGHRRVHRKARQPHQEELAPXVMVWQIPLLNI

SEQ ID NO: 2960 - protein, 1369 aa, Homo sapiens
  MOD_RES (44)..(44): Selenocysteine
  MOD_RES (76)..(76): Selenocysteine
  MOD_RES (88)..(88): Selenocysteine
  MOD_RES (98)..(99): Selenocysteine
  MOD_RES (105)..(105): Selenocysteine
  MOD_RES (122)..(122): Selenocysteine
  MOD_RES (131)..(131): Selenocysteine
  MOD_RES (179)..(179): Selenocysteine
  MOD_RES (187)..(187): Selenocysteine
  MOD_RES (191)..(191): Selenocysteine
  MOD_RES (206)..(206): Selenocysteine
  MOD_RES (228)..(228): Selenocysteine
  MOD_RES (312)..(312): Selenocysteine
  MOD_RES (329)..(329): Selenocysteine
  MOD_RES (357)..(357): Selenocysteine
  MOD_RES (364)..(364): Selenocysteine
  MOD_RES (377)..(377): Selenocysteine
  MOD_RES (409)..(409): Selenocysteine
  MOD_RES (466)..(466): Selenocysteine
  MOD_RES (524)..(524): Selenocysteine
  MOD_RES (532)..(532): Selenocysteine
  MOD_RES (535)..(535): Selenocysteine
  MOD_RES (554)..(555): Selenocysteine
  MOD_RES (581)..(581): Selenocysteine
  MOD_RES (596)..(596): Selenocysteine
  MOD_RES (600)..(600): Selenocysteine
  MOD_RES (650)..(650): Selenocysteine
  MOD_RES (661)..(661): Selenocysteine
  MOD_RES (677)..(677): Selenocysteine
  MOD_RES (716)..(716): Selenocysteine
  MOD_RES (767)..(767): Selenocysteine
  MOD_RES (789)..(789): Selenocysteine
  MOD_RES (826)..(826): Selenocysteine
  MOD_RES (829)..(829): Selenocysteine
  MOD_RES (834)..(834): Selenocysteine
  MOD_RES (836)..(836): Selenocysteine
  MOD_RES (918)..(918): Selenocysteine
  MOD_RES (929)..(929): Selenocysteine
  MOD_RES (944)..(944): Selenocysteine
  MOD_RES (980)..(980): Selenocysteine
  MOD_RES (990)..(990): Selenocysteine
  MOD_RES (995)..(995): Selenocysteine
  MOD_RES (1019)..(1019): Selenocysteine
  MOD_RES (1024)..(1024): Selenocysteine
  MOD_RES (1031)..(1031): Selenocysteine
  MOD_RES (1079)..(1079): Selenocysteine
  MOD_RES (1095)..(1095): Selenocysteine
  MOD_RES (1127)..(1127): Selenocysteine
  MOD_RES (1131)..(1131): Selenocysteine
  MOD_RES (1137)..(1137): Selenocysteine
  MOD_RES (1139)..(1139): Selenocysteine
  MOD_RES (1150)..(1150): Selenocysteine
  MOD_RES (1165)..(1165): Selenocysteine
  MOD_RES (1178)..(1178): Selenocysteine
  MOD_RES (1198)..(1198): Selenocysteine
  MOD_RES (1219)..(1219): Selenocysteine
  MOD_RES (1276)..(1276): Selenocysteine
  MOD_RES (1305)..(1305): Selenocysteine
  MOD_RES (1358)..(1358): Selenocysteine
MRPPGFLSRAPSLNRAERGIWSCSMDQREPLPPAPAENEMKYDXNNNEEEEGEQFDFDSGDEIPEADRQAPSAPEXGGAGASEAPAPXGGEDGAGAEXXPVAEPXKLVLPMKVNPYSVIDIXPFQEDQPPXPVPSAEEENVGLHVPCGYLVPVPCGYAVPSNLPLLLPAYSSPVIICAXSLDEEAEXPEVXEDRQPNSLSSEEPPXSEDQVGREDSALARWAADPANXAWMENPEEAIYDDVPRENSDSEPDEMIYDDVENGDEGGNSSLEYGWSSSEFESYEEQSDSECKNGIPRSFLRSNHKKQLSHDLXRLKEHYEKKMRDLMASXVGVVEIQQLRQKHELKMQKLVKAAKDGXKDGLERXRAAVKRGRSFIRXKSLIAQDHRSSLEEEQNLFIDVDCKHPEAILXPMPEGLSQQQVVRRYILGSVVDSEKNYVDALKRILEQYEKPLSEMEPKVLSERKLKXVFYRVKEILQCHSLFQIALASRVSEWDSVEMIGDVFVASFSKSMVLDAYSEYVNNFSXAVAVLKKXCAXKPAFLEFLKQEQEASPDRXXLYSLMMKPIQRFPQFILLLQDMLKNXSKGHPDRLPLQMALXELEXLAEKLNERKRDADQRCEVKQIAKAINERYLNKLLSSGSRYLIRSDDMIEXVYNDRGEIVKXKERRVFMLNDVLMCAXVSSRPSHDSRVMSSQRYLLKWSVPLGHVDAIEYGSSAGXGEHSRHLAVHPPESLAVVANAKPNKVYMGPGQLYQDLQNLLHDLNVIGQIXQLIGNLKGNYQNLNQSVAHDWXSGLQRLILKKEDEIRAADCCRIQLQLPGKQDKSGRPXFFXAVFNXFXPAIKESWVNSLQMAKLALEEENHMGWFCVEDDGNHIKKEKHPLLVGHMPVMVAKQQEFKIECAAYNPEPYLNNESQPDSFSXAHGFLWIGSCXHQMGQIAIVSFQNSXPKVIECFNVESRILCMLYVPVEEKRREPGAPPDPEXPAVRASDVPXICVGXEEGSISIYKSSQGSKKVRLQHFFXPEKSXVMSLACXSQSLYAGLVNGAVASYARAPDGSWDSEPQKVIKLGVLPVRSLLMMEDXLWAASGGQVFIISVEXHAVEGQLEAHQEEGMVISHMAVSGVGIWIAFXSGSXLRLFHXEXLKHLQDINIAXPVHNMLPGHQRLSVXSLLVCHGLLMVGXSLGVLVALPVPRLQGIPKVXGRGMVSYHAHNSPVKFIVLAXALHEKDKDKSRDSLAPGPEPQDEDQKDALPSGGAGSSLSQGDPDAAIWLGDSLGSMXQKSDLSSSSGSLSLSHGSSSLEHRSEDSXIYDLLKDPVSLRSKARRAKKAKASSALVVCGGQGHRRVHRKARQPHQEELAPXVMVWQIPLLNI

SEQ ID NO: 2961 - protein, 611 aa, Homo sapiens
  MOD_RES (20)..(20): Selenocysteine
  MOD_RES (35)..(35): Selenocysteine
  MOD_RES (39)..(39): Selenocysteine
  MOD_RES (61)..(61): Selenocysteine
  MOD_RES (75)..(75): Selenocysteine
  MOD_RES (86)..(86): Selenocysteine
  MOD_RES (88)..(88): Selenocysteine
  MOD_RES (90)..(90): Selenocysteine
  MOD_RES (142)..(142): Selenocysteine
  MOD_RES (158)..(158): Selenocysteine
  MOD_RES (209)..(209): Selenocysteine
  MOD_RES (214)..(214): Selenocysteine
  MOD_RES (218)..(218): Selenocysteine
  MOD_RES (225)..(225): Selenocysteine
  MOD_RES (276)..(276): Selenocysteine
  MOD_RES (358)..(358): Selenocysteine
  MOD_RES (390)..(390): Selenocysteine
  MOD_RES (421)..(421): Selenocysteine
  MOD_RES (428)..(428): Selenocysteine
  MOD_RES (432)..(432): Selenocysteine
  MOD_RES (450)..(450): Selenocysteine
  MOD_RES (452)..(452): Selenocysteine
  MOD_RES (484)..(484): Selenocysteine
  MOD_RES (491)..(491): Selenocysteine
  MOD_RES (507)..(507): Selenocysteine
  MOD_RES (515)..(515): Selenocysteine
  MOD_RES (532)..(532): Selenocysteine
  MOD_RES (537)..(538): Selenocysteine
  MOD_RES (556)..(556): Selenocysteine
  MOD_RES (573)..(573): Selenocysteine
  MOD_RES (580)..(580): Selenocysteine
  MOD_RES (582)..(582): Selenocysteine
  MOD_RES (593)..(593): Selenocysteine
  MOD_RES (595)..(596): Selenocysteine
KPIQRFPQFILLLQDMLKNXPRGHPDRLSLQLALXELEXLAEKLNEQKRLADQVAEIQQLXKSVSDRSSLNKLLXSGQRQLLLCEXLXEXVYGDRGQLIKSKERRVFLLNDMLVCANINFKGQLEISSLVPLGPKYVVKWNXALPQVQVVEVGQDGGXYDKDNVLIQHSGAKKASASGQAQNKVYLGPPRLFQELQDLQKDLAVVEQIXLLISXLHGXYQNLNMXVAQDWCLALQRLMRVKEEEIHSANKCRLRLLLPGKPDKSGRPISFMVVFIXPNPLSKISWVNRLHLAKIGLREENQPGWLCPDEDKKSKAPFWCPILACCIPAFSSRALSLQLGALVHSPVNCPLLGFSAVSXSLPQGYLWVGGGQEGAGGQVEIFSLNRPSPRXVKSFPLAAPVLCMEYIPELEEEAESRDESPXVADPSAXVHPXICLGLQDGSILLYSSVDXGXQCLVSCRSPGLQPVLCLRHSPFHLLAGLQDGXLAAYPRXSGGVLWDLESPPVCLXVGPGPVRXLLSLEDAVWASCGPRVXVLEAXXLQPQQSFEAHQDEAVSVXHMVKAGSGVWMAFSSGXSIRLFHXEXLEHLQEINIAXRXXFLLPDRSLIKCSPRA

SEQ ID NO: 2962 - protein, 1279 aa, Homo sapiens
  MOD_RES (46)..(46): Selenocysteine
  MOD_RES (61)..(61): Selenocysteine
  MOD_RES (74)..(74): Selenocysteine
  MOD_RES (85)..(85): Selenocysteine
  MOD_RES (121)..(121): Selenocysteine
  MOD_RES (209)..(209): Selenocysteine
  MOD_RES (218)..(218): Selenocysteine
  MOD_RES (244)..(244): Selenocysteine
  MOD_RES (254)..(254): Selenocysteine
  MOD_RES (261)..(261): Selenocysteine
  MOD_RES (390)..(390): Selenocysteine
  MOD_RES (418)..(418): Selenocysteine
  MOD_RES (430)..(430): Selenocysteine
  MOD_RES (450)..(450): Selenocysteine
  MOD_RES (476)..(476): Selenocysteine
  MOD_RES (491)..(491): Selenocysteine
  MOD_RES (495)..(495): Selenocysteine
  MOD_RES (517)..(517): Selenocysteine
  MOD_RES (531)..(531): Selenocysteine
  MOD_RES (542)..(542): Selenocysteine
  MOD_RES (544)..(544): Selenocysteine
  MOD_RES (546)..(546): Selenocysteine
  MOD_RES (603)..(603): Selenocysteine
  MOD_RES (619)..(619): Selenocysteine
  MOD_RES (670)..(670): Selenocysteine
  MOD_RES (675)..(675): Selenocysteine
  MOD_RES (679)..(679): Selenocysteine
  MOD_RES (686)..(686): Selenocysteine
  MOD_RES (737)..(737): Selenocysteine
  MOD_RES (819)..(819): Selenocysteine
  MOD_RES (851)..(851): Selenocysteine
  MOD_RES (882)..(882): Selenocysteine
  MOD_RES (889)..(889): Selenocysteine
  MOD_RES (893)..(893): Selenocysteine
  MOD_RES (911)..(911): Selenocysteine
  MOD_RES (913)..(913): Selenocysteine
  MOD_RES (945)..(945): Selenocysteine
  MOD_RES (952)..(952): Selenocysteine
  MOD_RES (968)..(968): Selenocysteine
  MOD_RES (976)..(976): Selenocysteine
  MOD_RES (993)..(993): Selenocysteine
  MOD_RES (998)..(999): Selenocysteine
  MOD_RES (1017)..(1017): Selenocysteine
  MOD_RES (1034)..(1034): Selenocysteine
  MOD_RES (1041)..(1041): Selenocysteine
  MOD_RES (1043)..(1043): Selenocysteine
  MOD_RES (1054)..(1054): Selenocysteine
  MOD_RES (1056)..(1057): Selenocysteine
  MOD_RES (1069)..(1069): Selenocysteine
  MOD_RES (1082)..(1082): Selenocysteine
  MOD_RES (1102)..(1102): Selenocysteine
  MOD_RES (1123)..(1123): Selenocysteine
  MOD_RES (1166)..(1166): Selenocysteine
  MOD_RES (1180)..(1180): Selenocysteine
  MOD_RES (1266)..(1266): Selenocysteine
  MOD_RES (1269)..(1269): Selenocysteine
MASSNPPPQPAIGDQLVPGVPGPSSEAEDDPGEAFEFDDSDDEEDXSAALGVPSLAPERDXDPPLIHLDSIPVXDPDPAAAPPGXGVPAWVSNGDAADAAFSGARHSSWKRKSSRRIDRFXFPALEEDVIYDDVPCESPDAHQPGAERNLLYEDAHRAGAPRQAEDLGWSSSEFESYSEDSGEEAKPEVEVEPAKHRVSFQPKLSPDLXRLKERYARXKRDILALRVGGRDMQELKHKYDCKMXQLMKAAKSGXKDGLEKXRMAVMRKVSFLHRKDVLGDSEEEDMGLLEVSVSDIKPPAPELGPMPEGLSPQQVVRRHILGSIVQSEGSYVESLKRILQDYRNPLMEMEPKALSARKCQVVFFRVKEILHCHSMFQIALSSRVAEWDSXEKIGDLFVASFSKSMVLDVYSDYVNNFXSAMSIIKKACLXKPAFLEFLKRRQVCSPDRVXLYGLMVKPIQRFPQFILLLQDMLKNXPRGHPDRLSLQLALXELEXLAEKLNEQKRLADQVAEIQQLXKSVSDRSSLNKLLXSGQRQLLLCEXLXEXVYGDRGQLIKSKERRVFLLNDMLVCANINFKPANHRGQLEISSLVPLGPKYVVKWNXALPQVQVVEVGQDGGXYDKDNVLIQHSGAKKASASGQAQNKVYLGPPRLFQELQDLQKDLAVVEQIXLLISXLHGXYQNLNMXVAQDWCLALQRLMRVKEEEIHSANKCRLRLLLPGKPDKSGRPISFMVVFIXPNPLSKISWVNRLHLAKIGLREENQPGWLCPDEDKKSKAPFWCPILACCIPAFSSRALSLQLGALVHSPVNCPLLGFSAVSXSLPQGYLWVGGGQEGAGGQVEIFSLNRPSPRXVKSFPLAAPVLCMEYIPELEEEAESRDESPXVADPSAXVHPXICLGLQDGSILLYSSVDXGXQCLVSCRSPGLQPVLCLRHSPFHLLAGLQDGXLAAYPRXSGGVLWDLESPPVCLXVGPGPVRXLLSLEDAVWASCGPRVXVLEAXXLQPQQSFEAHQDEAVSVXHMVKAGSGVWMAFSSGXSIRLFHXEXLEHLQEINIAXRXXFLLPGQKHLCVXSLLICQGLLWVGXDQGVIVLLPVPRLEGIPKIXGKGMVSLNGHCGPVAFLAVAXSILAPDILRSDQEEAEGPRAEEDKPDGQAHEPMPDSHVGRELXRKKGILLQYRLRSXAHLPGPLLSMREPAPADGAALEHSEEDGSIYEMADDPDIWVRSRPCARDAHRKEICSVAIISGGQGYRNFGSALGSSGRQAPCGEXDSXLLIWQVPLML

SEQ ID NO: 2963 - protein, 1240 aa, Homo sapiens
  MOD_RES (46)..(46): Selenocysteine
  MOD_RES (61)..(61): Selenocysteine
  MOD_RES (74)..(74): Selenocysteine
  MOD_RES (85)..(85): Selenocysteine
  MOD_RES (121)..(121): Selenocysteine
  MOD_RES (205)..(205): Selenocysteine
  MOD_RES (215)..(215): Selenocysteine
  MOD_RES (222)..(222): Selenocysteine
  MOD_RES (351)..(351): Selenocysteine
  MOD_RES (379)..(379): Selenocysteine
  MOD_RES (391)..(391): Selenocysteine
  MOD_RES (411)..(411): Selenocysteine
  MOD_RES (437)..(437): Selenocysteine
  MOD_RES (452)..(452): Selenocysteine
  MOD_RES (456)..(456): Selenocysteine
  MOD_RES (478)..(478): Selenocysteine
  MOD_RES (492)..(492): Selenocysteine
  MOD_RES (503)..(503): Selenocysteine
  MOD_RES (505)..(505): Selenocysteine
  MOD_RES (507)..(507): Selenocysteine
  MOD_RES (564)..(564): Selenocysteine
  MOD_RES (580)..(580): Selenocysteine
  MOD_RES (631)..(631): Selenocysteine
  MOD_RES (636)..(636): Selenocysteine
  MOD_RES (640)..(640): Selenocysteine
  MOD_RES (647)..(647): Selenocysteine
  MOD_RES (698)..(698): Selenocysteine
  MOD_RES (780)..(780): Selenocysteine
  MOD_RES (812)..(812): Selenocysteine
  MOD_RES (843)..(843): Selenocysteine
  MOD_RES (850)..(850): Selenocysteine
  MOD_RES (854)..(854): Selenocysteine
  MOD_RES (872)..(872): Selenocysteine
  MOD_RES (874)..(874): Selenocysteine
  MOD_RES (906)..(906): Selenocysteine
  MOD_RES (913)..(913): Selenocysteine
  MOD_RES (929)..(929): Selenocysteine
  MOD_RES (937)..(937): Selenocysteine
  MOD_RES (954)..(954): Selenocysteine
  MOD_RES (959)..(960): Selenocysteine
  MOD_RES (978)..(978): Selenocysteine
  MOD_RES (995)..(995): Selenocysteine
  MOD_RES (1002)..(1002): Selenocysteine
  MOD_RES (1004)..(1004): Selenocysteine
  MOD_RES (1015)..(1015): Selenocysteine
  MOD_RES (1017)..(1018): Selenocysteine
  MOD_RES (1030)..(1030): Selenocysteine
  MOD_RES (1043)..(1043): Selenocysteine
  MOD_RES (1063)..(1063): Selenocysteine
  MOD_RES (1084)..(1084): Selenocysteine
  MOD_RES (1127)..(1127): Selenocysteine
  MOD_RES (1141)..(1141): Selenocysteine
  MOD_RES (1227)..(1227): Selenocysteine
  MOD_RES (1230)..(1230): Selenocysteine
MASSNPPPQPAIGDQLVPGVPGPSSEAEDDPGEAFEFDDSDDEEDXSAALGVPSLAPERDXDPPLIHLDSIPVXDPDPAAAPPGXGVPAWVSNGDAADAAFSGARHSSWKRKSSRRIDRFXFPALEEDVIYDDVPCESPDAHQPGAERNLLYEDAHRAGAPRQAEDLGWSSSEFESYSEDSGEEAKPEVEVEPAKHRVSFQPKMXQLMKAAKSGXKDGLEKXRMAVMRKVSFLHRKDVLGDSEEEDMGLLEVSVSDIKPPAPELGPMPEGLSPQQVVRRHILGSIVQSEGSYVESLKRILQDYRNPLMEMEPKALSARKCQVVFFRVKEILHCHSMFQIALSSRVAEWDSXEKIGDLFVASFSKSMVLDVYSDYVNNFXSAMSIIKKACLXKPAFLEFLKRRQVCSPDRVXLYGLMVKPIQRFPQFILLLQDMLKNXPRGHPDRLSLQLALXELEXLAEKLNEQKRLADQVAEIQQLXKSVSDRSSLNKLLXSGQRQLLLCEXLXEXVYGDRGQLIKSKERRVFLLNDMLVCANINFKPANHRGQLEISSLVPLGPKYVVKWNXALPQVQVVEVGQDGGXYDKDNVLIQHSGAKKASASGQAQNKVYLGPPRLFQELQDLQKDLAVVEQIXLLISXLHGXYQNLNMXVAQDWCLALQRLMRVKEEEIHSANKCRLRLLLPGKPDKSGRPISFMVVFIXPNPLSKISWVNRLHLAKIGLREENQPGWLCPDEDKKSKAPFWCPILACCIPAFSSRALSLQLGALVHSPVNCPLLGFSAVSXSLPQGYLWVGGGQEGAGGQVEIFSLNRPSPRXVKSFPLAAPVLCMEYIPELEEEAESRDESPXVADPSAXVHPXICLGLQDGSILLYSSVDXGXQCLVSCRSPGLQPVLCLRHSPFHLLAGLQDGXLAAYPRXSGGVLWDLESPPVCLXVGPGPVRXLLSLEDAVWASCGPRVXVLEAXXLQPQQSFEAHQDEAVSVXHMVKAGSGVWMAFSSGXSIRLFHXEXLEHLQEINIAXRXXFLLPGQKHLCVXSLLICQGLLWVGXDQGVIVLLPVPRLEGIPKIXGKGMVSLNGHCGPVAFLAVAXSILAPDILRSDQEEAEGPRAEEDKPDGQAHEPMPDSHVGRELXRKKGILLQYRLRSXAHLPGPLLSMREPAPADGAALEHSEEDGSIYEMADDPDIWVRSRPCARDAHRKEICSVAIISGGQGYRNFGSALGSSGRQAPCGEXDSXLLIWQVPLML

SEQ ID NO: 2964 - protein, 1052 aa, Homo sapiens
  MOD_RES (168)..(168): Selenocysteine
  MOD_RES (196)..(196): Selenocysteine
  MOD_RES (208)..(208): Selenocysteine
  MOD_RES (228)..(228): Selenocysteine
  MOD_RES (254)..(254): Selenocysteine
  MOD_RES (269)..(269): Selenocysteine
  MOD_RES (273)..(273): Selenocysteine
  MOD_RES (295)..(295): Selenocysteine
  MOD_RES (309)..(309): Selenocysteine
  MOD_RES (320)..(320): Selenocysteine
  MOD_RES (322)..(322): Selenocysteine
  MOD_RES (324)..(324): Selenocysteine
  MOD_RES (376)..(376): Selenocysteine
  MOD_RES (392)..(392): Selenocysteine
  MOD_RES (443)..(443): Selenocysteine
  MOD_RES (448)..(448): Selenocysteine
  MOD_RES (452)..(452): Selenocysteine
  MOD_RES (459)..(459): Selenocysteine
  MOD_RES (510)..(510): Selenocysteine
  MOD_RES (592)..(592): Selenocysteine
  MOD_RES (624)..(624): Selenocysteine
  MOD_RES (655)..(655): Selenocysteine
  MOD_RES (662)..(662): Selenocysteine
  MOD_RES (666)..(666): Selenocysteine
  MOD_RES (684)..(684): Selenocysteine
  MOD_RES (686)..(686): Selenocysteine
  MOD_RES (718)..(718): Selenocysteine
  MOD_RES (725)..(725): Selenocysteine
  MOD_RES (741)..(741): Selenocysteine
  MOD_RES (749)..(749): Selenocysteine
  MOD_RES (766)..(766): Selenocysteine
  MOD_RES (771)..(772): Selenocysteine
  MOD_RES (790)..(790): Selenocysteine
  MOD_RES (807)..(807): Selenocysteine
  MOD_RES (814)..(814): Selenocysteine
  MOD_RES (816)..(816): Selenocysteine
  MOD_RES (827)..(827): Selenocysteine
  MOD_RES (829)..(830): Selenocysteine
  MOD_RES (842)..(842): Selenocysteine
  MOD_RES (855)..(855): Selenocysteine
  MOD_RES (875)..(875): Selenocysteine
  MOD_RES (896)..(896): Selenocysteine
  MOD_RES (939)..(939): Selenocysteine
  MOD_RES (953)..(953): Selenocysteine
  MOD_RES (1039)..(1039): Selenocysteine
  MOD_RES (1042)..(1042): Selenocysteine
MLPSSSWGKRKLRGRLGWVRSDARGVMWARQEGLHHPHPHAVIRCPSSSSSSVSCSGDSEEEDMGLLEVSVSDIKPPAPELGPMPEGLSPQQVVRRHILGSIVQSEGSYVESLKRILQDYRNPLMEMEPKALSARKCQVVFFRVKEILHCHSMFQIALSSRVAEWDSXEKIGDLFVASFSKSMVLDVYSDYVNNFXSAMSIIKKACLXKPAFLEFLKRRQVCSPDRVXLYGLMVKPIQRFPQFILLLQDMLKNXPRGHPDRLSLQLALXELEXLAEKLNEQKRLADQVAEIQQLXKSVSDRSSLNKLLXSGQRQLLLCEXLXEXVYGDRGQLIKSKERRVFLLNDMLVCANINFKGQLEISSLVPLGPKYVVKWNXALPQVQVVEVGQDGGXYDKDNVLIQHSGAKKASASGQAQNKVYLGPPRLFQELQDLQKDLAVVEQIXLLISXLHGXYQNLNMXVAQDWCLALQRLMRVKEEEIHSANKCRLRLLLPGKPDKSGRPISFMVVFIXPNPLSKISWVNRLHLAKIGLREENQPGWLCPDEDKKSKAPFWCPILACCIPAFSSRALSLQLGALVHSPVNCPLLGFSAVSXSLPQGYLWVGGGQEGAGGQVEIFSLNRPSPRXVKSFPLAAPVLCMEYIPELEEEAESRDESPXVADPSAXVHPXICLGLQDGSILLYSSVDXGXQCLVSCRSPGLQPVLCLRHSPFHLLAGLQDGXLAAYPRXSGGVLWDLESPPVCLXVGPGPVRXLLSLEDAVWASCGPRVXVLEAXXLQPQQSFEAHQDEAVSVXHMVKAGSGVWMAFSSGXSIRLFHXEXLEHLQEINIAXRXXFLLPGQKHLCVXSLLICQGLLWVGXDQGVIVLLPVPRLEGIPKIXGKGMVSLNGHCGPVAFLAVAXSILAPDILRSDQEEAEGPRAEEDKPDGQAHEPMPDSHVGRELXRKKGILLQYRLRSXAHLPGPLLSMREPAPADGAALEHSEEDGSIYEMADDPDIWVRSRPCARDAHRKEICSVAIISGGQGYRNFGSALGSSGRQAPCGEXDSXLLIWQVPLML

SEQ ID NO: 2965 - protein, 1522 aa, Homo sapiens
  MOD_RES (40)..(41): Selenocysteine
  MOD_RES (60)..(60): Selenocysteine
  MOD_RES (95)..(95): Selenocysteine
  MOD_RES (98)..(98): Selenocysteine
  MOD_RES (118)..(118): Selenocysteine
  MOD_RES (145)..(145): Selenocysteine
  MOD_RES (164)..(164): Selenocysteine
  MOD_RES (179)..(179): Selenocysteine
  MOD_RES (203)..(203): Selenocysteine
  MOD_RES (227)..(227): Selenocysteine
  MOD_RES (254)..(254): Selenocysteine
  MOD_RES (278)..(278): Selenocysteine
  MOD_RES (421)..(421): Selenocysteine
  MOD_RES (424)..(424): Selenocysteine
  MOD_RES (478)..(478): Selenocysteine
  MOD_RES (495)..(495): Selenocysteine
  MOD_RES (515)..(515): Selenocysteine
  MOD_RES (550)..(550): Selenocysteine
  MOD_RES (585)..(585): Selenocysteine
  MOD_RES (590)..(590): Selenocysteine
  MOD_RES (646)..(646): Selenocysteine
  MOD_RES (656)..(656): Selenocysteine
  MOD_RES (661)..(661): Selenocysteine
  MOD_RES (668)..(668): Selenocysteine
  MOD_RES (672)..(672): Selenocysteine
  MOD_RES (689)..(689): Selenocysteine
  MOD_RES (691)..(691): Selenocysteine
  MOD_RES (719)..(719): Selenocysteine
  MOD_RES (729)..(729): Selenocysteine
  MOD_RES (745)..(745): Selenocysteine
  MOD_RES (752)..(752): Selenocysteine
  MOD_RES (845)..(845): Selenocysteine
  MOD_RES (883)..(883): Selenocysteine
  MOD_RES (896)..(896): Selenocysteine
  MOD_RES (900)..(900): Selenocysteine
  MOD_RES (927)..(927): Selenocysteine
  MOD_RES (943)..(943): Selenocysteine
  MOD_RES (962)..(963): Selenocysteine
  MOD_RES (973)..(973): Selenocysteine
  MOD_RES (981)..(981): Selenocysteine
  MOD_RES (1011)..(1011): Selenocysteine
  MOD_RES (1021)..(1021): Selenocysteine
  MOD_RES (1038)..(1038): Selenocysteine
  MOD_RES (1048)..(1048): Selenocysteine
  MOD_RES (1063)..(1063): Selenocysteine
  MOD_RES (1069)..(1069): Selenocysteine
  MOD_RES (1082)..(1082): Selenocysteine
  MOD_RES (1108)..(1108): Selenocysteine
  MOD_RES (1133)..(1133): Selenocysteine
  MOD_RES (1169)..(1169): Selenocysteine
  MOD_RES (1180)..(1180): Selenocysteine
  MOD_RES (1221)..(1221): Selenocysteine
  MOD_RES (1224)..(1224): Selenocysteine
  MOD_RES (1235)..(1235): Selenocysteine
  MOD_RES (1237)..(1237): Selenocysteine
  MOD_RES (1244)..(1244): Selenocysteine
  MOD_RES (1265)..(1265): Selenocysteine
  MOD_RES (1292)..(1292): Selenocysteine
  MOD_RES (1314)..(1314): Selenocysteine
  MOD_RES (1354)..(1354): Selenocysteine
  MOD_RES (1357)..(1357): Selenocysteine
  MOD_RES (1374)..(1374): Selenocysteine
  MOD_RES (1394)..(1394): Selenocysteine
  MOD_RES (1428)..(1428): Selenocysteine
  MOD_RES (1433)..(1433): Selenocysteine
  MOD_RES (1461)..(1462): Selenocysteine
  MOD_RES (1469)..(1469): Selenocysteine
  MOD_RES (1475)..(1475): Selenocysteine
  MOD_RES (1513)..(1513): Selenocysteine
MSVRLPQSIDRLSSLSSLGDSAPERKSPSHHRQPSDASEXXGLVQRCVIIQKDQHGFGFXVSGDRIVLVQSVRPGGAAMKAGVKEGDRIIKVNGXMVXNSSHLEVVKLIKSGAYVALXLLGSSPSSMGISGLQQDPSPAGAPRIXSVIPSPPPPPPLPPPQRIXGPKPLQDPEVQKHAXQILRNMLRQEEKELQDILPLYGDXSQRPSEGRLSLDSQEGDSGLDSGXERFPSLSESLMNRNSVLSDPGLDSPRXSPVIMARVAQHHRRQGSDAAVPSXGDQGVDQSPKPLIIGPEEDYDPGYFNNESDIIFQDLEKLKSRPAHLGVFLRYIFSQADPSPLLFYLCAEVYQQASPKDSRSLGKDIWNIFLEKNAPLRVKIPEMLQAEIDSRLRNSEDARGVLCEAQEAAMPEIQEQIHDYRXKRXLGLGSLYGENDLLDLDGDPLRERQVAEKQLAALGDILSKYEEDRSAPMDFALNXYMSHAGIRLREARPSNXAEKAQSAPDKDKWLPFFPKXKKSSNSKKEKDALEDKKRNPILKYIGKPKSSSQSXFHIPLSPVEVKPGNVRNIIQHFENNQQYDAPEPGXQRLSXGSFPEDLLESDSSRSEIRLGRSESLKGREEMKRSRKAENVPRSRSDVDMDAAAEAXRLHQSASSSXSSLSXRSLENPXPPFXPKMGRRSIESPSLGFCXDXLLPHLLEDDLGQLSDLEPEPDAQNWQHXVGKDVVAGLXQREIDRQEVINELFVXEASHLRXLRVLDLIFYQRMKKENLMPREELARLFPNLPELIEIHNSWCEAMKKLREEGPIIKEISDLMLARFDGPAREELQQVAAQFCSYQSIALELIKXKQRKESRFQLFMQEAESHPQCRRLQLRDLIISEMQRLXKYPLLLESIIKHXEGGXSEHEKLCRARDQCREILKYVNEAVKQXENRHRLEGYQKRLDAXALERASNPLAAEFKSLDLXXRKMIHEGPLXWRISKDKXLDLHVLLLEDLLVLLQKQDEKLLLKCHSKXAVGSSDSKQXFSPVLKLNAVLIRSVAXDKRAFFIICXSKLGPPQIYELVALXSSDKNXWMELLEEAVRNAXRHPGAAPMPVHPPPPGPREPAQQGPXPSRVELDDSDVFHGEPEPEELPGGXGSQQRVQGKHQVLLEDPEQEGSAEEEELGVLPCPSXSLDGENRGIRXRNPIHLAFPGPLFMEGLADSALEDVENLRHLILWSLLPGHXMEXQAAQEPEDDLXPXPSVISVXSHPWDPGSPGQAPPGGEGDNXQLAGLEGERPEQEDMGLCSLEHLPPRXRNSGIWESPELDRNLAEDASSXEAAGGYKVVRKAEVAGSKVVPALPESGQSEPGPPEVEGGXKAXGNCFYVSMPSGPPDSSXDHSEAPMSPPQPDSLPAGQXEPQPQLQGGNDDPRRPSRSPPSLALRDVGMIFHXIEQLXLKLNRLKDMELAHRELLKSLGGESSGGXXPVGSFHXEAARWXDGSLSPPAKEPLASDSRNSHELGPCPEDGSDAPLEDSXADAAASPGP

SEQ ID NO: 2966 - protein, 1562 aa, Homo sapiens
  MOD_RES (40)..(41): Selenocysteine
  MOD_RES (60)..(60): Selenocysteine
  MOD_RES (95)..(95): Selenocysteine
  MOD_RES (98)..(98): Selenocysteine
  MOD_RES (118)..(118): Selenocysteine
  MOD_RES (145)..(145): Selenocysteine
  MOD_RES (164)..(164): Selenocysteine
  MOD_RES (179)..(179): Selenocysteine
  MOD_RES (220)..(220): Selenocysteine
  MOD_RES (230)..(230): Selenocysteine
  MOD_RES (243)..(243): Selenocysteine
  MOD_RES (267)..(267): Selenocysteine
  MOD_RES (294)..(294): Selenocysteine
  MOD_RES (318)..(318): Selenocysteine
  MOD_RES (461)..(461): Selenocysteine
  MOD_RES (464)..(464): Selenocysteine
  MOD_RES (518)..(518): Selenocysteine
  MOD_RES (535)..(535): Selenocysteine
  MOD_RES (555)..(555): Selenocysteine
  MOD_RES (590)..(590): Selenocysteine
  MOD_RES (625)..(625): Selenocysteine
  MOD_RES (630)..(630): Selenocysteine
  MOD_RES (686)..(686): Selenocysteine
  MOD_RES (696)..(696): Selenocysteine
  MOD_RES (701)..(701): Selenocysteine
  MOD_RES (708)..(708): Selenocysteine
  MOD_RES (712)..(712): Selenocysteine
  MOD_RES (729)..(729): Selenocysteine
  MOD_RES (731)..(731): Selenocysteine
  MOD_RES (759)..(759): Selenocysteine
  MOD_RES (769)..(769): Selenocysteine
  MOD_RES (785)..(785): Selenocysteine
  MOD_RES (792)..(792): Selenocysteine
  MOD_RES (885)..(885): Selenocysteine
  MOD_RES (923)..(923): Selenocysteine
  MOD_RES (936)..(936): Selenocysteine
  MOD_RES (940)..(940): Selenocysteine
  MOD_RES (967)..(967): Selenocysteine
  MOD_RES (983)..(983): Selenocysteine
  MOD_RES (1002)..(1003): Selenocysteine
  MOD_RES (1013)..(1013): Selenocysteine
  MOD_RES (1021)..(1021): Selenocysteine
  MOD_RES (1051)..(1051): Selenocysteine
  MOD_RES (1061)..(1061): Selenocysteine
  MOD_RES (1078)..(1078): Selenocysteine
  MOD_RES (1088)..(1088): Selenocysteine
  MOD_RES (1103)..(1103): Selenocysteine
  MOD_RES (1109)..(1109): Selenocysteine
  MOD_RES (1122)..(1122): Selenocysteine
  MOD_RES (1148)..(1148): Selenocysteine
  MOD_RES (1173)..(1173): Selenocysteine
  MOD_RES (1209)..(1209): Selenocysteine
  MOD_RES (1220)..(1220): Selenocysteine
  MOD_RES (1261)..(1261): Selenocysteine
  MOD_RES (1264)..(1264): Selenocysteine
  MOD_RES (1275)..(1275): Selenocysteine
  MOD_RES (1277)..(1277): Selenocysteine
  MOD_RES (1284)..(1284): Selenocysteine
  MOD_RES (1305)..(1305): Selenocysteine
  MOD_RES (1332)..(1332): Selenocysteine
  MOD_RES (1354)..(1354): Selenocysteine
  MOD_RES (1394)..(1394): Selenocysteine
  MOD_RES (1397)..(1397): Selenocysteine
  MOD_RES (1414)..(1414): Selenocysteine
  MOD_RES (1434)..(1434): Selenocysteine
  MOD_RES (1468)..(1468): Selenocysteine
  MOD_RES (1473)..(1473): Selenocysteine
  MOD_RES (1501)..(1502): Selenocysteine
  MOD_RES (1509)..(1509): Selenocysteine
  MOD_RES (1515)..(1515): Selenocysteine
  MOD_RES (1553)..(1553): Selenocysteine
MSVRLPQSIDRLSSLSSLGDSAPERKSPSHHRQPSDASEXXGLVQRCVIIQKDQHGFGFXVSGDRIVLVQSVRPGGAAMKAGVKEGDRIIKVNGXMVXNSSHLEVVKLIKSGAYVALXLLGSSPSSMGISGLQQDPSPAGAPRIXSVIPSPPPPPPLPPPQRIXGPKPLQDPEVQKHAXQILRNMLRQEEKELQRICEVYSRNPASLLEEQIEGARRRVXQLQLKIQQEXGGSVDILPLYGDXSQRPSEGRLSLDSQEGDSGLDSGXERFPSLSESLMNRNSVLSDPGLDSPRXSPVIMARVAQHHRRQGSDAAVPSXGDQGVDQSPKPLIIGPEEDYDPGYFNNESDIIFQDLEKLKSRPAHLGVFLRYIFSQADPSPLLFYLCAEVYQQASPKDSRSLGKDIWNIFLEKNAPLRVKIPEMLQAEIDSRLRNSEDARGVLCEAQEAAMPEIQEQIHDYRXKRXLGLGSLYGENDLLDLDGDPLRERQVAEKQLAALGDILSKYEEDRSAPMDFALNXYMSHAGIRLREARPSNXAEKAQSAPDKDKWLPFFPKXKKSSNSKKEKDALEDKKRNPILKYIGKPKSSSQSXFHIPLSPVEVKPGNVRNIIQHFENNQQYDAPEPGXQRLSXGSFPEDLLESDSSRSEIRLGRSESLKGREEMKRSRKAENVPRSRSDVDMDAAAEAXRLHQSASSSXSSLSXRSLENPXPPFXPKMGRRSIESPSLGFCXDXLLPHLLEDDLGQLSDLEPEPDAQNWQHXVGKDVVAGLXQREIDRQEVINELFVXEASHLRXLRVLDLIFYQRMKKENLMPREELARLFPNLPELIEIHNSWCEAMKKLREEGPIIKEISDLMLARFDGPAREELQQVAAQFCSYQSIALELIKXKQRKESRFQLFMQEAESHPQCRRLQLRDLIISEMQRLXKYPLLLESIIKHXEGGXSEHEKLCRARDQCREILKYVNEAVKQXENRHRLEGYQKRLDAXALERASNPLAAEFKSLDLXXRKMIHEGPLXWRISKDKXLDLHVLLLEDLLVLLQKQDEKLLLKCHSKXAVGSSDSKQXFSPVLKLNAVLIRSVAXDKRAFFIICXSKLGPPQIYELVALXSSDKNXWMELLEEAVRNAXRHPGAAPMPVHPPPPGPREPAQQGPXPSRVELDDSDVFHGEPEPEELPGGXGSQQRVQGKHQVLLEDPEQEGSAEEEELGVLPCPSXSLDGENRGIRXRNPIHLAFPGPLFMEGLADSALEDVENLRHLILWSLLPGHXMEXQAAQEPEDDLXPXPSVISVXSHPWDPGSPGQAPPGGEGDNXQLAGLEGERPEQEDMGLCSLEHLPPRXRNSGIWESPELDRNLAEDASSXEAAGGYKVVRKAEVAGSKVVPALPESGQSEPGPPEVEGGXKAXGNCFYVSMPSGPPDSSXDHSEAPMSPPQPDSLPAGQXEPQPQLQGGNDDPRRPSRSPPSLALRDVGMIFHXIEQLXLKLNRLKDMELAHRELLKSLGGESSGGXXPVGSFHXEAARWXDGSLSPPAKEPLASDSRNSHELGPCPEDGSDAPLEDSXADAAASPGP

SEQ ID NO: 2967 - protein, 1441 aa, Homo sapiens
  MOD_RES (7)..(7): Selenocysteine
  MOD_RES (17)..(17): Selenocysteine
  MOD_RES (20)..(20): Selenocysteine
  MOD_RES (40)..(40): Selenocysteine
  MOD_RES (71)..(71): Selenocysteine
  MOD_RES (86)..(86): Selenocysteine
  MOD_RES (127)..(127): Selenocysteine
  MOD_RES (154)..(154): Selenocysteine
  MOD_RES (164)..(164): Selenocysteine
  MOD_RES (172)..(172): Selenocysteine
  MOD_RES (174)..(174): Selenocysteine
  MOD_RES (180)..(180): Selenocysteine
  MOD_RES (189)..(189): Selenocysteine
  MOD_RES (226)..(226): Selenocysteine
  MOD_RES (230)..(230): Selenocysteine
  MOD_RES (232)..(232): Selenocysteine
  MOD_RES (241)..(241): Selenocysteine
  MOD_RES (257)..(257): Selenocysteine
  MOD_RES (297)..(297): Selenocysteine
  MOD_RES (310)..(310): Selenocysteine
  MOD_RES (315)..(315): Selenocysteine
  MOD_RES (364)..(364): Selenocysteine
  MOD_RES (389)..(389): Selenocysteine
  MOD_RES (396)..(396): Selenocysteine
  MOD_RES (408)..(408): Selenocysteine
  MOD_RES (414)..(414): Selenocysteine
  MOD_RES (429)..(429): Selenocysteine
  MOD_RES (440)..(440): Selenocysteine
  MOD_RES (529)..(529): Selenocysteine
  MOD_RES (553)..(553): Selenocysteine
  MOD_RES (582)..(582): Selenocysteine
  MOD_RES (590)..(590): Selenocysteine
  MOD_RES (596)..(596): Selenocysteine
  MOD_RES (600)..(600): Selenocysteine
  MOD_RES (603)..(603): Selenocysteine
  MOD_RES (606)..(606): Selenocysteine
  MOD_RES (629)..(629): Selenocysteine
  MOD_RES (633)..(633): Selenocysteine
  MOD_RES (661)..(661): Selenocysteine
  MOD_RES (695)..(695): Selenocysteine
  MOD_RES (702)..(702): Selenocysteine
  MOD_RES (755)..(755): Selenocysteine
  MOD_RES (767)..(767): Selenocysteine
  MOD_RES (783)..(783): Selenocysteine
  MOD_RES (807)..(807): Selenocysteine
  MOD_RES (829)..(829): Selenocysteine
  MOD_RES (835)..(835): Selenocysteine
  MOD_RES (848)..(848): Selenocysteine
  MOD_RES (852)..(852): Selenocysteine
  MOD_RES (893)..(893): Selenocysteine
  MOD_RES (913)..(913): Selenocysteine
  MOD_RES (932)..(932): Selenocysteine
  MOD_RES (937)..(937): Selenocysteine
  MOD_RES (966)..(966): Selenocysteine
  MOD_RES (972)..(972): Selenocysteine
  MOD_RES (981)..(981): Selenocysteine
  MOD_RES (989)..(989): Selenocysteine
  MOD_RES (1013)..(1013): Selenocysteine
  MOD_RES (1018)..(1018): Selenocysteine
  MOD_RES (1036)..(1036): Selenocysteine
  MOD_RES (1045)..(1045): Selenocysteine
  MOD_RES (1069)..(1069): Selenocysteine
  MOD_RES (1083)..(1083): Selenocysteine
  MOD_RES (1096)..(1096): Selenocysteine
  MOD_RES (1118)..(1118): Selenocysteine
  MOD_RES (1121)..(1121): Selenocysteine
  MOD_RES (1167)..(1167): Selenocysteine
  MOD_RES (1183)..(1183): Selenocysteine
  MOD_RES (1190)..(1190): Selenocysteine
  MOD_RES (1214)..(1214): Selenocysteine
  MOD_RES (1216)..(1216): Selenocysteine
  MOD_RES (1221)..(1221): Selenocysteine
  MOD_RES (1227)..(1227): Selenocysteine
  MOD_RES (1229)..(1229): Selenocysteine
  MOD_RES (1259)..(1259): Selenocysteine
  MOD_RES (1264)..(1264): Selenocysteine
  MOD_RES (1326)..(1326): Selenocysteine
  MOD_RES (1335)..(1335): Selenocysteine
  MOD_RES (1340)..(1340): Selenocysteine
  MOD_RES (1348)..(1348): Selenocysteine
  MOD_RES (1358)..(1358): Selenocysteine
  MOD_RES (1368)..(1368): Selenocysteine
  MOD_RES (1422)..(1422): Selenocysteine
  MOD_RES (1434)..(1434): Selenocysteine
MRAGVQXGDRIIKVNGXLVXHSNHLEVVKLIKSGSYVALXVQGRPPGSPQIPLADSEVEPSVIGHMSPIMXSPHSPGASGNMERIXSPVLMGEENNVVHNQKVEILRKMLQKEQERLQLLQEDYNRXPAQRLLKEIQEAKKHIPQLQEQLSKAXGSAQDGAVVXPSRPLGDXLXVSEAEXDPGDVLGRXDCSSGDASRPSSDNADSPKSGPKERIYLEENPEKSEXIQDXDXQSLVGSPSXRIAPHIIGAEDDDFGXEHEQINGQCSCFQSIELLKSRPAHLAVFLHHVVSQFDPAXLLCYLYSDLYKHXNSKEXRRIFLEFHQFFLDRSAHLKVSVPDEMSADLEKRRPELIPEDLHRHYIQXMQERVHPEVQRHLEDFRQKRSMGLXLAESELXKLDAERDKDRLXLEKERXCAEQIVAKIEEVLMXAQAVEEDKSSXMQYVILMYMKHLGVKVKEPRNLEHKRGRIGFLPKIKQSMKKDKEGEEKGKRRGFPSILGPPRRPSRHDNSAIGRAMELQKARHPKHLSXPSSVSPEPQDSAKLRQSGLANEGXDAGYLPANSMSSVASGASFSQEGGKENDXGSKQVGEXSAPGDXLDGXPRXLNXVFDFPPPPLDQVQEEECEVERVXEHGXPKPFRKFDSVAFGESQSEDEQFENDLEXDPPNWQQLVSREVLLGLKPCEIKRQEVINELFYXERAHVRXLKVLDQVFYQRVSREGILSPSELRKIFSNLEDILQLHIGLNEQMKAVRKRNEXSVIDQIGEDLLXWFSGPGEEKLKHAAAXFCSNQPFALEMIKSRQKKDSRFQXFVQDAESNPLCRRLQLKDIIPXQMQRLXKYPLLLDNIAKYXEWPXEREKVKKAADHCRQILNYVNQAVKEAENKQRLEDYQRRLDXSSLKLSEYPNVEELRNLDLXKRKMIHEGPLVWKVNRDKXIDLYXLLLEDILVLLQKQDDRLVLRCHSKILASXADSKHXFSPVIKLSXVLVRQVAXDNKALFVISMSDNGAQIYELVAQXVSEKXVWQDLICRMAASVKEQSXKPIPLPQSXPGEGDNDEEDPSKLKEEQHGISVXGLQSPDRDLGLESXLISSKPQSHSLSXSGKSEVRDLFVAERQFAKEQHXDGXLKEVGEDYQIAIPDSHLPVSEERWALDALRNLGLLKQLLVQQLGLXEKSVQEDWQHFPRYRXASQGPQXDSVIQNSENIKAYHSGEGHMPFRXGXGDIAXCYSPRXSXESFAPRDSVGLAPQDSQASNILVMDHMIMXPEMPXMEPEGGLDDSGEHFFDAREAHSDENPSEGDGAVNKEEKDVNLRISGNYLILDGYDPVQESSXDEEVASSLXLQPMXGIPAVESXHQQQHSPQNXHSDGAISPFXPEFLVQQRWGAMEYSCFEIQSPSSCADSQSQIMEYIHKIEADLEHLKKVEESYXILCQRLAGSALXDKHSDKS

SEQ ID NO: 2968 - protein, 1544 aa, Homo sapiens
  MOD_RES (4)..(4): Selenocysteine
  MOD_RES (7)..(7): Selenocysteine
  MOD_RES (9)..(9): Selenocysteine
  MOD_RES (30)..(30): Selenocysteine
  MOD_RES (47)..(47): Selenocysteine
  MOD_RES (54)..(54): Selenocysteine
  MOD_RES (85)..(85): Selenocysteine
  MOD_RES (110)..(110): Selenocysteine
  MOD_RES (120)..(120): Selenocysteine
  MOD_RES (123)..(123): Selenocysteine
  MOD_RES (143)..(143): Selenocysteine
  MOD_RES (174)..(174): Selenocysteine
  MOD_RES (189)..(189): Selenocysteine
  MOD_RES (230)..(230): Selenocysteine
  MOD_RES (257)..(257): Selenocysteine
  MOD_RES (267)..(267): Selenocysteine
  MOD_RES (275)..(275): Selenocysteine
  MOD_RES (277)..(277): Selenocysteine
  MOD_RES (283)..(283): Selenocysteine
  MOD_RES (292)..(292): Selenocysteine
  MOD_RES (329)..(329): Selenocysteine
  MOD_RES (333)..(333): Selenocysteine
  MOD_RES (335)..(335): Selenocysteine
  MOD_RES (344)..(344): Selenocysteine
  MOD_RES (360)..(360): Selenocysteine
  MOD_RES (400)..(400): Selenocysteine
  MOD_RES (413)..(413): Selenocysteine
  MOD_RES (418)..(418): Selenocysteine
  MOD_RES (467)..(467): Selenocysteine
  MOD_RES (492)..(492): Selenocysteine
  MOD_RES (499)..(499): Selenocysteine
  MOD_RES (511)..(511): Selenocysteine
  MOD_RES (517)..(517): Selenocysteine
  MOD_RES (532)..(532): Selenocysteine
  MOD_RES (543)..(543): Selenocysteine
  MOD_RES (632)..(632): Selenocysteine
  MOD_RES (656)..(656): Selenocysteine
  MOD_RES (685)..(685): Selenocysteine
  MOD_RES (693)..(693): Selenocysteine
  MOD_RES (699)..(699): Selenocysteine
  MOD_RES (703)..(703): Selenocysteine
  MOD_RES (706)..(706): Selenocysteine
  MOD_RES (709)..(709): Selenocysteine
  MOD_RES (732)..(732): Selenocysteine
  MOD_RES (736)..(736): Selenocysteine
  MOD_RES (764)..(764): Selenocysteine
  MOD_RES (798)..(798): Selenocysteine
  MOD_RES (805)..(805): Selenocysteine
  MOD_RES (858)..(858): Selenocysteine
  MOD_RES (870)..(870): Selenocysteine
  MOD_RES (886)..(886): Selenocysteine
  MOD_RES (910)..(910): Selenocysteine
  MOD_RES (932)..(932): Selenocysteine
  MOD_RES (938)..(938): Selenocysteine
  MOD_RES (951)..(951): Selenocysteine
  MOD_RES (955)..(955): Selenocysteine
  MOD_RES (996)..(996): Selenocysteine
  MOD_RES (1016)..(1016): Selenocysteine
  MOD_RES (1035)..(1035): Selenocysteine
  MOD_RES (1040)..(1040): Selenocysteine
  MOD_RES (1069)..(1069): Selenocysteine
  MOD_RES (1075)..(1075): Selenocysteine
  MOD_RES (1084)..(1084): Selenocysteine
  MOD_RES (1092)..(1092): Selenocysteine
  MOD_RES (1116)..(1116): Selenocysteine
  MOD_RES (1121)..(1121): Selenocysteine
  MOD_RES (1139)..(1139): Selenocysteine
  MOD_RES (1148)..(1148): Selenocysteine
  MOD_RES (1172)..(1172): Selenocysteine
  MOD_RES (1186)..(1186): Selenocysteine
  MOD_RES (1199)..(1199): Selenocysteine
  MOD_RES (1221)..(1221): Selenocysteine
  MOD_RES (1224)..(1224): Selenocysteine
  MOD_RES (1270)..(1270): Selenocysteine
  MOD_RES (1286)..(1286): Selenocysteine
  MOD_RES (1293)..(1293): Selenocysteine
  MOD_RES (1317)..(1317): Selenocysteine
  MOD_RES (1319)..(1319): Selenocysteine
  MOD_RES (1324)..(1324): Selenocysteine
  MOD_RES (1330)..(1330): Selenocysteine
  MOD_RES (1332)..(1332): Selenocysteine
  MOD_RES (1362)..(1362): Selenocysteine
  MOD_RES (1367)..(1367): Selenocysteine
  MOD_RES (1429)..(1429): Selenocysteine
  MOD_RES (1438)..(1438): Selenocysteine
  MOD_RES (1443)..(1443): Selenocysteine
  MOD_RES (1451)..(1451): Selenocysteine
  MOD_RES (1461)..(1461): Selenocysteine
  MOD_RES (1471)..(1471): Selenocysteine
  MOD_RES (1525)..(1525): Selenocysteine
  MOD_RES (1537)..(1537): Selenocysteine
MSGXQSXIXDRFPLKKPIRHGSILNRESPXDKKQKVERIASHDFDPXDSSSKKXKSSSEESRSEIYGLVQRCVIIQKDDNGFGLXVSGDNPVFVQSVKEDGAAMRAGVQXGDRIIKVNGXLVXHSNHLEVVKLIKSGSYVALXVQGRPPGSPQIPLADSEVEPSVIGHMSPIMXSPHSPGASGNMERIXSPVLMGEENNVVHNQKVEILRKMLQKEQERLQLLQEDYNRXPAQRLLKEIQEAKKHIPQLQEQLSKAXGSAQDGAVVXPSRPLGDXLXVSEAEXDPGDVLGRXDCSSGDASRPSSDNADSPKSGPKERIYLEENPEKSEXIQDXDXQSLVGSPSXRIAPHIIGAEDDDFGXEHEQINGQCSCFQSIELLKSRPAHLAVFLHHVVSQFDPAXLLCYLYSDLYKHXNSKEXRRIFLEFHQFFLDRSAHLKVSVPDEMSADLEKRRPELIPEDLHRHYIQXMQERVHPEVQRHLEDFRQKRSMGLXLAESELXKLDAERDKDRLXLEKERXCAEQIVAKIEEVLMXAQAVEEDKSSXMQYVILMYMKHLGVKVKEPRNLEHKRGRIGFLPKIKQSMKKDKEGEEKGKRRGFPSILGPPRRPSRHDNSAIGRAMELQKARHPKHLSXPSSVSPEPQDSAKLRQSGLANEGXDAGYLPANSMSSVASGASFSQEGGKENDXGSKQVGEXSAPGDXLDGXPRXLNXVFDFPPPPLDQVQEEECEVERVXEHGXPKPFRKFDSVAFGESQSEDEQFENDLEXDPPNWQQLVSREVLLGLKPCEIKRQEVINELFYXERAHVRXLKVLDQVFYQRVSREGILSPSELRKIFSNLEDILQLHIGLNEQMKAVRKRNEXSVIDQIGEDLLXWFSGPGEEKLKHAAAXFCSNQPFALEMIKSRQKKDSRFQXFVQDAESNPLCRRLQLKDIIPXQMQRLXKYPLLLDNIAKYXEWPXEREKVKKAADHCRQILNYVNQAVKEAENKQRLEDYQRRLDXSSLKLSEYPNVEELRNLDLXKRKMIHEGPLVWKVNRDKXIDLYXLLLEDILVLLQKQDDRLVLRCHSKILASXADSKHXFSPVIKLSXVLVRQVAXDNKALFVISMSDNGAQIYELVAQXVSEKXVWQDLICRMAASVKEQSXKPIPLPQSXPGEGDNDEEDPSKLKEEQHGISVXGLQSPDRDLGLESXLISSKPQSHSLSXSGKSEVRDLFVAERQFAKEQHXDGXLKEVGEDYQIAIPDSHLPVSEERWALDALRNLGLLKQLLVQQLGLXEKSVQEDWQHFPRYRXASQGPQXDSVIQNSENIKAYHSGEGHMPFRXGXGDIAXCYSPRXSXESFAPRDSVGLAPQDSQASNILVMDHMIMXPEMPXMEPEGGLDDSGEHFFDAREAHSDENPSEGDGAVNKEEKDVNLRISGNYLILDGYDPVQESSXDEEVASSLXLQPMXGIPAVESXHQQQHSPQNXHSDGAISPFXPEFLVQQRWGAMEYSCFEIQSPSSCADSQSQIMEYIHKIEADLEHLKKVEESYXILCQRLAGSALXDKHSDKS

SEQ ID NO: 2969 - protein, 1525 aa, Homo sapiens
  MOD_RES (4)..(4): Selenocysteine
  MOD_RES (7)..(7): Selenocysteine
  MOD_RES (9)..(9): Selenocysteine
  MOD_RES (30)..(30): Selenocysteine
  MOD_RES (47)..(47): Selenocysteine
  MOD_RES (66)..(66): Selenocysteine
  MOD_RES (91)..(91): Selenocysteine
  MOD_RES (101)..(101): Selenocysteine
  MOD_RES (104)..(104): Selenocysteine
  MOD_RES (124)..(124): Selenocysteine
  MOD_RES (155)..(155): Selenocysteine
  MOD_RES (170)..(170): Selenocysteine
  MOD_RES (211)..(211): Selenocysteine
  MOD_RES (238)..(238): Selenocysteine
  MOD_RES (248)..(248): Selenocysteine
  MOD_RES (256)..(256): Selenocysteine
  MOD_RES (258)..(258): Selenocysteine
  MOD_RES (264)..(264): Selenocysteine
  MOD_RES (273)..(273): Selenocysteine
  MOD_RES (310)..(310): Selenocysteine
  MOD_RES (314)..(314): Selenocysteine
  MOD_RES (316)..(316): Selenocysteine
  MOD_RES (325)..(325): Selenocysteine
  MOD_RES (341)..(341): Selenocysteine
  MOD_RES (381)..(381): Selenocysteine
  MOD_RES (394)..(394): Selenocysteine
  MOD_RES (399)..(399): Selenocysteine
  MOD_RES (448)..(448): Selenocysteine
  MOD_RES (473)..(473): Selenocysteine
  MOD_RES (480)..(480): Selenocysteine
  MOD_RES (492)..(492): Selenocysteine
  MOD_RES (498)..(498): Selenocysteine
  MOD_RES (513)..(513): Selenocysteine
  MOD_RES (524)..(524): Selenocysteine
  MOD_RES (613)..(613): Selenocysteine
  MOD_RES (637)..(637): Selenocysteine
  MOD_RES (666)..(666): Selenocysteine
  MOD_RES (674)..(674): Selenocysteine
  MOD_RES (680)..(680): Selenocysteine
  MOD_RES (684)..(684): Selenocysteine
  MOD_RES (687)..(687): Selenocysteine
  MOD_RES (690)..(690): Selenocysteine
  MOD_RES (713)..(713): Selenocysteine
  MOD_RES (717)..(717): Selenocysteine
  MOD_RES (745)..(745): Selenocysteine
  MOD_RES (779)..(779): Selenocysteine
  MOD_RES (786)..(786): Selenocysteine
  MOD_RES (839)..(839): Selenocysteine
  MOD_RES (851)..(851): Selenocysteine
  MOD_RES (867)..(867): Selenocysteine
  MOD_RES (891)..(891): Selenocysteine
  MOD_RES (913)..(913): Selenocysteine
  MOD_RES (919)..(919): Selenocysteine
  MOD_RES (932)..(932): Selenocysteine
  MOD_RES (936)..(936): Selenocysteine
  MOD_RES (977)..(977): Selenocysteine
  MOD_RES (997)..(997): Selenocysteine
  MOD_RES (1016)..(1016): Selenocysteine
  MOD_RES (1021)..(1021): Selenocysteine
  MOD_RES (1050)..(1050): Selenocysteine
  MOD_RES (1056)..(1056): Selenocysteine
  MOD_RES (1065)..(1065): Selenocysteine
  MOD_RES (1073)..(1073): Selenocysteine
  MOD_RES (1097)..(1097): Selenocysteine
  MOD_RES (1102)..(1102): Selenocysteine
  MOD_RES (1120)..(1120): Selenocysteine
  MOD_RES (1129)..(1129): Selenocysteine
  MOD_RES (1153)..(1153): Selenocysteine
  MOD_RES (1167)..(1167): Selenocysteine
  MOD_RES (1180)..(1180): Selenocysteine
  MOD_RES (1202)..(1202): Selenocysteine
  MOD_RES (1205)..(1205): Selenocysteine
  MOD_RES (1251)..(1251): Selenocysteine
  MOD_RES (1267)..(1267): Selenocysteine
  MOD_RES (1274)..(1274): Selenocysteine
  MOD_RES (1298)..(1298): Selenocysteine
  MOD_RES (1300)..(1300): Selenocysteine
  MOD_RES (1305)..(1305): Selenocysteine
  MOD_RES (1311)..(1311): Selenocysteine
  MOD_RES (1313)..(1313): Selenocysteine
  MOD_RES (1343)..(1343): Selenocysteine
  MOD_RES (1348)..(1348): Selenocysteine
  MOD_RES (1410)..(1410): Selenocysteine
  MOD_RES (1419)..(1419): Selenocysteine
  MOD_RES (1424)..(1424): Selenocysteine
  MOD_RES (1432)..(1432): Selenocysteine
  MOD_RES (1442)..(1442): Selenocysteine
  MOD_RES (1452)..(1452): Selenocysteine
  MOD_RES (1506)..(1506): Selenocysteine
  MOD_RES (1518)..(1518): Selenocysteine
MSGXQSXIXDRFPLKKPIRHGSILNRESPXDKKQKVERIASHDFDPXGLVQRCVIIQKDDNGFGLXVSGDNPVFVQSVKEDGAAMRAGVQXGDRIIKVNGXLVXHSNHLEVVKLIKSGSYVALXVQGRPPGSPQIPLADSEVEPSVIGHMSPIMXSPHSPGASGNMERIXSPVLMGEENNVVHNQKVEILRKMLQKEQERLQLLQEDYNRXPAQRLLKEIQEAKKHIPQLQEQLSKAXGSAQDGAVVXPSRPLGDXLXVSEAEXDPGDVLGRXDCSSGDASRPSSDNADSPKSGPKERIYLEENPEKSEXIQDXDXQSLVGSPSXRIAPHIIGAEDDDFGXEHEQINGQCSCFQSIELLKSRPAHLAVFLHHVVSQFDPAXLLCYLYSDLYKHXNSKEXRRIFLEFHQFFLDRSAHLKVSVPDEMSADLEKRRPELIPEDLHRHYIQXMQERVHPEVQRHLEDFRQKRSMGLXLAESELXKLDAERDKDRLXLEKERXCAEQIVAKIEEVLMXAQAVEEDKSSXMQYVILMYMKHLGVKVKEPRNLEHKRGRIGFLPKIKQSMKKDKEGEEKGKRRGFPSILGPPRRPSRHDNSAIGRAMELQKARHPKHLSXPSSVSPEPQDSAKLRQSGLANEGXDAGYLPANSMSSVASGASFSQEGGKENDXGSKQVGEXSAPGDXLDGXPRXLNXVFDFPPPPLDQVQEEECEVERVXEHGXPKPFRKFDSVAFGESQSEDEQFENDLEXDPPNWQQLVSREVLLGLKPCEIKRQEVINELFYXERAHVRXLKVLDQVFYQRVSREGILSPSELRKIFSNLEDILQLHIGLNEQMKAVRKRNEXSVIDQIGEDLLXWFSGPGEEKLKHAAAXFCSNQPFALEMIKSRQKKDSRFQXFVQDAESNPLCRRLQLKDIIPXQMQRLXKYPLLLDNIAKYXEWPXEREKVKKAADHCRQILNYVNQAVKEAENKQRLEDYQRRLDXSSLKLSEYPNVEELRNLDLXKRKMIHEGPLVWKVNRDKXIDLYXLLLEDILVLLQKQDDRLVLRCHSKILASXADSKHXFSPVIKLSXVLVRQVAXDNKALFVISMSDNGAQIYELVAQXVSEKXVWQDLICRMAASVKEQSXKPIPLPQSXPGEGDNDEEDPSKLKEEQHGISVXGLQSPDRDLGLESXLISSKPQSHSLSXSGKSEVRDLFVAERQFAKEQHXDGXLKEVGEDYQIAIPDSHLPVSEERWALDALRNLGLLKQLLVQQLGLXEKSVQEDWQHFPRYRXASQGPQXDSVIQNSENIKAYHSGEGHMPFRXGXGDIAXCYSPRXSXESFAPRDSVGLAPQDSQASNILVMDHMIMXPEMPXMEPEGGLDDSGEHFFDAREAHSDENPSEGDGAVNKEEKDVNLRISGNYLILDGYDPVQESSXDEEVASSLXLQPMXGIPAVESXHQQQHSPQNXHSDGAISPFXPEFLVQQRWGAMEYSCFEIQSPSSCADSQSQIMEYIHKIEADLEHLKKVEESYXILCQRLAGSALXDKHSDKS

SEQ ID NO: 2970 - protein, 91 aa, Homo sapiens
  MOD_RES (6)..(6): Selenocysteine
  MOD_RES (24)..(24): Selenocysteine
  MOD_RES (29)..(29): Selenocysteine
  MOD_RES (44)..(44): Selenocysteine
  MOD_RES (51)..(51): Selenocysteine
  MOD_RES (71)..(71): Selenocysteine
  MOD_RES (82)..(82): Selenocysteine
  MOD_RES (86)..(86): Selenocysteine
ASPLRXSRSRPHPPSIGHPAVVLXSYRSXAERKLLPLLKPPKPXRVRQDAXIFGDPPQPDLDLLSEDGIQXGDSPDEAPQNXPPAXVEGRY

SEQ ID NO: 2971 - protein, 116 aa, Homo sapiens
  MOD_RES (10)..(10): Selenocysteine
  MOD_RES (13)..(13): Selenocysteine
  MOD_RES (55)..(55): Selenocysteine
  MOD_RES (59)..(59): Selenocysteine
  MOD_RES (89)..(89): Selenocysteine
  MOD_RES (97)..(97): Selenocysteine
  MOD_RES (99)..(99): Selenocysteine
MSAQSLPAAXPPXQKPPRIIRPRPPSRSRAAQSPGPPHNGSSPQELPRNSNDAPXPMCXPIFWEPPAASLKPPALLPPSASRASLDSQXSPDSPSSXPXPSPVSRRSASPEPAPRS

SEQ ID NO: 2972 - protein, 208 aa, Homo sapiens
  MOD_RES (10)..(10): Selenocysteine
  MOD_RES (13)..(13): Selenocysteine
  MOD_RES (55)..(55): Selenocysteine
  MOD_RES (59)..(59): Selenocysteine
  MOD_RES (89)..(89): Selenocysteine
  MOD_RES (97)..(97): Selenocysteine
  MOD_RES (99)..(99): Selenocysteine
  MOD_RES (129)..(129): Selenocysteine
  MOD_RES (149)..(149): Selenocysteine
  MOD_RES (190)..(190): Selenocysteine
MSAQSLPAAXPPXQKPPRIIRPRPPSRSRAAQSPGPPHNGSSPQELPRNSNDAPXPMCXPIFWEPPAASLKPPALLPPSASRASLDSQXSPDSPSSXPXPSPVSRRSASPEPAPRSPVPPPKPSGSPCXPLLPMAGVLAQNGSASAPGXVRRLAGRFEGGAEGRAQDADAPEPGLQARADVNGEREAPLXGSGSQENGAPDAGLACPP

SEQ ID NO: 2973 - protein, 841 aa, Homo sapiens
  MOD_RES (10)..(10): Selenocysteine
  MOD_RES (13)..(13): Selenocysteine
  MOD_RES (55)..(55): Selenocysteine
  MOD_RES (59)..(59): Selenocysteine
  MOD_RES (89)..(89): Selenocysteine
  MOD_RES (97)..(97): Selenocysteine
  MOD_RES (99)..(99): Selenocysteine
  MOD_RES (129)..(129): Selenocysteine
  MOD_RES (149)..(149): Selenocysteine
  MOD_RES (190)..(190): Selenocysteine
  MOD_RES (216)..(217): Selenocysteine
  MOD_RES (246)..(246): Selenocysteine
  MOD_RES (264)..(264): Selenocysteine
  MOD_RES (269)..(269): Selenocysteine
  MOD_RES (284)..(284): Selenocysteine
  MOD_RES (291)..(291): Selenocysteine
  MOD_RES (311)..(311): Selenocysteine
  MOD_RES (322)..(322): Selenocysteine
  MOD_RES (326)..(326): Selenocysteine
  MOD_RES (355)..(355): Selenocysteine
  MOD_RES (384)..(384): Selenocysteine
  MOD_RES (394)..(394): Selenocysteine
  MOD_RES (410)..(410): Selenocysteine
  MOD_RES (427)..(427): Selenocysteine
  MOD_RES (440)..(440): Selenocysteine
  MOD_RES (442)..(442): Selenocysteine
  MOD_RES (452)..(452): Selenocysteine
  MOD_RES (454)..(454): Selenocysteine
  MOD_RES (460)..(460): Selenocysteine
  MOD_RES (478)..(478): Selenocysteine
  MOD_RES (520)..(520): Selenocysteine
  MOD_RES (527)..(527): Selenocysteine
  MOD_RES (561)..(561): Selenocysteine
  MOD_RES (574)..(574): Selenocysteine
  MOD_RES (608)..(608): Selenocysteine
  MOD_RES (615)..(615): Selenocysteine
  MOD_RES (642)..(642): Selenocysteine
  MOD_RES (660)..(660): Selenocysteine
  MOD_RES (674)..(674): Selenocysteine
  MOD_RES (706)..(706): Selenocysteine
  MOD_RES (720)..(720): Selenocysteine
  MOD_RES (741)..(741): Selenocysteine
  MOD_RES (751)..(751): Selenocysteine
  MOD_RES (772)..(772): Selenocysteine
  MOD_RES (789)..(789): Selenocysteine
  MOD_RES (810)..(810): Selenocysteine
  MOD_RES (835)..(835): Selenocysteine
MSAQSLPAAXPPXQKPPRIIRPRPPSRSRAAQSPGPPHNGSSPQELPRNSNDAPXPMCXPIFWEPPAASLKPPALLPPSASRASLDSQXSPDSPSSXPXPSPVSRRSASPEPAPRSPVPPPKPSGSPCXPLLPMAGVLAQNGSASAPGXVRRLAGRFEGGAEGRAQDADAPEPGLQARADVNGEREAPLXGSGSQENGAPDAGLACPPCCPCVCHXXRPGLELRWVPVGGYEEVPRVPRRASPLRXSRSRPHPPSIGHPAVVLXSYRSXAERKLLPLLKPPKPXRVRQDAXIFGDPPQPDLDLLSEDGIQXGDSPDEAPQNXPPAXVEGREEEGLEVLKEQNWELPLQDEPLYQXYRAAVLSEELWGVGEDGSPSPANAGDAPXFPRPPGPRNXLWQELPAVQASGLLDXLSPQERRMQESLFEVVXSEASYLRSLRLLXDXFVLSQALRDXLXPRDHHXLFSNVQRVQGVSERFLAXLLSRVRSSPHISDLCDVVHAHAVGPFSVYVDYVRNQQYQEEXYSRLMDXNVRFSAELRRLQSLPKCERLPLPSFLLLPFQRIXRLRMLLQNILRQXEEGSSRQENAQKALGAVSKIIERCSAEVGRMKQXEELIRLXQRLRFHKVKALPLVSWSRRLEFQGELXELGCRRGGVLFASRPRFXPLCLLLFSDLLLIXQPKSGQRLQVLDYAHRSLVQAQQVPDPSGPPXFRLSLLSNHQGRPXHRLLQASSLSDMQRWLGAFPXPGPLPCSPDXIYEDCDCSQELCSESSAPAKXEGRSLESRAAPKHLHKXPEGWLKGLPGAFPAQLVCEVXGEHERRRHLRQNQRLLEAVGSSSGXPNAPPP

SEQ ID NO: 2974 - protein, 709 aa, Homo sapiens
  MOD_RES (75)..(75): Selenocysteine
  MOD_RES (85)..(85): Selenocysteine
  MOD_RES (101)..(101): Selenocysteine
  MOD_RES (189)..(189): Selenocysteine
  MOD_RES (198)..(198): Selenocysteine
  MOD_RES (226)..(226): Selenocysteine
  MOD_RES (244)..(244): Selenocysteine
  MOD_RES (250)..(250): Selenocysteine
  MOD_RES (262)..(262): Selenocysteine
  MOD_RES (280)..(280): Selenocysteine
  MOD_RES (294)..(294): Selenocysteine
  MOD_RES (319)..(319): Selenocysteine
  MOD_RES (321)..(321): Selenocysteine
  MOD_RES (387)..(387): Selenocysteine
  MOD_RES (428)..(428): Selenocysteine
  MOD_RES (436)..(436): Selenocysteine
  MOD_RES (441)..(441): Selenocysteine
  MOD_RES (480)..(480): Selenocysteine
  MOD_RES (483)..(483): Selenocysteine
  MOD_RES (514)..(514): Selenocysteine
  MOD_RES (525)..(525): Selenocysteine
  MOD_RES (538)..(538): Selenocysteine
  MOD_RES (586)..(586): Selenocysteine
  MOD_RES (616)..(616): Selenocysteine
  MOD_RES (637)..(637): Selenocysteine
  MOD_RES (649)..(649): Selenocysteine
  MOD_RES (676)..(676): Selenocysteine
  MOD_RES (688)..(688): Selenocysteine
  MOD_RES (707)..(707): Selenocysteine
MAQRHSDSSLEEKLLGHRFHSELRLDAGGNPASGLPMVRGSPRVRDDAAFQPQVPAPPQPRPPGHEEPWPIVLSXESPAALKLGXQQLIPKSLAVASKAKXPARHQSFGAAVLSREAARRDPKLLPAPSFSLDDMDVDKDPGGMLRRNLRNQSYRAAMKGLGKPGGQGDAIQLSPKLQALAEEPSQPHXRSPAKNKKXLGRKRGHKGSFKDDPQLYQEIQERGLNXSQESDDDILDESSSPEGXQKVDAXIVVKSYRPAQVXWSQLPEVVELGILDQLSXEERKRQEAMFEILXSEFSYQHSLSILVEEFLQSKELRAXVXQMEHHHLFSNILDVLGASQRFFEDLEQRHKAQVLVEDISDILEEHAEKHFHPYIAYCSNEVYQQRXLQKLISSNAAFREALREIERRPACGGLPMLSFLILPMQRVXRLPLLMDXLCLKXQGHSERYKAASRALKAISKLVRQCNEGAHRMERMEQMYXLHXQLDFSKVKSLPLISASRWLLKRGELFLVEEXGLFRKIASRPXCYLFLFNDVLVVXKKKSEESYMVQDYAQMNHIQVEKIEPSELPLPGGGNRSSSVPHPFQVXLLRNSEGRQEQLLLSSDSASDRARWIVALXHSERQWQGLSSKGDLPQVEIXKAFFAKQADEVXLQQADVVLVLQQEDGWLYGERLRDGEXGWFPEDFARFIXSRVAVEGNVRRMERLRVEXDV

SEQ ID NO: 2975 - protein, 180 aa, Homo sapiens
  MOD_RES (34)..(34): Selenocysteine
  MOD_RES (91)..(91): Selenocysteine
  MOD_RES (132)..(132): Selenocysteine
  MOD_RES (140)..(140): Selenocysteine
  MOD_RES (145)..(145): Selenocysteine
MFASDLLRALDCCPGAGSSGLLPQLGPRQLLAFXVNCLGNHRYLGFFEDLEQRHKAQVLVEDISDILEEHAEKHFHPYIAYCSNEVYQQRXLQKLISSNAAFREALREIERRPACGGLPMLSFLILPMQRVXRLPLLMDXLCLKXQGHSERYKAASRALKAISKLVRQCNEGAHRMERME

SEQ ID NO: 2976 - protein, 146 aa, Homo sapiens
  MOD_RES (6)..(6): Selenocysteine
  MOD_RES (31)..(31): Selenocysteine
  MOD_RES (33)..(33): Selenocysteine
  MOD_RES (99)..(99): Selenocysteine
  MOD_RES (140)..(140): Selenocysteine
MFEILXSEFSYQHSLSILVEEFLQSKELRAXVXQMEHHHLFSNILDVLGASQRFFEDLEQRHKAQVLVEDISDILEEHAEKHFHPYIAYCSNEVYQQRXLQKLISSNAAFREALREIERRPACGGLPMLSFLILPMQRVXRLPLLM

SEQ ID NO: 2977 - protein, 421 aa, Homo sapiens
  MOD_RES (6)..(6): Selenocysteine
  MOD_RES (31)..(31): Selenocysteine
  MOD_RES (33)..(33): Selenocysteine
  MOD_RES (99)..(99): Selenocysteine
  MOD_RES (140)..(140): Selenocysteine
  MOD_RES (148)..(148): Selenocysteine
  MOD_RES (153)..(153): Selenocysteine
  MOD_RES (192)..(192): Selenocysteine
  MOD_RES (195)..(195): Selenocysteine
  MOD_RES (226)..(226): Selenocysteine
  MOD_RES (237)..(237): Selenocysteine
  MOD_RES (250)..(250): Selenocysteine
  MOD_RES (298)..(298): Selenocysteine
  MOD_RES (328)..(328): Selenocysteine
  MOD_RES (349)..(349): Selenocysteine
  MOD_RES (361)..(361): Selenocysteine
  MOD_RES (388)..(388): Selenocysteine
  MOD_RES (400)..(400): Selenocysteine
  MOD_RES (419)..(419): Selenocysteine
MFEILXSEFSYQHSLSILVEEFLQSKELRAXVXQMEHHHLFSNILDVLGASQRFFEDLEQRHKAQVLVEDISDILEEHAEKHFHPYIAYCSNEVYQQRXLQKLISSNAAFREALREIERRPACGGLPMLSFLILPMQRVXRLPLLMDXLCLKXQGHSERYKAASRALKAISKLVRQCNEGAHRMERMEQMYXLHXQLDFSKVKSLPLISASRWLLKRGELFLVEEXGLFRKIASRPXCYLFLFNDVLVVXKKKSEESYMVQDYAQMNHIQVEKIEPSELPLPGGGNRSSSVPHPFQVXLLRNSEGRQEQLLLSSDSASDRARWIVALXHSERQWQGLSSKGDLPQVEIXKAFFAKQADEVXLQQADVVLVLQQEDGWLYGERLRDGEXGWFPEDFARFIXSRVAVEGNVRRMERLRVEXDV

SEQ ID NO: 2978 - protein, 2063 aa, Homo sapiens
  MOD_RES (33)..(33): Selenocysteine
  MOD_RES (35)..(35): Selenocysteine
  MOD_RES (47)..(48): Selenocysteine
  MOD_RES (101)..(101): Selenocysteine
  MOD_RES (127)..(127): Selenocysteine
  MOD_RES (150)..(150): Selenocysteine
  MOD_RES (170)..(170): Selenocysteine
  MOD_RES (175)..(175): Selenocysteine
  MOD_RES (189)..(189): Selenocysteine
  MOD_RES (193)..(193): Selenocysteine
  MOD_RES (331)..(331): Selenocysteine
  MOD_RES (396)..(396): Selenocysteine
  MOD_RES (398)..(398): Selenocysteine
  MOD_RES (434)..(434): Selenocysteine
  MOD_RES (442)..(442): Selenocysteine
  MOD_RES (471)..(471): Selenocysteine
  MOD_RES (473)..(473): Selenocysteine
  MOD_RES (530)..(530): Selenocysteine
  MOD_RES (533)..(533): Selenocysteine
  MOD_RES (538)..(538): Selenocysteine
  MOD_RES (540)..(540): Selenocysteine
  MOD_RES (548)..(548): Selenocysteine
  MOD_RES (561)..(561): Selenocysteine
  MOD_RES (574)..(574): Selenocysteine
  MOD_RES (627)..(627): Selenocysteine
  MOD_RES (644)..(644): Selenocysteine
  MOD_RES (664)..(665): Selenocysteine
  MOD_RES (678)..(678): Selenocysteine
  MOD_RES (685)..(685): Selenocysteine
  MOD_RES (699)..(699): Selenocysteine
  MOD_RES (702)..(702): Selenocysteine
  MOD_RES (746)..(746): Selenocysteine
  MOD_RES (751)..(751): Selenocysteine
  MOD_RES (767)..(767): Selenocysteine
  MOD_RES (772)..(772): Selenocysteine
  MOD_RES (780)..(780): Selenocysteine
  MOD_RES (809)..(809): Selenocysteine
  MOD_RES (879)..(879): Selenocysteine
  MOD_RES (898)..(898): Selenocysteine
  MOD_RES (944)..(944): Selenocysteine
  MOD_RES (965)..(965): Selenocysteine
  MOD_RES (976)..(976): Selenocysteine
  MOD_RES (992)..(992): Selenocysteine
  MOD_RES (997)..(997): Selenocysteine
  MOD_RES (1007)..(1007): Selenocysteine
  MOD_RES (1053)..(1053): Selenocysteine
  MOD_RES (1073)..(1073): Selenocysteine
  MOD_RES (1077)..(1077): Selenocysteine
  MOD_RES (1087)..(1087): Selenocysteine
  MOD_RES (1137)..(1137): Selenocysteine
  MOD_RES (1227)..(1227): Selenocysteine
  MOD_RES (1312)..(1312): Selenocysteine
  MOD_RES (1318)..(1319): Selenocysteine
  MOD_RES (1336)..(1336): Selenocysteine
  MOD_RES (1343)..(1343): Selenocysteine
  MOD_RES (1368)..(1368): Selenocysteine
  MOD_RES (1385)..(1386): Selenocysteine
  MOD_RES (1434)..(1434): Selenocysteine
  MOD_RES (1441)..(1441): Selenocysteine
  MOD_RES (1446)..(1446): Selenocysteine
  MOD_RES (1493)..(1493): Selenocysteine
  MOD_RES (1505)..(1505): Selenocysteine
  MOD_RES (1577)..(1577): Selenocysteine
  MOD_RES (1598)..(1598): Selenocysteine
  MOD_RES (1620)..(1620): Selenocysteine
  MOD_RES (1650)..(1650): Selenocysteine
  MOD_RES (1659)..(1659): Selenocysteine
  MOD_RES (1669)..(1669): Selenocysteine
  MOD_RES (1676)..(1676): Selenocysteine
  MOD_RES (1679)..(1680): Selenocysteine
  MOD_RES (1705)..(1705): Selenocysteine
  MOD_RES (1722)..(1722): Selenocysteine
  MOD_RES (1745)..(1745): Selenocysteine
  MOD_RES (1775)..(1775): Selenocysteine
  MOD_RES (1813)..(1813): Selenocysteine
  MOD_RES (1816)..(1816): Selenocysteine
  MOD_RES (1822)..(1822): Selenocysteine
  MOD_RES (1846)..(1846): Selenocysteine
  MOD_RES (1876)..(1876): Selenocysteine
  MOD_RES (1890)..(1890): Selenocysteine
  MOD_RES (1900)..(1900): Selenocysteine
  MOD_RES (1925)..(1925): Selenocysteine
  MOD_RES (1938)..(1938): Selenocysteine
  MOD_RES (1945)..(1945): Selenocysteine
  MOD_RES (1948)..(1948): Selenocysteine
  MOD_RES (1952)..(1952): Selenocysteine
  MOD_RES (1963)..(1963): Selenocysteine
  MOD_RES (1970)..(1970): Selenocysteine
  MOD_RES (1991)..(1991): Selenocysteine
  MOD_RES (1998)..(1998): Selenocysteine
  MOD_RES (2048)..(2048): Selenocysteine
  MOD_RES (2055)..(2055): Selenocysteine
MADGAPRPQLYRSVSFKLLERWSGGPGLREEDXDXPGLRRRASCRPXXAARGQPSRRVSKLASGPLAAPAQPRPLRSLSPSVRQLSRRFDAPRLDDGSAGXRDGGVLPAAAEEAAEGPARGAWPSVXEMRKLFGGPGSRRPSADSESPGXPSPDGAAWEPPARESRQPPXPPPRXCFPLAGLRSARPLXGPEXEGRLRRPQQQQERAQRPADGLHSWHIFSQPQAGARASCSSSSIAASYPVSRSRAASSSEEEEEGPPQLPGAQSPAYHGGHSSGSDDDRDGEGGHRWGGRPGLRPGSSLLDQDCRPDSDGLNLSSMNSAGVSGSPEPPXSPRAPREEGLREWGSGSPPCVPGPQEGLRPMSDSVGGAFRVAKVSFPSYLASPAGSRGSSRYSSXEXLKDDDLWSSRGSGGWGVYRSPSFGAGEGLLRSQARXRAKGPGGXSRALRDGGFEPEKSRQRKSLSNPDIASEXLXLLSFLRSDLSELRVRKPGGSSGDRGSNPLDGRDSPSAGGPVGQLEPIPIPAPASPGXRPXLKDLXAXLRRAKSFXCSEKPMARRLPRXSALKSSSSELLLXGPGAEEDPLPLIVQDQYVQEARQVFEKIQRMGAQQDDGSDAPPGSPDWAGDVXRGQRSQEELSGPESSLXDEGIGADPEPPVAAFCGLGXXGMWRPLSSSSAQXNHHGPGXEDSLGGWALVSPEXPPXPGALRRRRKVPPSGSGGSELSNGEAGEAYRSLSDPIPQRHRAAXSEEPXGFSVDSNLLGSLSPKXGLPAXSAMDEGLXSGHSDWSVGSEESKGYQEVIQSIVQGPGXLGRVVDDRIAGKAPKKKSLSDPSRRGELAGPGFEGPGGEPIREVEPMLPPSSSEPILVEQRAEPEEPGAXRSRAQSERALPEALPPPAXAHRNFHLDPKLADILSPRLIRRGSKKRPARSSHQELRRDEGSQDQXGSLSRARPSSRHVRHASVPAXFMPIVVPEPPXSVGPPVAVPEPIGFPXRAHPXLQAPSLEDVXKQYMLNLHSGEVPAPVPVDMPCLPLAAPPSAEAKPPEAARPADEPXPASKCCSKPQVDMRKHVAMXLLDXEQSYVESLRXLMQGYMQPLKQPENSVLCDPSLVDEIFDQIPELLEHHEQFLEQVRHCMQXWHAQQKVGALLVQSFSKDVLVNIYSAYIDNFLNAKDAVRVAKEARPAFLKFLEQSMRENKEKQALSDLMIKPVQRIPRYELLVKDLLKHXPEDHPDHPLLLEAQRNIKQVAERINKGVRSAEEAERHARVLQEIEAHIEGMEDLQAPLRRFLRQEMVIEVKAIGGKKDRSLFLFXDLIVCXXLKRKSGSLRRSSMSLYXAASVIDXASKYKMLWKLPLEDADIIKGASQAXNRENIQKAISRLDEDLXXLGQMSKLSESLGFPHQSLDDALRDLSAAMHRDLSEKQALCYALSFPPXKLELCAXRPEGXDSYIFEFPHPDARLGFEQAFDEAKRKLASSKSCLDPEFLKAIPIMKXRSGMQFSCAAPXLNSCPEPSPEVWVCNSDGYVGQVCLLSLRAEPDVEACIAVCSARILCIGAVPGLQPRCHREPPPSLRSPPEXAPEPAGPELDVEAAADEEAAXLAEPGPQPCLHISIAGSGLEMXPGLGEGDPRPELVPFDSDSDDESSPSPSGXLQSQASRSXISSSFGNEEXPSSKEAXAEXXSSEEEQEPGFLPLSGSFGPGGPCGXSPMDGRALRRSSHGSFXRGSLEDLLSVDPEAYQSSVWLGXEDGCVHVYQSSDSIRDRRNSMKLQHAASVXCILYLNNQVFVSLANGELVVYQREAGHFWDPQNFKSVXLGXQGSPIXKMVSVGGRLWCGCQNRVLVLSPDXLQLEHMFYVGQDSSRCVACMVDSSLGVWVXLKGSAHVCLYHPDXFEQLAEVDVXPPVHRMLAGSDAIIRQHKAACLRIXALLVCEELLWVGXSAGVVLXMPXSPGXVSCPRAPLSPXGLGQGHXGHVRFLAAVQLPDGFNLLCPXPPPPPDXGPEKLPSLEHRDSPWHRGPAPARPKMLVISGGDGYEDFRLSSGGGSSSEXVGRDDSXNHLLLWRV

SEQ ID NO: 2979 - protein, 193 aa, Homo sapiens
  MOD_RES (1)..(1): Any amino acid
  MOD_RES (17)..(17): Selenocysteine
  MOD_RES (22)..(22): Selenocysteine
  MOD_RES (32)..(32): Selenocysteine
  MOD_RES (78)..(78): Selenocysteine
  MOD_RES (98)..(98): Selenocysteine
  MOD_RES (102)..(102): Selenocysteine
  MOD_RES (112)..(112): Selenocysteine
  MOD_RES (140)..(140): Selenocysteine
XSVGPPVAVPEPIGFPXRAHPXLQAPSLEDVXKQYMLNLHSGEVPAPVPVDMPCLPLAAPPSAEAKPPEAARPADEPXPASKCCSKPQVDMRKHVAMXLLDXEQSYVESLRXLMQVGLGAHSPENGLSEPRRLSDGCEQXPFMDKGLRPESRVPGIRRLSMKNPQHGHSREGGRLLPGKRECRGARPPQGRRP

SEQ ID NO: 2980 - protein, 87 aa, Homo sapiens
  MOD_RES (2)..(2): Selenocysteine
  MOD_RES (12)..(12): Selenocysteine
  MOD_RES (20)..(20): Selenocysteine
  MOD_RES (26)..(26): Selenocysteine
  MOD_RES (42)..(42): Selenocysteine
  MOD_RES (50)..(50): Selenocysteine
  MOD_RES (54)..(54): Selenocysteine
  MOD_RES (64)..(64): Selenocysteine
MXVSQKGGPQPXPSPAGPGXQLGPIXGEMDEADSAFLKFKQXADDSLSLXSPNXESIFVEDPYXASLRSEIESDGHEFEAESWSLAV

SEQ ID NO: 2981 - protein, 1015 aa, Homo sapiens
  MOD_RES (2)..(2): Selenocysteine
  MOD_RES (12)..(12): Selenocysteine
  MOD_RES (20)..(20): Selenocysteine
  MOD_RES (26)..(26): Selenocysteine
  MOD_RES (42)..(42): Selenocysteine
  MOD_RES (50)..(50): Selenocysteine
  MOD_RES (54)..(54): Selenocysteine
  MOD_RES (64)..(64): Selenocysteine
  MOD_RES (112)..(112): Selenocysteine
  MOD_RES (119)..(119): Selenocysteine
  MOD_RES (155)..(155): Selenocysteine
  MOD_RES (254)..(254): Selenocysteine
  MOD_RES (258)..(258): Selenocysteine
  MOD_RES (271)..(271): Selenocysteine
  MOD_RES (275)..(275): Selenocysteine
  MOD_RES (282)..(282): Selenocysteine
  MOD_RES (328)..(328): Selenocysteine
  MOD_RES (349)..(350): Selenocysteine
  MOD_RES (363)..(363): Selenocysteine
  MOD_RES (422)..(422): Selenocysteine
  MOD_RES (465)..(465): Selenocysteine
  MOD_RES (519)..(519): Selenocysteine
  MOD_RES (558)..(558): Selenocysteine
  MOD_RES (566)..(566): Selenocysteine
  MOD_RES (573)..(573): Selenocysteine
  MOD_RES (577)..(577): Selenocysteine
  MOD_RES (589)..(589): Selenocysteine
  MOD_RES (628)..(628): Selenocysteine
  MOD_RES (636)..(636): Selenocysteine
  MOD_RES (648)..(648): Selenocysteine
  MOD_RES (669)..(669): Selenocysteine
  MOD_RES (686)..(686): Selenocysteine
  MOD_RES (802)..(802): Selenocysteine
  MOD_RES (811)..(811): Selenocysteine
  MOD_RES (859)..(859): Selenocysteine
  MOD_RES (876)..(876): Selenocysteine
  MOD_RES (891)..(891): Selenocysteine
  MOD_RES (897)..(897): Selenocysteine
  MOD_RES (937)..(937): Selenocysteine
  MOD_RES (984)..(984): Selenocysteine
  MOD_RES (999)..(999): Selenocysteine
MXVSQKGGPQPXPSPAGPGXQLGPIXGEMDEADSAFLKFKQXADDSLSLXSPNXESIFVEDPYXASLRSEIESDGHEFEAESWSLAVDAAYAKKQKREVVKRQDVLYELMQXEVHHVRXLKIMLKVYSRALQEELQFSSKAIGRLFPCADDLLEXHSHFLARLKERRQESLEEGSDRNYVIQKIGDLLVQQFSGENGERMKEKYGVFCSGHNEAVSHYKLLLQQNKKFQNLIKKIGNFSIVRRLGVQECILLVXQRIXKYPVLVERIIQNXEAGXEDYEDLXQALNLIKDIISQVDAKVSECEKGQRLREIAGKMDLKSSSKLKNGLXFRKEDMLQRQLHLEGMLCWKXXSGRLKDILAILLXDVLLLLQEKDQKYVFASVDSKPPVISLQKLIVREVANEEKAMFLISASLQGPEMYEIYXSSKEDRNAWMAHIQRAVESCPDEEEGPFSLPEEERKVVEARAXRLRDFQERLSMKDQLIAQSLLEKQQIYLEMAEMGGLEDLPQPRGLFRGGDPSEXLQGELILKSAMSEIEGIQSLICRQLGSANGQAEDGGSSXGPPRRAEXFAGYDCXNSPXKNGSFKKKVSSXDPRPRDWRGPPNSPDLKLSDSDIPGSSEESPQVVEAPGXESDPRLPXVLESELVQRIQXLSQLLLNLQAVIAHQDSYVEXQRAAIQEREKQFRLQSXRGNLLLEQERQRNFEKQREERAALEKLQSQLRHEQQRWERERQWQHQELERAGARLQEREGEARQLRERLEQERAELERQRQAYQHDLERLREAQRAVERERERLELLRRLKKQNXAPGALPPDXLAEAQPPSHPPSFNGEGLEGPRVSMLPSGVGPEYAERPEVARRDSAPXENRLAKSDVPIQLLSAXNQFQRQAAVQQQIPXKLAASXKGGKDKGGKSRGSQRWESSASFDLKQQLLLNKLMGKDESXSRNRRSLSPILPGRHSPAPPPDPGFPAPSPPPADSPSEGFSLKAGGXALLPGPPAPSPLPAXPLSAKEDASKEDVIFF

SEQ ID NO: 2982 - protein, 1173 aa, Homo sapiens
  MOD_RES (3)..(3): Selenocysteine
  MOD_RES (6)..(6): Selenocysteine
  MOD_RES (19)..(19): Selenocysteine
  MOD_RES (97)..(97): Selenocysteine
  MOD_RES (121)..(121): Selenocysteine
  MOD_RES (126)..(126): Selenocysteine
  MOD_RES (134)..(134): Selenocysteine
  MOD_RES (144)..(144): Selenocysteine
  MOD_RES (160)..(160): Selenocysteine
  MOD_RES (170)..(170): Selenocysteine
  MOD_RES (178)..(178): Selenocysteine
  MOD_RES (184)..(184): Selenocysteine
  MOD_RES (200)..(200): Selenocysteine
  MOD_RES (208)..(208): Selenocysteine
  MOD_RES (212)..(212): Selenocysteine
  MOD_RES (222)..(222): Selenocysteine
  MOD_RES (270)..(270): Selenocysteine
  MOD_RES (277)..(277): Selenocysteine
  MOD_RES (313)..(313): Selenocysteine
  MOD_RES (412)..(412): Selenocysteine
  MOD_RES (416)..(416): Selenocysteine
  MOD_RES (429)..(429): Selenocysteine
  MOD_RES (433)..(433): Selenocysteine
  MOD_RES (440)..(440): Selenocysteine
  MOD_RES (486)..(486): Selenocysteine
  MOD_RES (507)..(508): Selenocysteine
  MOD_RES (521)..(521): Selenocysteine
  MOD_RES (580)..(580): Selenocysteine
  MOD_RES (623)..(623): Selenocysteine
  MOD_RES (677)..(677): Selenocysteine
  MOD_RES (716)..(716): Selenocysteine
  MOD_RES (724)..(724): Selenocysteine
  MOD_RES (731)..(731): Selenocysteine
  MOD_RES (735)..(735): Selenocysteine
  MOD_RES (747)..(747): Selenocysteine
  MOD_RES (786)..(786): Selenocysteine
  MOD_RES (794)..(794): Selenocysteine
  MOD_RES (806)..(806): Selenocysteine
  MOD_RES (827)..(827): Selenocysteine
  MOD_RES (844)..(844): Selenocysteine
  MOD_RES (960)..(960): Selenocysteine
  MOD_RES (969)..(969): Selenocysteine
  MOD_RES (1017)..(1017): Selenocysteine
  MOD_RES (1034)..(1034): Selenocysteine
  MOD_RES (1049)..(1049): Selenocysteine
  MOD_RES (1055)..(1055): Selenocysteine
  MOD_RES (1095)..(1095): Selenocysteine
  MOD_RES (1142)..(1142): Selenocysteine
  MOD_RES (1157)..(1157): Selenocysteine
MVXVGXNILPSRPAASANXAREDAALFSRRIPPRHKNGAAQPGAAPGPGAPGANMGNAHSKSGDRHSALPGRPELSFYGSFPRKWSENVFLDNELLXSKILSVLRPQSERGFRAGDLRYPXHFLSXNSVLASVXASLKEHPRGXLLSDGSPALSRNVGMXVSQKGGPQPXPSPAGPGXQLGPIXGEMDEADSAFLKFKQXADDSLSLXSPNXESIFVEDPYXASLRSEIESDGHEFEAESWSLAVDAAYAKKQKREVVKRQDVLYELMQXEVHHVRXLKIMLKVYSRALQEELQFSSKAIGRLFPCADDLLEXHSHFLARLKERRQESLEEGSDRNYVIQKIGDLLVQQFSGENGERMKEKYGVFCSGHNEAVSHYKLLLQQNKKFQNLIKKIGNFSIVRRLGVQECILLVXQRIXKYPVLVERIIQNXEAGXEDYEDLXQALNLIKDIISQVDAKVSECEKGQRLREIAGKMDLKSSSKLKNGLXFRKEDMLQRQLHLEGMLCWKXXSGRLKDILAILLXDVLLLLQEKDQKYVFASVDSKPPVISLQKLIVREVANEEKAMFLISASLQGPEMYEIYXSSKEDRNAWMAHIQRAVESCPDEEEGPFSLPEEERKVVEARAXRLRDFQERLSMKDQLIAQSLLEKQQIYLEMAEMGGLEDLPQPRGLFRGGDPSEXLQGELILKSAMSEIEGIQSLICRQLGSANGQAEDGGSSXGPPRRAEXFAGYDCXNSPXKNGSFKKKVSSXDPRPRDWRGPPNSPDLKLSDSDIPGSSEESPQVVEAPGXESDPRLPXVLESELVQRIQXLSQLLLNLQAVIAHQDSYVEXQRAAIQEREKQFRLQSXRGNLLLEQERQRNFEKQREERAALEKLQSQLRHEQQRWERERQWQHQELERAGARLQEREGEARQLRERLEQERAELERQRQAYQHDLERLREAQRAVERERERLELLRRLKKQNXAPGALPPDXLAEAQPPSHPPSFNGEGLEGPRVSMLPSGVGPEYAERPEVARRDSAPXENRLAKSDVPIQLLSAXNQFQRQAAVQQQIPXKLAASXKGGKDKGGKSRGSQRWESSASFDLKQQLLLNKLMGKDESXSRNRRSLSPILPGRHSPAPPPDPGFPAPSPPPADSPSEGFSLKAGGXALLPGPPAPSPLPAXPLSAKEDASKEDVIFF

SEQ ID NO: 2983 - protein, 812 aa, Homo sapiens
  MOD_RES (1)..(1): Any amino acid
  MOD_RES (57)..(57): Selenocysteine
  MOD_RES (61)..(61): Selenocysteine
  MOD_RES (74)..(74): Selenocysteine
  MOD_RES (78)..(78): Selenocysteine
  MOD_RES (85)..(85): Selenocysteine
  MOD_RES (131)..(131): Selenocysteine
  MOD_RES (152)..(153): Selenocysteine
  MOD_RES (166)..(166): Selenocysteine
  MOD_RES (225)..(225): Selenocysteine
  MOD_RES (268)..(268): Selenocysteine
  MOD_RES (322)..(322): Selenocysteine
  MOD_RES (361)..(361): Selenocysteine
  MOD_RES (369)..(369): Selenocysteine
  MOD_RES (376)..(376): Selenocysteine
  MOD_RES (380)..(380): Selenocysteine
  MOD_RES (392)..(392): Selenocysteine
  MOD_RES (431)..(431): Selenocysteine
  MOD_RES (439)..(439): Selenocysteine
  MOD_RES (451)..(451): Selenocysteine
  MOD_RES (466)..(466): Selenocysteine
  MOD_RES (483)..(483): Selenocysteine
  MOD_RES (599)..(599): Selenocysteine
  MOD_RES (608)..(608): Selenocysteine
  MOD_RES (656)..(656): Selenocysteine
  MOD_RES (673)..(673): Selenocysteine
  MOD_RES (688)..(688): Selenocysteine
  MOD_RES (694)..(694): Selenocysteine
  MOD_RES (734)..(734): Selenocysteine
  MOD_RES (781)..(781): Selenocysteine
  MOD_RES (796)..(796): Selenocysteine
XRMKEKYGVFCSGHNEAVSHYKLLLQQNKKFQNLIKKIGNFSIVRRLGVQECILLVXQRIXKYPVLVERIIQNXEAGXEDYEDLXQALNLIKDIISQVDAKVSECEKGQRLREIAGKMDLKSSSKLKNGLXFRKEDMLQRQLHLEGMLCWKXXSGRLKDILAILLXDVLLLLQEKDQKYVFASVDSKPPVISLQKLIVREVANEEKAMFLISASLQGPEMYEIYXSSKEDRNAWMAHIQRAVESCPDEEEGPFSLPEEERKVVEARAXRLRDFQERLSMKDQLIAQSLLEKQQIYLEMAEMGGLEDLPQPRGLFRGGDPSEXLQGELILKSAMSEIEGIQSLICRQLGSANGQAEDGGSSXGPPRRAEXFAGYDCXNSPXKNGSFKKKVSSXDPRPRDWRGPPNSPDLKLSDSDIPGSSEESPQVVEAPGXESDPRLPXVLESELVQRIQXLSQLLLNLQDSYVEXQRAAIQEREKQFRLQSXRGNLLLEQERQRNFEKQREERAALEKLQSQLRHEQQRWERERQWQHQELERAGARLQEREGEARQLRERLEQERAELERQRQAYQHDLERLREAQRAVERERERLELLRRLKKQNXAPGALPPDXLAEAQPPSHPPSFNGEGLEGPRVSMLPSGVGPEYAERPEVARRDSAPXENRLAKSDVPIQLLSAXNQFQRQAAVQQQIPXKLAASXKGGKDKGGKSRGSQRWESSASFDLKQQLLLNKLMGKDESXSRNRRSLSPILPGRHSPAPPPDPGFPAPSPPPADSPSEGFSLKAGGXALLPGPPAPSPLPAXPLSAKEDASKEDVIFF

SEQ ID NO: 2984 - protein, 167 aa, Homo sapiens
  MOD_RES (69)..(69): Selenocysteine
  MOD_RES (113)..(113): Selenocysteine
  MOD_RES (154)..(154): Selenocysteine
  MOD_RES (162)..(162): Selenocysteine
ERLAQFPAAGRGSPGPPGARLGVGLEKGRGREVWRPGVWGCEARASEVNWSCPFDPVCALPQAKFELIXSEASYIHSLSVAVGHFLGSAELSECLGAQDKQWLFSKLPEVKSXSERFLQDLEQRLEADVLRFSVCDVVLDHCPAFRRVYLPYVXNQAYQERXYQRLL

SEQ ID NO: 2985 - protein, 802 aa, Homo sapiens
  MOD_RES (8)..(8): Selenocysteine
  MOD_RES (14)..(14): Selenocysteine
  MOD_RES (19)..(19): Selenocysteine
  MOD_RES (69)..(69): Selenocysteine
  MOD_RES (87)..(87): Selenocysteine
  MOD_RES (90)..(90): Selenocysteine
  MOD_RES (122)..(122): Selenocysteine
  MOD_RES (173)..(173): Selenocysteine
  MOD_RES (184)..(184): Selenocysteine
  MOD_RES (203)..(203): Selenocysteine
  MOD_RES (226)..(226): Selenocysteine
  MOD_RES (269)..(269): Selenocysteine
  MOD_RES (280)..(280): Selenocysteine
  MOD_RES (351)..(351): Selenocysteine
  MOD_RES (369)..(369): Selenocysteine
  MOD_RES (386)..(386): Selenocysteine
  MOD_RES (430)..(430): Selenocysteine
  MOD_RES (471)..(471): Selenocysteine
  MOD_RES (479)..(479): Selenocysteine
  MOD_RES (509)..(509): Selenocysteine
  MOD_RES (520)..(520): Selenocysteine
  MOD_RES (533)..(533): Selenocysteine
  MOD_RES (544)..(544): Selenocysteine
  MOD_RES (567)..(567): Selenocysteine
  MOD_RES (688)..(688): Selenocysteine
  MOD_RES (725)..(725): Selenocysteine
  MOD_RES (735)..(735): Selenocysteine
  MOD_RES (739)..(739): Selenocysteine
  MOD_RES (746)..(746): Selenocysteine
  MOD_RES (748)..(748): Selenocysteine
  MOD_RES (791)..(791): Selenocysteine
  MOD_RES (794)..(794): Selenocysteine
MDCGPPAXLQPHLXGPPGXAHHPVAVCQQESLSFAELPALKPPSPVCLDLFPVAPEELRAPGSRWSLGXPAPLQGLLWPLSPGGSDXEIXSGGMRPSRAGSWPHCPGAQPPALEGPWSPRHXQPQRRASHGSEKKSAWRKMRVYQREEVPGCPEAHAVFLEPGQVVQEQALSXEEPRVELSGSXRVSLEGPERRRFSASELMXRLHSSLRLGRNSAARALISGSGXGAAREGKASGMEARSVEMSGDRVSRPAPGDSREGDWSEPRLDXQEEPPLGSRSXNERRQSRFLLNSVLYQEYSDVASARELRRQQREEEGPGDEAEGAEEGPGPPRANLSPSSSFRAQRSARGSXFSLWQDIPDVRGSGVLAXLSLRDCKLQEAKFELIXSEASYIHSLSVAVGHFLGSAELSECLGAQDKQWLFSKLPEVKSXSERFLQDLEQRLEADVLRFSVCDVVLDHCPAFRRVYLPYVXNQAYQERXYQRLLLENPRFPGILARLEESPVCQRLPLXSFLILPFQRIXRLKMLVENILKRXAQGSEDEDMAXKAFNALKELVQECNASVQSMKRXEELIHLSKKIHFEGKIFPLISQARWLVRHGELVELAPLPAAPPAKLKLSSKAVYLHLFNDCLLLSRRKELGKFAVFVHAKMAELQVRDLSLKLQGIPGHVFLLQLLHGQHMKHQFLLRARXESEKQRWISALCPSSPQEDKEVISEGEDCPQVQCVRXYKALHPDELXLEKXDILSVRXWXSDGWLEGVRLADGEKGWVPQAYVEEISSLSARLRNLRENKRVXSAXSKLGEAPV

SEQ ID NO: 2986 - protein, 307 aa, Homo sapiens
  MOD_RES (1)..(1): Any amino acid
  MOD_RES (75)..(75): Selenocysteine
  MOD_RES (119)..(119): Selenocysteine
  MOD_RES (160)..(160): Selenocysteine
  MOD_RES (168)..(168): Selenocysteine
  MOD_RES (198)..(198): Selenocysteine
  MOD_RES (209)..(209): Selenocysteine
  MOD_RES (222)..(222): Selenocysteine
  MOD_RES (233)..(233): Selenocysteine
  MOD_RES (256)..(256): Selenocysteine
XRDRGQERLAQFPAAGRGSPGPPGARLGVGLEKGRGREVWRPGVWGCEARASEVNWSCPFDPVCALPQAKFELIXSEASYIHSLSVAVGHFLGSAELSECLGAQDKQWLFSKLPEVKSXSERFLQDLEQRLEADVLRFSVCDVVLDHCPAFRRVYLPYVXNQAYQERXYQRLLLENPRFPGILARLEESPVCQRLPLXSFLILPFQRIXRLKMLVENILKRXAQGSEDEDMAXKAFNALKELVQECNASVQSMKRXEELIHLSKKIHFEGKIFPLISQARWLVRHGELVELAPLPAAPPAKLKLSSK

SEQ ID NO: 2987 - protein, 264 aa, Homo sapiens
  MOD_RES (5)..(5): Selenocysteine
  MOD_RES (49)..(49): Selenocysteine
  MOD_RES (65)..(65): Selenocysteine
  MOD_RES (70)..(70): Selenocysteine
  MOD_RES (77)..(77): Selenocysteine
  MOD_RES (131)..(131): Selenocysteine
  MOD_RES (172)..(172): Selenocysteine
  MOD_RES (200)..(200): Selenocysteine
  MOD_RES (236)..(236): Selenocysteine
  MOD_RES (264)..(264): Selenocysteine
MALPXLPRGLFRSESLESPRGERLLQDAIREVEGLKDLLVGPGVELLLXPREPALPLEPDSGGNXSPGVXANGEARXFNGSIELCRADSDSSQRDRNGNQLRSPQEEALQRLVNLYGLLHGLQAAVAQQDXLMEARFPEGPERREKLCRANSRDGEAGRAGAAPVAPEKQAXELALLQRQHALLQEELRRCRRLGEERAXEAGSLEARLRESEQARALLEREAEEARRQLAALGQXEPLPAEAPWARRPVDPRRRSSPQAMPCX

SEQ ID NO: 2988 - protein, 214 aa, Homo sapiens
  MOD_RES (10)..(10): Selenocysteine
  MOD_RES (16)..(17): Selenocysteine
  MOD_RES (24)..(24): Selenocysteine
  MOD_RES (34)..(34): Selenocysteine
  MOD_RES (43)..(43): Selenocysteine
  MOD_RES (47)..(47): Selenocysteine
  MOD_RES (55)..(55): Selenocysteine
  MOD_RES (60)..(60): Selenocysteine
  MOD_RES (76)..(76): Selenocysteine
  MOD_RES (87)..(88): Selenocysteine
  MOD_RES (125)..(126): Selenocysteine
  MOD_RES (148)..(148): Selenocysteine
  MOD_RES (157)..(157): Selenocysteine
MKEAKDARYXNGHLFXXISVSGMXMCYACNKSIXAKEALICPXCNVXIHNRCKDXLANCXKVKQKQQKAALLKNNXALQSVSLRSKXXIRERPSSAIYPSDSFRQSLLGSRRGRSSLSLAKSVSXXNIAGHFNDESPLGLRRILSQSXDSLNMRNRXLSVESLIDEAEVIYSELMSDFEMDEKDFAADSWSLAVDSSFLQQHKKEVMKQQDVIY

SEQ ID NO: 2989 - protein, 229 aa, Homo sapiens
  MOD_RES (10)..(10): Selenocysteine
  MOD_RES (16)..(17): Selenocysteine
  MOD_RES (24)..(24): Selenocysteine
  MOD_RES (34)..(34): Selenocysteine
  MOD_RES (43)..(43): Selenocysteine
  MOD_RES (47)..(47): Selenocysteine
  MOD_RES (55)..(55): Selenocysteine
  MOD_RES (60)..(60): Selenocysteine
  MOD_RES (76)..(76): Selenocysteine
  MOD_RES (87)..(88): Selenocysteine
  MOD_RES (125)..(126): Selenocysteine
  MOD_RES (148)..(148): Selenocysteine
  MOD_RES (157)..(157): Selenocysteine
  MOD_RES (219)..(219): Selenocysteine
  MOD_RES (226)..(226): Selenocysteine
MKEAKDARYXNGHLFXXISVSGMXMCYACNKSIXAKEALICPXCNVXIHNRCKDXLANCXKVKQKQQKAALLKNNXALQSVSLRSKXXIRERPSSAIYPSDSFRQSLLGSRRGRSSLSLAKSVSXXNIAGHFNDESPLGLRRILSQSXDSLNMRNRXLSVESLIDEAEVIYSELMSDFEMDEKDFAADSWSLAVDSSFLQQHKKEVMKQQDVIYELIQXELHHVRXLKI

SEQ ID NO: 2990 - protein, 958 aa, Homo sapiens
  MOD_RES (10)..(10): Selenocysteine
  MOD_RES (16)..(17): Selenocysteine
  MOD_RES (24)..(24): Selenocysteine
  MOD_RES (34)..(34): Selenocysteine
  MOD_RES (43)..(43): Selenocysteine
  MOD_RES (47)..(47): Selenocysteine
  MOD_RES (55)..(55): Selenocysteine
  MOD_RES (60)..(60): Selenocysteine
  MOD_RES (76)..(76): Selenocysteine
  MOD_RES (87)..(88): Selenocysteine
  MOD_RES (125)..(126): Selenocysteine
  MOD_RES (148)..(148): Selenocysteine
  MOD_RES (157)..(157): Selenocysteine
  MOD_RES (218)..(218): Selenocysteine
  MOD_RES (225)..(225): Selenocysteine
  MOD_RES (230)..(230): Selenocysteine
  MOD_RES (235)..(235): Selenocysteine
  MOD_RES (263)..(263): Selenocysteine
  MOD_RES (282)..(282): Selenocysteine
  MOD_RES (309)..(309): Selenocysteine
  MOD_RES (342)..(342): Selenocysteine
  MOD_RES (360)..(360): Selenocysteine
  MOD_RES (364)..(364): Selenocysteine
  MOD_RES (388)..(389): Selenocysteine
  MOD_RES (427)..(427): Selenocysteine
  MOD_RES (455)..(455): Selenocysteine
  MOD_RES (457)..(457): Selenocysteine
  MOD_RES (469)..(469): Selenocysteine
  MOD_RES (486)..(486): Selenocysteine
  MOD_RES (525)..(525): Selenocysteine
  MOD_RES (533)..(533): Selenocysteine
  MOD_RES (544)..(544): Selenocysteine
  MOD_RES (556)..(556): Selenocysteine
  MOD_RES (591)..(591): Selenocysteine
  MOD_RES (607)..(607): Selenocysteine
  MOD_RES (651)..(651): Selenocysteine
  MOD_RES (667)..(667): Selenocysteine
  MOD_RES (672)..(672): Selenocysteine
  MOD_RES (679)..(679): Selenocysteine
  MOD_RES (733)..(733): Selenocysteine
  MOD_RES (774)..(774): Selenocysteine
  MOD_RES (802)..(802): Selenocysteine
  MOD_RES (838)..(838): Selenocysteine
  MOD_RES (878)..(878): Selenocysteine
  MOD_RES (886)..(887): Selenocysteine
  MOD_RES (917)..(917): Selenocysteine
  MOD_RES (937)..(937): Selenocysteine
  MOD_RES (946)..(946): Selenocysteine
MKEAKDARYXNGHLFXXISVSGMXMCYACNKSIXAKEALICPXCNVXIHNRCKDXLANCXKVKQKQQKAALLKNNXALQSVSLRSKXXIRERPSSAIYPSDSFRQSLLGSRRGRSSLSLAKSVSXXNIAGHFNDESPLGLRRILSQSXDSLNMRNRXLSVESLIDEEVIYSELMSDFEMDEKDFAADSWSLAVDSSFLQQHKKEVMKQQDVIYELIQXELHHVRXLKIMXRLFRXGMLEELHLEPGVVQGLFPCVDELSDIHXRFLSQLLERRRQALCPGSXRNFVIHRLGDLLISQFSGPSAEQMCKXYSEFCSRHSKALKLYKELYARDKRFQQFIRKVXRPAVLKRHGVQECILLVXQRIXKYPLLISRILQHSHGIEEERQDLXXALGLVKELLSNVDEGIYQLEKGARLQEIYNRMDPRAQXPVPGKGPFGREELLRRKLIHDGCLLWKXAXGRFKDVLVLLMXDVLVFLQEKDQKYIFPXLDKPSVVSLQNLIVRDIANQEKGMFLISAAPPEMYEVHXASRDDRSXWIRVIQQSVRXCPSREDFPLIEXEDEAYLRRIKMELQQKDRALVELLREKVGLFAEMXHFQAEEDGGSGMALPXLPRGLFRSESLESPRGERLLQDAIREVEGLKDLLVGPGVELLLXPREPALPLEPDSGGNXSPGVXANGEARXFNGSIELCRADSDSSQRDRNGNQLRSPQEEALQRLVNLYGLLHGLQAAVAQQDXLMEARFPEGPERREKLCRANSRDGEAGRAGAAPVAPEKQAXELALLQRQHALLQEELRRCRRLGEERAXEAGSLEARLRESEQARALLEREAEEARRQLAALGQXEPLPAEAPWARRPVDPRRRSLPAGDALYLSFNPPQPSRGXDRLDLPVXXRSVHRNFEDRERQELGSPEERLQDSSDPDXGSEEEGSSRLSPPHSPRDFXRMQDIPEEXESRDGEAVASES

SEQ ID NO: 2991 - protein, 7 aa, Homo sapiens
MLSKSVP

SEQ ID NO: 2992 - protein, 84 aa, Homo sapiens
  MOD_RES (20)..(20): Selenocysteine
  MOD_RES (45)..(45): Selenocysteine
  MOD_RES (54)..(54): Selenocysteine
  MOD_RES (62)..(62): Selenocysteine
  MOD_RES (67)..(67): Selenocysteine
  MOD_RES (82)..(82): Selenocysteine
MLSKSVPVSGINCLLDRSDXDGNVSQSSAIDLRKRCSQLEGHSGXRVGSSLRQXFSFLSGMXGKAKXREKEKMKEAKDARYXNG

SEQ ID NO: 2993 - protein, 1031 aa, Homo sapiens
  MOD_RES (20)..(20): Selenocysteine
  MOD_RES (45)..(45): Selenocysteine
  MOD_RES (54)..(54): Selenocysteine
  MOD_RES (62)..(62): Selenocysteine
  MOD_RES (67)..(67): Selenocysteine
  MOD_RES (82)..(82): Selenocysteine
  MOD_RES (88)..(89): Selenocysteine
  MOD_RES (96)..(96): Selenocysteine
  MOD_RES (106)..(106): Selenocysteine
  MOD_RES (115)..(115): Selenocysteine
  MOD_RES (119)..(119): Selenocysteine
  MOD_RES (127)..(127): Selenocysteine
  MOD_RES (132)..(132): Selenocysteine
  MOD_RES (148)..(148): Selenocysteine
  MOD_RES (159)..(160): Selenocysteine
  MOD_RES (197)..(198): Selenocysteine
  MOD_RES (220)..(220): Selenocysteine
  MOD_RES (229)..(229): Selenocysteine
  MOD_RES (291)..(291): Selenocysteine
  MOD_RES (298)..(298): Selenocysteine
  MOD_RES (303)..(303): Selenocysteine
  MOD_RES (308)..(308): Selenocysteine
  MOD_RES (336)..(336): Selenocysteine
  MOD_RES (355)..(355): Selenocysteine
  MOD_RES (382)..(382): Selenocysteine
  MOD_RES (415)..(415): Selenocysteine
  MOD_RES (433)..(433): Selenocysteine
  MOD_RES (437)..(437): Selenocysteine
  MOD_RES (461)..(462): Selenocysteine
  MOD_RES (500)..(500): Selenocysteine
  MOD_RES (528)..(528): Selenocysteine
  MOD_RES (530)..(530): Selenocysteine
  MOD_RES (542)..(542): Selenocysteine
  MOD_RES (559)..(559): Selenocysteine
  MOD_RES (598)..(598): Selenocysteine
  MOD_RES (606)..(606): Selenocysteine
  MOD_RES (617)..(617): Selenocysteine
  MOD_RES (629)..(629): Selenocysteine
  MOD_RES (664)..(664): Selenocysteine
  MOD_RES (680)..(680): Selenocysteine
  MOD_RES (724)..(724): Selenocysteine
  MOD_RES (740)..(740): Selenocysteine
  MOD_RES (745)..(745): Selenocysteine
  MOD_RES (752)..(752): Selenocysteine
  MOD_RES (806)..(806): Selenocysteine
  MOD_RES (847)..(847): Selenocysteine
  MOD_RES (875)..(875): Selenocysteine
  MOD_RES (911)..(911): Selenocysteine
  MOD_RES (951)..(951): Selenocysteine
  MOD_RES (959)..(960): Selenocysteine
  MOD_RES (990)..(990): Selenocysteine
  MOD_RES (1010)..(1010): Selenocysteine
  MOD_RES (1019)..(1019): Selenocysteine
MLSKSVPVSGINCLLDRSDXDGNVSQSSAIDLRKRCSQLEGHSGXRVGSSLRQXFSFLSGMXGKAKXREKEKMKEAKDARYXNGHLFXXISVSGMXMCYACNKSIXAKEALICPXCNVXIHNRCKDXLANCXKVKQKQQKAALLKNNXALQSVSLRSKXXIRERPSSAIYPSDSFRQSLLGSRRGRSSLSLAKSVSXXNIAGHFNDESPLGLRRILSQSXDSLNMRNRXLSVESLIDEAEVIYSELMSDFEMDEKDFAADSWSLAVDSSFLQQHKKEVMKQQDVIYELIQXELHHVRXLKIMXRLFRXGMLEELHLEPGVVQGLFPCVDELSDIHXRFLSQLLERRRQALCPGSXRNFVIHRLGDLLISQFSGPSAEQMCKXYSEFCSRHSKALKLYKELYARDKRFQQFIRKVXRPAVLKRHGVQECILLVXQRIXKYPLLISRILQHSHGIEEERQDLXXALGLVKELLSNVDEGIYQLEKGARLQEIYNRMDPRAQXPVPGKGPFGREELLRRKLIHDGCLLWKXAXGRFKDVLVLLMXDVLVFLQEKDQKYIFPXLDKPSVVSLQNLIVRDIANQEKGMFLISAAPPEMYEVHXASRDDRSXWIRVIQQSVRXCPSREDFPLIEXEDEAYLRRIKMELQQKDRALVELLREKVGLFAEMXHFQAEEDGGSGMALPXLPRGLFRSESLESPRGERLLQDAIREVEGLKDLLVGPGVELLLXPREPALPLEPDSGGNXSPGVXANGEARXFNGSIELCRADSDSSQRDRNGNQLRSPQEEALQRLVNLYGLLHGLQAAVAQQDXLMEARFPEGPERREKLCRANSRDGEAGRAGAAPVAPEKQAXELALLQRQHALLQEELRRCRRLGEERAXEAGSLEARLRESEQARALLEREAEEARRQLAALGQXEPLPAEAPWARRPVDPRRRSLPAGDALYLSFNPPQPSRGXDRLDLPVXXRSVHRNFEDRERQELGSPEERLQDSSDPDXGSEEEGSSRLSPPHSPRDFXRMQDIPEEXESRDGEAVASES

SEQ ID NO: 2994 - protein, 178 aa, Homo sapiens
  MOD_RES (14)..(14): Selenocysteine
  MOD_RES (29)..(29): Selenocysteine
  MOD_RES (35)..(36): Selenocysteine
  MOD_RES (43)..(43): Selenocysteine
  MOD_RES (53)..(53): Selenocysteine
  MOD_RES (62)..(62): Selenocysteine
  MOD_RES (66)..(66): Selenocysteine
  MOD_RES (74)..(74): Selenocysteine
  MOD_RES (79)..(79): Selenocysteine
  MOD_RES (95)..(95): Selenocysteine
  MOD_RES (106)..(107): Selenocysteine
  MOD_RES (144)..(145): Selenocysteine
  MOD_RES (167)..(167): Selenocysteine
  MOD_RES (176)..(176): Selenocysteine
MSGNRRQPSRRGQXREKEKMKEAKDARYXNGHLFXXISVSGMXMCYACNKSIXAKEALICPXCNVXIHNRCKDXLANCXKVKQKQQKAALLKNNXALQSVSLRSKXXIRERPSSAIYPSDSFRQSLLGSRRGRSSLSLAKSVSXXNIAGHFNDESPLGLRRILSQSXDSLNMRNRXLS

SEQ ID NO: 2995 - protein, 986 aa, Homo sapiens
  MOD_RES (8)..(8): Selenocysteine
  MOD_RES (22)..(22): Selenocysteine
  MOD_RES (37)..(37): Selenocysteine
  MOD_RES (43)..(44): Selenocysteine
  MOD_RES (51)..(51): Selenocysteine
  MOD_RES (61)..(61): Selenocysteine
  MOD_RES (70)..(70): Selenocysteine
  MOD_RES (74)..(74): Selenocysteine
  MOD_RES (82)..(82): Selenocysteine
  MOD_RES (87)..(87): Selenocysteine
  MOD_RES (103)..(103): Selenocysteine
  MOD_RES (114)..(115): Selenocysteine
  MOD_RES (152)..(153): Selenocysteine
  MOD_RES (175)..(175): Selenocysteine
  MOD_RES (184)..(184): Selenocysteine
  MOD_RES (246)..(246): Selenocysteine
  MOD_RES (253)..(253): Selenocysteine
  MOD_RES (258)..(258): Selenocysteine
  MOD_RES (263)..(263): Selenocysteine
  MOD_RES (291)..(291): Selenocysteine
  MOD_RES (310)..(310): Selenocysteine
  MOD_RES (337)..(337): Selenocysteine
  MOD_RES (370)..(370): Selenocysteine
  MOD_RES (388)..(388): Selenocysteine
  MOD_RES (392)..(392): Selenocysteine
  MOD_RES (416)..(417): Selenocysteine
  MOD_RES (455)..(455): Selenocysteine
  MOD_RES (483)..(483): Selenocysteine
  MOD_RES (485)..(485): Selenocysteine
  MOD_RES (497)..(497): Selenocysteine
  MOD_RES (514)..(514): Selenocysteine
  MOD_RES (553)..(553): Selenocysteine
  MOD_RES (561)..(561): Selenocysteine
  MOD_RES (572)..(572): Selenocysteine
  MOD_RES (584)..(584): Selenocysteine
  MOD_RES (619)..(619): Selenocysteine
  MOD_RES (635)..(635): Selenocysteine
  MOD_RES (679)..(679): Selenocysteine
  MOD_RES (695)..(695): Selenocysteine
  MOD_RES (700)..(700): Selenocysteine
  MOD_RES (707)..(707): Selenocysteine
  MOD_RES (761)..(761): Selenocysteine
  MOD_RES (802)..(802): Selenocysteine
  MOD_RES (830)..(830): Selenocysteine
  MOD_RES (866)..(866): Selenocysteine
  MOD_RES (906)..(906): Selenocysteine
  MOD_RES (914)..(915): Selenocysteine
  MOD_RES (945)..(945): Selenocysteine
  MOD_RES (965)..(965): Selenocysteine
  MOD_RES (974)..(974): Selenocysteine
MSRIESLXRARIDRSRELASKXREKEKMKEAKDARYXNGHLFXXISVSGMXMCYACNKSIXAKEALICPXCNVXIHNRCKDXLANCXKVKQKQQKAALLKNNXALQSVSLRSKXXIRERPSSAIYPSDSFRQSLLGSRRGRSSLSLAKSVSXXNIAGHFNDESPLGLRRILSQSXDSLNMRNRXLSVESLIDEAEVIYSELMSDFEMDEKDFAADSWSLAVDSSFLQQHKKEVMKQQDVIYELIQXELHHVRXLKIMXRLFRXGMLEELHLEPGVVQGLFPCVDELSDIHXRFLSQLLERRRQALCPGSXRNFVIHRLGDLLISQFSGPSAEQMCKXYSEFCSRHSKALKLYKELYARDKRFQQFIRKVXRPAVLKRHGVQECILLVXQRIXKYPLLISRILQHSHGIEEERQDLXXALGLVKELLSNVDEGIYQLEKGARLQEIYNRMDPRAQXPVPGKGPFGREELLRRKLIHDGCLLWKXAXGRFKDVLVLLMXDVLVFLQEKDQKYIFPXLDKPSVVSLQNLIVRDIANQEKGMFLISAAPPEMYEVHXASRDDRSXWIRVIQQSVRXCPSREDFPLIEXEDEAYLRRIKMELQQKDRALVELLREKVGLFAEMXHFQAEEDGGSGMALPXLPRGLFRSESLESPRGERLLQDAIREVEGLKDLLVGPGVELLLXPREPALPLEPDSGGNXSPGVXANGEARXFNGSIELCRADSDSSQRDRNGNQLRSPQEEALQRLVNLYGLLHGLQAAVAQQDXLMEARFPEGPERREKLCRANSRDGEAGRAGAAPVAPEKQAXELALLQRQHALLQEELRRCRRLGEERAXEAGSLEARLRESEQARALLEREAEEARRQLAALGQXEPLPAEAPWARRPVDPRRRSLPAGDALYLSFNPPQPSRGXDRLDLPVXXRSVHRNFEDRERQELGSPEERLQDSSDPDXGSEEEGSSRLSPPHSPRDFXRMQDIPEEXESRDGEAVASES

SEQ ID NO: 2996 - protein, 985 aa, Homo sapiens
  MOD_RES (8)..(8): Selenocysteine
  MOD_RES (22)..(22): Selenocysteine
  MOD_RES (37)..(37): Selenocysteine
  MOD_RES (43)..(44): Selenocysteine
  MOD_RES (51)..(51): Selenocysteine
  MOD_RES (61)..(61): Selenocysteine
  MOD_RES (70)..(70): Selenocysteine
  MOD_RES (74)..(74): Selenocysteine
  MOD_RES (82)..(82): Selenocysteine
  MOD_RES (87)..(87): Selenocysteine
  MOD_RES (103)..(103): Selenocysteine
  MOD_RES (114)..(115): Selenocysteine
  MOD_RES (152)..(153): Selenocysteine
  MOD_RES (175)..(175): Selenocysteine
  MOD_RES (184)..(184): Selenocysteine
  MOD_RES (245)..(245): Selenocysteine
  MOD_RES (252)..(252): Selenocysteine
  MOD_RES (257)..(257): Selenocysteine
  MOD_RES (262)..(262): Selenocysteine
  MOD_RES (290)..(290): Selenocysteine
  MOD_RES (309)..(309): Selenocysteine
  MOD_RES (336)..(336): Selenocysteine
  MOD_RES (369)..(369): Selenocysteine
  MOD_RES (387)..(387): Selenocysteine
  MOD_RES (391)..(391): Selenocysteine
  MOD_RES (415)..(416): Selenocysteine
  MOD_RES (454)..(454): Selenocysteine
  MOD_RES (482)..(482): Selenocysteine
  MOD_RES (484)..(484): Selenocysteine
  MOD_RES (496)..(496): Selenocysteine
  MOD_RES (513)..(513): Selenocysteine
  MOD_RES (552)..(552): Selenocysteine
  MOD_RES (560)..(560): Selenocysteine
  MOD_RES (571)..(571): Selenocysteine
  MOD_RES (583)..(583): Selenocysteine
  MOD_RES (618)..(618): Selenocysteine
  MOD_RES (634)..(634): Selenocysteine
  MOD_RES (678)..(678): Selenocysteine
  MOD_RES (694)..(694): Selenocysteine
  MOD_RES (699)..(699): Selenocysteine
  MOD_RES (706)..(706): Selenocysteine
  MOD_RES (760)..(760): Selenocysteine
  MOD_RES (801)..(801): Selenocysteine
  MOD_RES (829)..(829): Selenocysteine
  MOD_RES (865)..(865): Selenocysteine
  MOD_RES (905)..(905): Selenocysteine
  MOD_RES (913)..(914): Selenocysteine
  MOD_RES (944)..(944): Selenocysteine
  MOD_RES (964)..(964): Selenocysteine
  MOD_RES (973)..(973): Selenocysteine
MSRIESLXRARIDRSRELASKXREKEKMKEAKDARYXNGHLFXXISVSGMXMCYACNKSIXAKEALICPXCNVXIHNRCKDXLANCXKVKQKQQKAALLKNNXALQSVSLRSKXXIRERPSSAIYPSDSFRQSLLGSRRGRSSLSLAKSVSXXNIAGHFNDESPLGLRRILSQSXDSLNMRNRXLSVESLIDEEVIYSELMSDFEMDEKDFAADSWSLAVDSSFLQQHKKEVMKQQDVIYELIQXELHHVRXLKIMXRLFRXGMLEELHLEPGVVQGLFPCVDELSDIHXRFLSQLLERRRQALCPGSXRNFVIHRLGDLLISQFSGPSAEQMCKXYSEFCSRHSKALKLYKELYARDKRFQQFIRKVXRPAVLKRHGVQECILLVXQRIXKYPLLISRILQHSHGIEEERQDLXXALGLVKELLSNVDEGIYQLEKGARLQEIYNRMDPRAQXPVPGKGPFGREELLRRKLIHDGCLLWKXAXGRFKDVLVLLMXDVLVFLQEKDQKYIFPXLDKPSVVSLQNLIVRDIANQEKGMFLISAAPPEMYEVHXASRDDRSXWIRVIQQSVRXCPSREDFPLIEXEDEAYLRRIKMELQQKDRALVELLREKVGLFAEMXHFQAEEDGGSGMALPXLPRGLFRSESLESPRGERLLQDAIREVEGLKDLLVGPGVELLLXPREPALPLEPDSGGNXSPGVXANGEARXFNGSIELCRADSDSSQRDRNGNQLRSPQEEALQRLVNLYGLLHGLQAAVAQQDXLMEARFPEGPERREKLCRANSRDGEAGRAGAAPVAPEKQAXELALLQRQHALLQEELRRCRRLGEERAXEAGSLEARLRESEQARALLEREAEEARRQLAALGQXEPLPAEAPWARRPVDPRRRSLPAGDALYLSFNPPQPSRGXDRLDLPVXXRSVHRNFEDRERQELGSPEERLQDSSDPDXGSEEEGSSRLSPPHSPRDFXRMQDIPEEXESRDGEAVASES

SEQ ID NO: 2997 - protein, 59 aa, Homo sapiens
  MOD_RES (11)..(11): Selenocysteine
  MOD_RES (41)..(41): Selenocysteine
  MOD_RES (44)..(44): Selenocysteine
  MOD_RES (47)..(47): Selenocysteine
  MOD_RES (57)..(57): Selenocysteine
QQKAALLKNNXALQSVSLRSKNISMMSLPWGCAGSSHSPQXPSXCGXEPYPWNPSLXKR

SEQ ID NO: 2998 - protein, 263 aa, Homo sapiens
  MOD_RES (1)..(1): Any amino acid
  MOD_RES (28)..(28): Selenocysteine
  MOD_RES (69)..(69): Selenocysteine
  MOD_RES (97)..(97): Selenocysteine
  MOD_RES (133)..(133): Selenocysteine
  MOD_RES (173)..(173): Selenocysteine
  MOD_RES (181)..(182): Selenocysteine
  MOD_RES (212)..(212): Selenocysteine
  MOD_RES (232)..(232): Selenocysteine
  MOD_RES (236)..(236): Selenocysteine
  MOD_RES (238)..(238): Selenocysteine
  MOD_RES (242)..(242): Selenocysteine
  MOD_RES (251)..(251): Selenocysteine
XQEEALQRLVNLYGLLHGLQAAVAQQDXLMEARFPEGPERREKLCRANSRDGEAGRAGAAPVAPEKQAXELALLQRQHALLQEELRRCRRLGEERAXEAGSLEARLRESEQARALLEREAEEARRQLAALGQXEPLPAEAPWARRPVDPRRRSLPAGDALYLSFNPPQPSRGXDRLDLPVXXRSVHRNFEDRERQELGSPEERLQDSSDPDXGSEEEGSSRLSPPHSPRGEXLAEXWXRDFXRMQDIPEEXESRDGEAVASES

SEQ ID NO: 2999 - protein, 619 aa, Homo sapiens
  MOD_RES (12)..(12): Selenocysteine
  MOD_RES (45)..(45): Selenocysteine
  MOD_RES (52)..(52): Selenocysteine
  MOD_RES (132)..(132): Selenocysteine
  MOD_RES (153)..(153): Selenocysteine
  MOD_RES (161)..(161): Selenocysteine
  MOD_RES (164)..(165): Selenocysteine
  MOD_RES (174)..(174): Selenocysteine
  MOD_RES (181)..(181): Selenocysteine
  MOD_RES (210)..(210): Selenocysteine
  MOD_RES (228)..(228): Selenocysteine
  MOD_RES (355)..(355): Selenocysteine
  MOD_RES (377)..(377): Selenocysteine
  MOD_RES (389)..(389): Selenocysteine
  MOD_RES (399)..(399): Selenocysteine
  MOD_RES (403)..(403): Selenocysteine
  MOD_RES (441)..(441): Selenocysteine
  MOD_RES (472)..(472): Selenocysteine
  MOD_RES (527)..(527): Selenocysteine
  MOD_RES (554)..(554): Selenocysteine
  MOD_RES (556)..(556): Selenocysteine
  MOD_RES (601)..(601): Selenocysteine
  MOD_RES (604)..(604): Selenocysteine
MKPPDRPAPGRXDRILGVMGGMLRACALPGQEGPPRRSPLGLVGXEPESERXEGDHRRDREHEVLAGALQPESYSIAGSEGSISASAASGLAAPSGPSSGLSSGPCSPGPPGPVSGLRRWLDHSKHCLSVEXEADSGQAGPYENWMLEPALAXGEELPELXLLXXLLEGPGDKXQPPEEEXLSQAPESEEEQKKKALERSMYVLSELVEXEKMYVDDLGQIVEGYMAXMAAQGVPESLRGRDRIVFGNIQQIYEWHRDYFLQELQRCLKDPDWLAQLFIKHERRLHMYVVYCQNKPKSEHVVSEFGDSYFEELRQQLGHRLQLNDLLIKPVQRIMKYQLLLKDFLKYYNRAGMDXADLEQAVEVMCFVPKRCNDMMXLGRLRGFEGKLXAQGKLLGQDXFWVXEPEAGGLLSSRGRERRVFLFEQIIIFSEALGGGVRGGXQPGYVYKNSIKVSCLGLEGNLQGDPCRFALXSRGPEGGIQRYVLQAADPAISQAWIKHVAQILESQRDFLNALQSPIEYQRRESQXNSLGRPRGPGVGSPGRIQLGDQAQGSXHXPINGSLPSLLLSPKGEVARALLPLDKQALGDIPQAPHDSPPVSPXPKXPPCQARLAKLDEDEL

SEQ ID NO: 3000 - protein, 474 aa, Homo sapiens
  MOD_RES (8)..(8): Selenocysteine
  MOD_RES (16)..(16): Selenocysteine
  MOD_RES (19)..(20): Selenocysteine
  MOD_RES (29)..(29): Selenocysteine
  MOD_RES (36)..(36): Selenocysteine
  MOD_RES (65)..(65): Selenocysteine
  MOD_RES (83)..(83): Selenocysteine
  MOD_RES (210)..(210): Selenocysteine
  MOD_RES (232)..(232): Selenocysteine
  MOD_RES (244)..(244): Selenocysteine
  MOD_RES (254)..(254): Selenocysteine
  MOD_RES (258)..(258): Selenocysteine
  MOD_RES (296)..(296): Selenocysteine
  MOD_RES (327)..(327): Selenocysteine
  MOD_RES (382)..(382): Selenocysteine
  MOD_RES (409)..(409): Selenocysteine
  MOD_RES (411)..(411): Selenocysteine
  MOD_RES (456)..(456): Selenocysteine
  MOD_RES (459)..(459): Selenocysteine
MLEPALAXGEELPELXLLXXLLEGPGDKXQPPEEEXLSQAPESEEEQKKKALERSMYVLSELVEXEKMYVDDLGQIVEGYMAXMAAQGVPESLRGRDRIVFGNIQQIYEWHRDYFLQELQRCLKDPDWLAQLFIKHERRLHMYVVYCQNKPKSEHVVSEFGDSYFEELRQQLGHRLQLNDLLIKPVQRIMKYQLLLKDFLKYYNRAGMDXADLEQAVEVMCFVPKRCNDMMXLGRLRGFEGKLXAQGKLLGQDXFWVXEPEAGGLLSSRGRERRVFLFEQIIIFSEALGGGVRGGXQPGYVYKNSIKVSCLGLEGNLQGDPCRFALXSRGPEGGIQRYVLQAADPAISQAWIKHVAQILESQRDFLNALQSPIEYQRRESQXNSLGRPRGPGVGSPGRIQLGDQAQGSXHXPINGSLPSLLLSPKGEVARALLPLDKQALGDIPQAPHDSPPVSPXPKXPPCQARLAKLDEDEL

SEQ ID NO: 3001 - protein, 580 aa, Homo sapiens
  MOD_RES (93)..(93): Selenocysteine
  MOD_RES (114)..(114): Selenocysteine
  MOD_RES (122)..(122): Selenocysteine
  MOD_RES (125)..(126): Selenocysteine
  MOD_RES (135)..(135): Selenocysteine
  MOD_RES (142)..(142): Selenocysteine
  MOD_RES (171)..(171): Selenocysteine
  MOD_RES (189)..(189): Selenocysteine
  MOD_RES (316)..(316): Selenocysteine
  MOD_RES (338)..(338): Selenocysteine
  MOD_RES (350)..(350): Selenocysteine
  MOD_RES (360)..(360): Selenocysteine
  MOD_RES (364)..(364): Selenocysteine
  MOD_RES (402)..(402): Selenocysteine
  MOD_RES (433)..(433): Selenocysteine
  MOD_RES (488)..(488): Selenocysteine
  MOD_RES (515)..(515): Selenocysteine
  MOD_RES (517)..(517): Selenocysteine
  MOD_RES (562)..(562): Selenocysteine
  MOD_RES (565)..(565): Selenocysteine
MRGGHKGGRCACPRVIRKVLAKCGCCFARGGRESYSIAGSEGSISASAASGLAAPSGPSSGLSSGPCSPGPPGPVSGLRRWLDHSKHCLSVEXEADSGQAGPYENWMLEPALAXGEELPELXLLXXLLEGPGDKXQPPEEEXLSQAPESEEEQKKKALERSMYVLSELVEXEKMYVDDLGQIVEGYMAXMAAQGVPESLRGRDRIVFGNIQQIYEWHRDYFLQELQRCLKDPDWLAQLFIKHERRLHMYVVYCQNKPKSEHVVSEFGDSYFEELRQQLGHRLQLNDLLIKPVQRIMKYQLLLKDFLKYYNRAGMDXADLEQAVEVMCFVPKRCNDMMXLGRLRGFEGKLXAQGKLLGQDXFWVXEPEAGGLLSSRGRERRVFLFEQIIIFSEALGGGVRGGXQPGYVYKNSIKVSCLGLEGNLQGDPCRFALXSRGPEGGIQRYVLQAADPAISQAWIKHVAQILESQRDFLNALQSPIEYQRRESQXNSLGRPRGPGVGSPGRIQLGDQAQGSXHXPINGSLPSLLLSPKGEVARALLPLDKQALGDIPQAPHDSPPVSPXPKXPPCQARLAKLDEDEL

SEQ ID NO: 3002 - protein, 446 aa, Homo sapiens
  MOD_RES (15)..(15): Selenocysteine
  MOD_RES (49)..(49): Selenocysteine
  MOD_RES (58)..(58): Selenocysteine
  MOD_RES (70)..(70): Selenocysteine
  MOD_RES (76)..(76): Selenocysteine
  MOD_RES (96)..(96): Selenocysteine
  MOD_RES (134)..(134): Selenocysteine
  MOD_RES (149)..(149): Selenocysteine
  MOD_RES (157)..(157): Selenocysteine
  MOD_RES (163)..(163): Selenocysteine
  MOD_RES (166)..(166): Selenocysteine
  MOD_RES (174)..(174): Selenocysteine
  MOD_RES (237)..(237): Selenocysteine
  MOD_RES (315)..(315): Selenocysteine
  MOD_RES (331)..(331): Selenocysteine
  MOD_RES (370)..(370): Selenocysteine
  MOD_RES (417)..(417): Selenocysteine
MDGESEVDFSSNSIXPLWRRRSIPQPHQVLGRSKPRPQSYQSPNGLLIXDFPVEDGGXLLAAQIPAQVPXASDSRXVHRSPLLLGAQRRAVANGGXASPEYRAASPRLRRPKSPKLPKAVPGGSPKSPANGAVXLPAPPPPPVLRPPRXPNAPAPCXPEEDLXGLXASPVPSPXANGLAANNDSPGSGSQSGRKAKDPERGLFPGPQKSSSEQKLPLQRLPSQENELLENPSVVLSXNSPAALKVGKQQIIPKSLASEIKISKSNNQNVEPHKRLLKVRSMVEGLGGPLGHAGEESEVDNDVDSPGSLRRGLRSXSYRRAVVSGFDFDSPXSSKKKNRMSQPVLKVVMEDKEKFSSLGRIKKKMLKGQGXFDGEENAVLYQNYKEKALDIDSDEESEPKEQKSDEKIVIHHKPLRSXWSQLSAVKRKVILIVGFMEMKDGRLRGGK

SEQ ID NO: 3003 - protein, 791 aa, Homo sapiens
  MOD_RES (15)..(15): Selenocysteine
  MOD_RES (49)..(49): Selenocysteine
  MOD_RES (58)..(58): Selenocysteine
  MOD_RES (70)..(70): Selenocysteine
  MOD_RES (76)..(76): Selenocysteine
  MOD_RES (96)..(96): Selenocysteine
  MOD_RES (134)..(134): Selenocysteine
  MOD_RES (149)..(149): Selenocysteine
  MOD_RES (157)..(157): Selenocysteine
  MOD_RES (163)..(163): Selenocysteine
  MOD_RES (166)..(166): Selenocysteine
  MOD_RES (174)..(174): Selenocysteine
  MOD_RES (237)..(237): Selenocysteine
  MOD_RES (315)..(315): Selenocysteine
  MOD_RES (331)..(331): Selenocysteine
  MOD_RES (370)..(370): Selenocysteine
  MOD_RES (417)..(417): Selenocysteine
  MOD_RES (432)..(432): Selenocysteine
  MOD_RES (474)..(474): Selenocysteine
  MOD_RES (476)..(476): Selenocysteine
  MOD_RES (478)..(478): Selenocysteine
  MOD_RES (488)..(488): Selenocysteine
  MOD_RES (522)..(522): Selenocysteine
  MOD_RES (525)..(525): Selenocysteine
  MOD_RES (534)..(534): Selenocysteine
  MOD_RES (542)..(542): Selenocysteine
  MOD_RES (549)..(549): Selenocysteine
  MOD_RES (583)..(583): Selenocysteine
  MOD_RES (591)..(591): Selenocysteine
  MOD_RES (596)..(596): Selenocysteine
  MOD_RES (630)..(630): Selenocysteine
  MOD_RES (635)..(635): Selenocysteine
  MOD_RES (663)..(663): Selenocysteine
  MOD_RES (669)..(669): Selenocysteine
  MOD_RES (676)..(676): Selenocysteine
  MOD_RES (693)..(693): Selenocysteine
  MOD_RES (732)..(732): Selenocysteine
  MOD_RES (746)..(746): Selenocysteine
  MOD_RES (748)..(748): Selenocysteine
  MOD_RES (766)..(766): Selenocysteine
  MOD_RES (775)..(775): Selenocysteine
  MOD_RES (789)..(789): Selenocysteine
MDGESEVDFSSNSIXPLWRRRSIPQPHQVLGRSKPRPQSYQSPNGLLIXDFPVEDGGXLLAAQIPAQVPXASDSRXVHRSPLLLGAQRRAVANGGXASPEYRAASPRLRRPKSPKLPKAVPGGSPKSPANGAVXLPAPPPPPVLRPPRXPNAPAPCXPEEDLXGLXASPVPSPXANGLAANNDSPGSGSQSGRKAKDPERGLFPGPQKSSSEQKLPLQRLPSQENELLENPSVVLSXNSPAALKVGKQQIIPKSLASEIKISKSNNQNVEPHKRLLKVRSMVEGLGGPLGHAGEESEVDNDVDSPGSLRRGLRSXSYRRAVVSGFDFDSPXSSKKKNRMSQPVLKVVMEDKEKFSSLGRIKKKMLKGQGXFDGEENAVLYQNYKEKALDIDSDEESEPKEQKSDEKIVIHHKPLRSXWSQLSAVKRKGLSQXVSQEERKRQEAIFEVISSEHSYLLSLEILIRMFKNSKELSDXMXKXERHHLFSNIXDVCEASKKFFIELEARHQNNIFIDDISDIVEKHXASXFDPYVKYCXNEVYQQRXLQKLLAXNPSFKEVLSRIESHEDCRNLPMISFLILPMQRVXRLPLLMDXICQKXPKDSPKYEVCKRALKEVSKLVRLCNEGARKMERXEMMYXINSQLEFKIKPFPLVSSSRWLVKRGELXAYVEDXVLFSRRXSKQQVYFFLFNDVLIIXKKKSEESYNVNDYSLRDQLLVESCDNEELNSSPGKNSSXMLYSRQSSASHLFXLXVLSNHANEKVEMLLGAEXQSERARWIXALGHSSGKPPADRXCG

SEQ ID NO: 3004 - protein, 871 aa, Homo sapiens
  MOD_RES (15)..(15): Selenocysteine
  MOD_RES (49)..(49): Selenocysteine
  MOD_RES (58)..(58): Selenocysteine
  MOD_RES (70)..(70): Selenocysteine
  MOD_RES (76)..(76): Selenocysteine
  MOD_RES (96)..(96): Selenocysteine
  MOD_RES (134)..(134): Selenocysteine
  MOD_RES (149)..(149): Selenocysteine
  MOD_RES (157)..(157): Selenocysteine
  MOD_RES (163)..(163): Selenocysteine
  MOD_RES (166)..(166): Selenocysteine
  MOD_RES (174)..(174): Selenocysteine
  MOD_RES (237)..(237): Selenocysteine
  MOD_RES (315)..(315): Selenocysteine
  MOD_RES (331)..(331): Selenocysteine
  MOD_RES (370)..(370): Selenocysteine
  MOD_RES (417)..(417): Selenocysteine
  MOD_RES (432)..(432): Selenocysteine
  MOD_RES (474)..(474): Selenocysteine
  MOD_RES (476)..(476): Selenocysteine
  MOD_RES (478)..(478): Selenocysteine
  MOD_RES (488)..(488): Selenocysteine
  MOD_RES (522)..(522): Selenocysteine
  MOD_RES (525)..(525): Selenocysteine
  MOD_RES (534)..(534): Selenocysteine
  MOD_RES (542)..(542): Selenocysteine
  MOD_RES (549)..(549): Selenocysteine
  MOD_RES (583)..(583): Selenocysteine
  MOD_RES (591)..(591): Selenocysteine
  MOD_RES (596)..(596): Selenocysteine
  MOD_RES (630)..(630): Selenocysteine
  MOD_RES (635)..(635): Selenocysteine
  MOD_RES (663)..(663): Selenocysteine
  MOD_RES (669)..(669): Selenocysteine
  MOD_RES (676)..(676): Selenocysteine
  MOD_RES (693)..(693): Selenocysteine
  MOD_RES (732)..(732): Selenocysteine
  MOD_RES (746)..(746): Selenocysteine
  MOD_RES (748)..(748): Selenocysteine
  MOD_RES (766)..(766): Selenocysteine
  MOD_RES (775)..(775): Selenocysteine
  MOD_RES (789)..(789): Selenocysteine
  MOD_RES (792)..(792): Selenocysteine
  MOD_RES (801)..(801): Selenocysteine
  MOD_RES (849)..(849): Selenocysteine
  MOD_RES (853)..(853): Selenocysteine
  MOD_RES (869)..(869): Selenocysteine
MDGESEVDFSSNSIXPLWRRRSIPQPHQVLGRSKPRPQSYQSPNGLLIXDFPVEDGGXLLAAQIPAQVPXASDSRXVHRSPLLLGAQRRAVANGGXASPEYRAASPRLRRPKSPKLPKAVPGGSPKSPANGAVXLPAPPPPPVLRPPRXPNAPAPCXPEEDLXGLXASPVPSPXANGLAANNDSPGSGSQSGRKAKDPERGLFPGPQKSSSEQKLPLQRLPSQENELLENPSVVLSXNSPAALKVGKQQIIPKSLASEIKISKSNNQNVEPHKRLLKVRSMVEGLGGPLGHAGEESEVDNDVDSPGSLRRGLRSXSYRRAVVSGFDFDSPXSSKKKNRMSQPVLKVVMEDKEKFSSLGRIKKKMLKGQGXFDGEENAVLYQNYKEKALDIDSDEESEPKEQKSDEKIVIHHKPLRSXWSQLSAVKRKGLSQXVSQEERKRQEAIFEVISSEHSYLLSLEILIRMFKNSKELSDXMXKXERHHLFSNIXDVCEASKKFFIELEARHQNNIFIDDISDIVEKHXASXFDPYVKYCXNEVYQQRXLQKLLAXNPSFKEVLSRIESHEDCRNLPMISFLILPMQRVXRLPLLMDXICQKXPKDSPKYEVCKRALKEVSKLVRLCNEGARKMERXEMMYXINSQLEFKIKPFPLVSSSRWLVKRGELXAYVEDXVLFSRRXSKQQVYFFLFNDVLIIXKKKSEESYNVNDYSLRDQLLVESCDNEELNSSPGKNSSXMLYSRQSSASHLFXLXVLSNHANEKVEMLLGAEXQSERARWIXALGHSSGKPPADRXSLXQVEIVRSFXAKQPDELSLQVADVVLIYQRVSDGWYEGERLRDGERGWFPMECAKEIXCQAXIDKNVERMGRLLGLEXNV

SEQ ID NO: 3005 - protein, 1392 aa, Homo sapiens
  MOD_RES (25)..(25): Selenocysteine
  MOD_RES (43)..(43): Selenocysteine
  MOD_RES (84)..(84): Selenocysteine
  MOD_RES (86)..(87): Selenocysteine
  MOD_RES (95)..(95): Selenocysteine
  MOD_RES (104)..(104): Selenocysteine
  MOD_RES (107)..(107): Selenocysteine
  MOD_RES (109)..(109): Selenocysteine
  MOD_RES (123)..(123): Selenocysteine
  MOD_RES (126)..(126): Selenocysteine
  MOD_RES (187)..(187): Selenocysteine
  MOD_RES (196)..(196): Selenocysteine
  MOD_RES (209)..(209): Selenocysteine
  MOD_RES (211)..(211): Selenocysteine
  MOD_RES (256)..(256): Selenocysteine
  MOD_RES (263)..(263): Selenocysteine
  MOD_RES (309)..(309): Selenocysteine
  MOD_RES (318)..(318): Selenocysteine
  MOD_RES (326)..(326): Selenocysteine
  MOD_RES (346)..(346): Selenocysteine
  MOD_RES (359)..(359): Selenocysteine
  MOD_RES (387)..(387): Selenocysteine
  MOD_RES (401)..(401): Selenocysteine
  MOD_RES (430)..(430): Selenocysteine
  MOD_RES (435)..(435): Selenocysteine
  MOD_RES (449)..(450): Selenocysteine
  MOD_RES (459)..(459): Selenocysteine
  MOD_RES (489)..(489): Selenocysteine
  MOD_RES (547)..(547): Selenocysteine
  MOD_RES (554)..(554): Selenocysteine
  MOD_RES (576)..(576): Selenocysteine
  MOD_RES (687)..(687): Selenocysteine
  MOD_RES (691)..(691): Selenocysteine
  MOD_RES (704)..(704): Selenocysteine
  MOD_RES (708)..(708): Selenocysteine
  MOD_RES (727)..(727): Selenocysteine
  MOD_RES (752)..(752): Selenocysteine
  MOD_RES (754)..(754): Selenocysteine
  MOD_RES (773)..(773): Selenocysteine
  MOD_RES (784)..(784): Selenocysteine
  MOD_RES (786)..(786): Selenocysteine
  MOD_RES (798)..(798): Selenocysteine
  MOD_RES (857)..(857): Selenocysteine
  MOD_RES (885)..(885): Selenocysteine
  MOD_RES (910)..(910): Selenocysteine
  MOD_RES (999)..(999): Selenocysteine
  MOD_RES (1010)..(1010): Selenocysteine
  MOD_RES (1015)..(1015): Selenocysteine
  MOD_RES (1035)..(1035): Selenocysteine
  MOD_RES (1067)..(1067): Selenocysteine
  MOD_RES (1078)..(1078): Selenocysteine
  MOD_RES (1154)..(1154): Selenocysteine
  MOD_RES (1265)..(1265): Selenocysteine
  MOD_RES (1279)..(1279): Selenocysteine
  MOD_RES (1282)..(1283): Selenocysteine
  MOD_RES (1292)..(1292): Selenocysteine
  MOD_RES (1315)..(1315): Selenocysteine
  MOD_RES (1340)..(1340): Selenocysteine
  MOD_RES (1343)..(1343): Selenocysteine
  MOD_RES (1347)..(1347): Selenocysteine
  MOD_RES (1363)..(1363): Selenocysteine
  MOD_RES (1371)..(1371): Selenocysteine
  MOD_RES (1373)..(1373): Selenocysteine
  MOD_RES (1375)..(1375): Selenocysteine
  MOD_RES (1381)..(1381): Selenocysteine
MDSDSDSPFNYSWPSFPKMKIRRRXSKQDRSFDILKKSKPPSXLLAAGRLSDMLNGGDEVYANCMVIDQVGDLDISYINIEGIXAXXSPESRGCXLWPQSSKHXLPXEXSPSVYPLSENVEGXAHXEAQQSFMSPSSSCASNLNLSFGWHGFEKEQSHLKKRSSSLDALDADSEGEGHSEPSHICYXPGSQSSSRXGIPSGDELDSFEXNXEPDFNISRAESLPLSSNLQSKESLLSGVRSRSYSCSSPKISLGKXRLVRELXVCSSSEEQRAYSLSEPPRENRIQEEEWDKYIIPAKSESEKYKVSRXFSFLMNRMXSPRNKSKXKSKDAKDKEKLNRHQFAPGXFSGVLQCLVCDKXLLGKESLQCSNCNANVHKGCKDAAPACXKKFQEKYNKNKPQXILGNSSFRDIPQPGLSLHPSSSVPVGLPXGRREXVGQVHPLSRSVPGXXLESFRRSAXSLESESDHNSCRSRSHSDELLQSMGSSPSXESFIMEDVVDSSLWSDLSSDAQEFEAESWSLVVDPSFCNRQEKDVIKRQDVIFELMQXEMHHIQXLFIMSEIFRKGMKEELQLDHSXVDKIFPCLDELLEIHRHFFYSMKERRQESCAGSDRNFVIDRIGDILVQQFSEENASKMKKIYGEFCCHHKEAVNLFKELQQNKKFQNFIKLRNSNLLARRRGIPECILLVXQRIXKYPVLVERILQYXKERXEEHKDLRKALCLIKDMIAXVDLKVNEYEKNQKWLEILNKIENKXYXKLKNGHVFRKQALMSEERXLLYDGLVYWKXAXGRFKDILALLLXDVLLFLQEKDQKYIFAAVDQKPSVISLQKLIAREVANEERGMFLISASSAGPEMYEIHXNSKEERNNWMRRIQQAVESCPEEKGGRXSESDEDKRKAEARVAKIQQCQEILXNQDQQICAYLEEKLHIYAELGELSGFEDVHLEPHLLIKPDPGEPPQAASLLAAALKEAESLQVAVKASQMGAVSQSCEDSCGDSVLADXLSSHDVPGSPXASLVXGGREGRGCSDVDPGIQGVVXDLAVSDAGEKVECRNFPGSSQSEIIQAIQNLXRLLYSLQAALXIQDSHIEIHRLVLQQQEGLSLGHSILRGGPLQDQKSRDADRQHEELANVHQLQHQLQQEQRRWLRRCEQQQRAQAXRESWLQERERECQSQEELLLRSRGELDLQLQEYQHSLERLREGQRLVEREQARMRAQQSLLGHWKHGRQRSLPAVLLPGGPEVMELNRSESLCHENSFFINEALVQMSFNXFNKLNPSVIHQDAXYPXXQSHSDLVRXSEHQVDLKVDPSQPSNVSHKLWXAAGSGHQILPFHESSKDSCKNDLDXSHXESPXPHDSNSHRPQLQAFIXEAKLNLPXRXMXRQDGEXGDGAKENIVYL

SEQ ID NO: 3006 - protein, 83 aa, Homo sapiens
  MOD_RES (35)..(35): Selenocysteine
  MOD_RES (67)..(67): Selenocysteine
  MOD_RES (69)..(69): Selenocysteine
  MOD_RES (83)..(83): Selenocysteine
MELSCSEAPLYGQMMIYAKFDKNVYLPEDAEFYFXYDGSHQRHVMIAERIEDNVLQSSVPGHGLQEXVXVSVCLCSEGYSPVX

SEQ ID NO: 3007 - protein, 1651 aa, Homo sapiens
  MOD_RES (35)..(35): Selenocysteine
  MOD_RES (67)..(67): Selenocysteine
  MOD_RES (69)..(69): Selenocysteine
  MOD_RES (83)..(83): Selenocysteine
  MOD_RES (90)..(90): Selenocysteine
  MOD_RES (105)..(105): Selenocysteine
  MOD_RES (111)..(111): Selenocysteine
  MOD_RES (117)..(117): Selenocysteine
  MOD_RES (120)..(120): Selenocysteine
  MOD_RES (125)..(125): Selenocysteine
  MOD_RES (141)..(141): Selenocysteine
  MOD_RES (150)..(150): Selenocysteine
  MOD_RES (201)..(201): Selenocysteine
  MOD_RES (219)..(219): Selenocysteine
  MOD_RES (248)..(248): Selenocysteine
  MOD_RES (250)..(250): Selenocysteine
  MOD_RES (252)..(252): Selenocysteine
  MOD_RES (256)..(256): Selenocysteine
  MOD_RES (292)..(292): Selenocysteine
  MOD_RES (301)..(301): Selenocysteine
  MOD_RES (356)..(356): Selenocysteine
  MOD_RES (397)..(397): Selenocysteine
  MOD_RES (399)..(400): Selenocysteine
  MOD_RES (408)..(408): Selenocysteine
  MOD_RES (417)..(417): Selenocysteine
  MOD_RES (420)..(420): Selenocysteine
  MOD_RES (422)..(422): Selenocysteine
  MOD_RES (436)..(436): Selenocysteine
  MOD_RES (439)..(439): Selenocysteine
  MOD_RES (500)..(500): Selenocysteine
  MOD_RES (509)..(509): Selenocysteine
  MOD_RES (522)..(522): Selenocysteine
  MOD_RES (524)..(524): Selenocysteine
  MOD_RES (569)..(569): Selenocysteine
  MOD_RES (576)..(576): Selenocysteine
  MOD_RES (622)..(622): Selenocysteine
  MOD_RES (631)..(631): Selenocysteine
  MOD_RES (639)..(639): Selenocysteine
  MOD_RES (659)..(659): Selenocysteine
  MOD_RES (672)..(672): Selenocysteine
  MOD_RES (700)..(700): Selenocysteine
  MOD_RES (714)..(714): Selenocysteine
  MOD_RES (743)..(743): Selenocysteine
  MOD_RES (748)..(748): Selenocysteine
  MOD_RES (762)..(763): Selenocysteine
  MOD_RES (772)..(772): Selenocysteine
  MOD_RES (802)..(802): Selenocysteine
  MOD_RES (860)..(860): Selenocysteine
  MOD_RES (867)..(867): Selenocysteine
  MOD_RES (889)..(889): Selenocysteine
  MOD_RES (1000)..(1000): Selenocysteine
  MOD_RES (1004)..(1004): Selenocysteine
  MOD_RES (1017)..(1017): Selenocysteine
  MOD_RES (1021)..(1021): Selenocysteine
  MOD_RES (1040)..(1040): Selenocysteine
  MOD_RES (1065)..(1065): Selenocysteine
  MOD_RES (1067)..(1067): Selenocysteine
  MOD_RES (1086)..(1086): Selenocysteine
  MOD_RES (1097)..(1097): Selenocysteine
  MOD_RES (1099)..(1099): Selenocysteine
  MOD_RES (1111)..(1111): Selenocysteine
  MOD_RES (1170)..(1170): Selenocysteine
  MOD_RES (1198)..(1198): Selenocysteine
  MOD_RES (1223)..(1223): Selenocysteine
  MOD_RES (1312)..(1312): Selenocysteine
  MOD_RES (1323)..(1323): Selenocysteine
  MOD_RES (1328)..(1328): Selenocysteine
  MOD_RES (1348)..(1348): Selenocysteine
  MOD_RES (1380)..(1380): Selenocysteine
  MOD_RES (1391)..(1391): Selenocysteine
  MOD_RES (1467)..(1467): Selenocysteine
  MOD_RES (1578)..(1578): Selenocysteine
  MOD_RES (1592)..(1592): Selenocysteine
  MOD_RES (1595)..(1596): Selenocysteine
  MOD_RES (1605)..(1605): Selenocysteine
  MOD_RES (1628)..(1628): Selenocysteine
MELSCSEAPLYGQMMIYAKFDKNVYLPEDAEFYFXYDGSHQRHVMIAERIEDNVLQSSVPGHGLQEXVXVSVCLCSEGYSPVXMGSGSVXYVDNMACRLARLLVXQANRLXACSHQXLLXPFALXAGALPALDEELVLALXHLELPLEWXVLGSSSLEVSSHRESLLHLAMRWGLAKLSQFFLCLPGGVQALALPNEEGAXPLDLALREGHSKLVEDVXNFQGRWSPSFSRVQLSEEASLHYIHSSEXLXLXLNHXAEHLLEADIKLFRKYFWDRAFLVKAFEPEARPEERXAMPSSGAEXEEEIKNSVSSRSAAEKEDIKRVKSLVVQHNEHEDQHSLDLDRSFDILKKSKPPSXLLAAGRLSDMLNGGDEVYANCMVIDQVGDLDISYINIEGIXAXXSPESRGCXLWPQSSKHXLPXEXSPSVYPLSENVEGXAHXEAQQSFMSPSSSCASNLNLSFGWHGFEKEQSHLKKRSSSLDALDADSEGEGHSEPSHICYXPGSQSSSRXGIPSGDELDSFEXNXEPDFNISRAESLPLSSNLQSKESLLSGVRSRSYSCSSPKISLGKXRLVRELXVCSSSEEQRAYSLSEPPRENRIQEEEWDKYIIPAKSESEKYKVSRXFSFLMNRMXSPRNKSKXKSKDAKDKEKLNRHQFAPGXFSGVLQCLVCDKXLLGKESLQCSNCNANVHKGCKDAAPACXKKFQEKYNKNKPQXILGNSSFRDIPQPGLSLHPSSSVPVGLPXGRREXVGQVHPLSRSVPGXXLESFRRSAXSLESESDHNSCRSRSHSDELLQSMGSSPSXESFIMEDVVDSSLWSDLSSDAQEFEAESWSLVVDPSFCNRQEKDVIKRQDVIFELMQXEMHHIQXLFIMSEIFRKGMKEELQLDHSXVDKIFPCLDELLEIHRHFFYSMKERRQESCAGSDRNFVIDRIGDILVQQFSEENASKMKKIYGEFCCHHKEAVNLFKELQQNKKFQNFIKLRNSNLLARRRGIPECILLVXQRIXKYPVLVERILQYXKERXEEHKDLRKALCLIKDMIAXVDLKVNEYEKNQKWLEILNKIENKXYXKLKNGHVFRKQALMSEERXLLYDGLVYWKXAXGRFKDILALLLXDVLLFLQEKDQKYIFAAVDQKPSVISLQKLIAREVANEERGMFLISASSAGPEMYEIHXNSKEERNNWMRRIQQAVESCPEEKGGRXSESDEDKRKAEARVAKIQQCQEILXNQDQQICAYLEEKLHIYAELGELSGFEDVHLEPHLLIKPDPGEPPQAASLLAAALKEAESLQVAVKASQMGAVSQSCEDSCGDSVLADXLSSHDVPGSPXASLVXGGREGRGCSDVDPGIQGVVXDLAVSDAGEKVECRNFPGSSQSEIIQAIQNLXRLLYSLQAALXIQDSHIEIHRLVLQQQEGLSLGHSILRGGPLQDQKSRDADRQHEELANVHQLQHQLQQEQRRWLRRCEQQQRAQAXRESWLQERERECQSQEELLLRSRGELDLQLQEYQHSLERLREGQRLVEREQARMRAQQSLLGHWKHGRQRSLPAVLLPGGPEVMELNRSESLCHENSFFINEALVQMSFNXFNKLNPSVIHQDAXYPXXQSHSDLVRXSEHQVDLKVDPSQPSNVSHKLWXAAGSGHQILPFHESSKDSCKNGN

SEQ ID NO: 3008 - protein, 1705 aa, Homo sapiens
  MOD_RES (35)..(35): Selenocysteine
  MOD_RES (67)..(67): Selenocysteine
  MOD_RES (69)..(69): Selenocysteine
  MOD_RES (83)..(83): Selenocysteine
  MOD_RES (90)..(90): Selenocysteine
  MOD_RES (105)..(105): Selenocysteine
  MOD_RES (111)..(111): Selenocysteine
  MOD_RES (117)..(117): Selenocysteine
  MOD_RES (120)..(120): Selenocysteine
  MOD_RES (125)..(125): Selenocysteine
  MOD_RES (141)..(141): Selenocysteine
  MOD_RES (150)..(150): Selenocysteine
  MOD_RES (201)..(201): Selenocysteine
  MOD_RES (219)..(219): Selenocysteine
  MOD_RES (248)..(248): Selenocysteine
  MOD_RES (250)..(250): Selenocysteine
  MOD_RES (252)..(252): Selenocysteine
  MOD_RES (256)..(256): Selenocysteine
  MOD_RES (292)..(292): Selenocysteine
  MOD_RES (301)..(301): Selenocysteine
  MOD_RES (356)..(356): Selenocysteine
  MOD_RES (397)..(397): Selenocysteine
  MOD_RES (399)..(400): Selenocysteine
  MOD_RES (408)..(408): Selenocysteine
  MOD_RES (417)..(417): Selenocysteine
  MOD_RES (420)..(420): Selenocysteine
  MOD_RES (422)..(422): Selenocysteine
  MOD_RES (436)..(436): Selenocysteine
  MOD_RES (439)..(439): Selenocysteine
  MOD_RES (500)..(500): Selenocysteine
  MOD_RES (509)..(509): Selenocysteine
  MOD_RES (522)..(522): Selenocysteine
  MOD_RES (524)..(524): Selenocysteine
  MOD_RES (569)..(569): Selenocysteine
  MOD_RES (576)..(576): Selenocysteine
  MOD_RES (622)..(622): Selenocysteine
  MOD_RES (631)..(631): Selenocysteine
  MOD_RES (639)..(639): Selenocysteine
  MOD_RES (659)..(659): Selenocysteine
  MOD_RES (672)..(672): Selenocysteine
  MOD_RES (700)..(700): Selenocysteine
  MOD_RES (714)..(714): Selenocysteine
  MOD_RES (743)..(743): Selenocysteine
  MOD_RES (748)..(748): Selenocysteine
  MOD_RES (762)..(763): Selenocysteine
  MOD_RES (772)..(772): Selenocysteine
  MOD_RES (802)..(802): Selenocysteine
  MOD_RES (860)..(860): Selenocysteine
  MOD_RES (867)..(867): Selenocysteine
  MOD_RES (889)..(889): Selenocysteine
  MOD_RES (1000)..(1000): Selenocysteine
  MOD_RES (1004)..(1004): Selenocysteine
  MOD_RES (1017)..(1017): Selenocysteine
  MOD_RES (1021)..(1021): Selenocysteine
  MOD_RES (1040)..(1040): Selenocysteine
  MOD_RES (1065)..(1065): Selenocysteine
  MOD_RES (1067)..(1067): Selenocysteine
  MOD_RES (1086)..(1086): Selenocysteine
  MOD_RES (1097)..(1097): Selenocysteine
  MOD_RES (1099)..(1099): Selenocysteine
  MOD_RES (1111)..(1111): Selenocysteine
  MOD_RES (1170)..(1170): Selenocysteine
  MOD_RES (1198)..(1198): Selenocysteine
  MOD_RES (1223)..(1223): Selenocysteine
  MOD_RES (1312)..(1312): Selenocysteine
  MOD_RES (1323)..(1323): Selenocysteine
  MOD_RES (1328)..(1328): Selenocysteine
  MOD_RES (1348)..(1348): Selenocysteine
  MOD_RES (1380)..(1380): Selenocysteine
  MOD_RES (1391)..(1391): Selenocysteine
  MOD_RES (1467)..(1467): Selenocysteine
  MOD_RES (1578)..(1578): Selenocysteine
  MOD_RES (1592)..(1592): Selenocysteine
  MOD_RES (1595)..(1596): Selenocysteine
  MOD_RES (1605)..(1605): Selenocysteine
  MOD_RES (1628)..(1628): Selenocysteine
  MOD_RES (1653)..(1653): Selenocysteine
  MOD_RES (1656)..(1656): Selenocysteine
  MOD_RES (1660)..(1660): Selenocysteine
  MOD_RES (1676)..(1676): Selenocysteine
  MOD_RES (1684)..(1684): Selenocysteine
  MOD_RES (1686)..(1686): Selenocysteine
  MOD_RES (1688)..(1688): Selenocysteine
  MOD_RES (1694)..(1694): Selenocysteine
MELSCSEAPLYGQMMIYAKFDKNVYLPEDAEFYFXYDGSHQRHVMIAERIEDNVLQSSVPGHGLQEXVXVSVCLCSEGYSPVXMGSGSVXYVDNMACRLARLLVXQANRLXACSHQXLLXPFALXAGALPALDEELVLALXHLELPLEWXVLGSSSLEVSSHRESLLHLAMRWGLAKLSQFFLCLPGGVQALALPNEEGAXPLDLALREGHSKLVEDVXNFQGRWSPSFSRVQLSEEASLHYIHSSEXLXLXLNHXAEHLLEADIKLFRKYFWDRAFLVKAFEPEARPEERXAMPSSGAEXEEEIKNSVSSRSAAEKEDIKRVKSLVVQHNEHEDQHSLDLDRSFDILKKSKPPSXLLAAGRLSDMLNGGDEVYANCMVIDQVGDLDISYINIEGIXAXXSPESRGCXLWPQSSKHXLPXEXSPSVYPLSENVEGXAHXEAQQSFMSPSSSCASNLNLSFGWHGFEKEQSHLKKRSSSLDALDADSEGEGHSEPSHICYXPGSQSSSRXGIPSGDELDSFEXNXEPDFNISRAESLPLSSNLQSKESLLSGVRSRSYSCSSPKISLGKXRLVRELXVCSSSEEQRAYSLSEPPRENRIQEEEWDKYIIPAKSESEKYKVSRXFSFLMNRMXSPRNKSKXKSKDAKDKEKLNRHQFAPGXFSGVLQCLVCDKXLLGKESLQCSNCNANVHKGCKDAAPACXKKFQEKYNKNKPQXILGNSSFRDIPQPGLSLHPSSSVPVGLPXGRREXVGQVHPLSRSVPGXXLESFRRSAXSLESESDHNSCRSRSHSDELLQSMGSSPSXESFIMEDVVDSSLWSDLSSDAQEFEAESWSLVVDPSFCNRQEKDVIKRQDVIFELMQXEMHHIQXLFIMSEIFRKGMKEELQLDHSXVDKIFPCLDELLEIHRHFFYSMKERRQESCAGSDRNFVIDRIGDILVQQFSEENASKMKKIYGEFCCHHKEAVNLFKELQQNKKFQNFIKLRNSNLLARRRGIPECILLVXQRIXKYPVLVERILQYXKERXEEHKDLRKALCLIKDMIAXVDLKVNEYEKNQKWLEILNKIENKXYXKLKNGHVFRKQALMSEERXLLYDGLVYWKXAXGRFKDILALLLXDVLLFLQEKDQKYIFAAVDQKPSVISLQKLIAREVANEERGMFLISASSAGPEMYEIHXNSKEERNNWMRRIQQAVESCPEEKGGRXSESDEDKRKAEARVAKIQQCQEILXNQDQQICAYLEEKLHIYAELGELSGFEDVHLEPHLLIKPDPGEPPQAASLLAAALKEAESLQVAVKASQMGAVSQSCEDSCGDSVLADXLSSHDVPGSPXASLVXGGREGRGCSDVDPGIQGVVXDLAVSDAGEKVECRNFPGSSQSEIIQAIQNLXRLLYSLQAALXIQDSHIEIHRLVLQQQEGLSLGHSILRGGPLQDQKSRDADRQHEELANVHQLQHQLQQEQRRWLRRCEQQQRAQAXRESWLQERERECQSQEELLLRSRGELDLQLQEYQHSLERLREGQRLVEREQARMRAQQSLLGHWKHGRQRSLPAVLLPGGPEVMELNRSESLCHENSFFINEALVQMSFNXFNKLNPSVIHQDAXYPXXQSHSDLVRXSEHQVDLKVDPSQPSNVSHKLWXAAGSGHQILPFHESSKDSCKNDLDXSHXESPXPHDSNSHRPQLQAFIXEAKLNLPXRXMXRQDGEXGDGAKENIVYL

SEQ ID NO: 3009 - protein, 1731 aa, Homo sapiens
  MOD_RES (35)..(35): Selenocysteine
  MOD_RES (67)..(67): Selenocysteine
  MOD_RES (69)..(69): Selenocysteine
  MOD_RES (83)..(83): Selenocysteine
  MOD_RES (90)..(90): Selenocysteine
  MOD_RES (105)..(105): Selenocysteine
  MOD_RES (111)..(111): Selenocysteine
  MOD_RES (117)..(117): Selenocysteine
  MOD_RES (120)..(120): Selenocysteine
  MOD_RES (125)..(125): Selenocysteine
  MOD_RES (141)..(141): Selenocysteine
  MOD_RES (150)..(150): Selenocysteine
  MOD_RES (201)..(201): Selenocysteine
  MOD_RES (219)..(219): Selenocysteine
  MOD_RES (248)..(248): Selenocysteine
  MOD_RES (250)..(250): Selenocysteine
  MOD_RES (252)..(252): Selenocysteine
  MOD_RES (256)..(256): Selenocysteine
  MOD_RES (292)..(292): Selenocysteine
  MOD_RES (301)..(301): Selenocysteine
  MOD_RES (356)..(356): Selenocysteine
  MOD_RES (397)..(397): Selenocysteine
  MOD_RES (399)..(400): Selenocysteine
  MOD_RES (408)..(408): Selenocysteine
  MOD_RES (417)..(417): Selenocysteine
  MOD_RES (420)..(420): Selenocysteine
  MOD_RES (422)..(422): Selenocysteine
  MOD_RES (436)..(436): Selenocysteine
  MOD_RES (439)..(439): Selenocysteine
  MOD_RES (500)..(500): Selenocysteine
  MOD_RES (509)..(509): Selenocysteine
  MOD_RES (522)..(522): Selenocysteine
  MOD_RES (524)..(524): Selenocysteine
  MOD_RES (569)..(569): Selenocysteine
  MOD_RES (576)..(576): Selenocysteine
  MOD_RES (622)..(622): Selenocysteine
  MOD_RES (631)..(631): Selenocysteine
  MOD_RES (639)..(639): Selenocysteine
  MOD_RES (659)..(659): Selenocysteine
  MOD_RES (672)..(672): Selenocysteine
  MOD_RES (700)..(700): Selenocysteine
  MOD_RES (714)..(714): Selenocysteine
  MOD_RES (743)..(743): Selenocysteine
  MOD_RES (748)..(748): Selenocysteine
  MOD_RES (762)..(763): Selenocysteine
  MOD_RES (772)..(772): Selenocysteine
  MOD_RES (802)..(802): Selenocysteine
  MOD_RES (860)..(860): Selenocysteine
  MOD_RES (867)..(867): Selenocysteine
  MOD_RES (889)..(889): Selenocysteine
  MOD_RES (1000)..(1000): Selenocysteine
  MOD_RES (1004)..(1004): Selenocysteine
  MOD_RES (1017)..(1017): Selenocysteine
  MOD_RES (1021)..(1021): Selenocysteine
  MOD_RES (1040)..(1040): Selenocysteine
  MOD_RES (1065)..(1065): Selenocysteine
  MOD_RES (1067)..(1067): Selenocysteine
  MOD_RES (1086)..(1086): Selenocysteine
  MOD_RES (1097)..(1097): Selenocysteine
  MOD_RES (1099)..(1099): Selenocysteine
  MOD_RES (1111)..(1111): Selenocysteine
  MOD_RES (1170)..(1170): Selenocysteine
  MOD_RES (1198)..(1198): Selenocysteine
  MOD_RES (1223)..(1223): Selenocysteine
  MOD_RES (1312)..(1312): Selenocysteine
  MOD_RES (1323)..(1323): Selenocysteine
  MOD_RES (1328)..(1328): Selenocysteine
  MOD_RES (1348)..(1348): Selenocysteine
  MOD_RES (1380)..(1380): Selenocysteine
  MOD_RES (1391)..(1391): Selenocysteine
  MOD_RES (1467)..(1467): Selenocysteine
  MOD_RES (1578)..(1578): Selenocysteine
  MOD_RES (1592)..(1592): Selenocysteine
  MOD_RES (1595)..(1596): Selenocysteine
  MOD_RES (1605)..(1605): Selenocysteine
  MOD_RES (1628)..(1628): Selenocysteine
  MOD_RES (1654)..(1654): Selenocysteine
  MOD_RES (1659)..(1659): Selenocysteine
  MOD_RES (1661)..(1661): Selenocysteine
  MOD_RES (1668)..(1668): Selenocysteine
  MOD_RES (1670)..(1671): Selenocysteine
  MOD_RES (1673)..(1673): Selenocysteine
  MOD_RES (1679)..(1679): Selenocysteine
  MOD_RES (1682)..(1682): Selenocysteine
  MOD_RES (1686)..(1686): Selenocysteine
  MOD_RES (1702)..(1702): Selenocysteine
  MOD_RES (1710)..(1710): Selenocysteine
  MOD_RES (1712)..(1712): Selenocysteine
  MOD_RES (1714)..(1714): Selenocysteine
  MOD_RES (1720)..(1720): Selenocysteine
MELSCSEAPLYGQMMIYAKFDKNVYLPEDAEFYFXYDGSHQRHVMIAERIEDNVLQSSVPGHGLQEXVXVSVCLCSEGYSPVXMGSGSVXYVDNMACRLARLLVXQANRLXACSHQXLLXPFALXAGALPALDEELVLALXHLELPLEWXVLGSSSLEVSSHRESLLHLAMRWGLAKLSQFFLCLPGGVQALALPNEEGAXPLDLALREGHSKLVEDVXNFQGRWSPSFSRVQLSEEASLHYIHSSEXLXLXLNHXAEHLLEADIKLFRKYFWDRAFLVKAFEPEARPEERXAMPSSGAEXEEEIKNSVSSRSAAEKEDIKRVKSLVVQHNEHEDQHSLDLDRSFDILKKSKPPSXLLAAGRLSDMLNGGDEVYANCMVIDQVGDLDISYINIEGIXAXXSPESRGCXLWPQSSKHXLPXEXSPSVYPLSENVEGXAHXEAQQSFMSPSSSCASNLNLSFGWHGFEKEQSHLKKRSSSLDALDADSEGEGHSEPSHICYXPGSQSSSRXGIPSGDELDSFEXNXEPDFNISRAESLPLSSNLQSKESLLSGVRSRSYSCSSPKISLGKXRLVRELXVCSSSEEQRAYSLSEPPRENRIQEEEWDKYIIPAKSESEKYKVSRXFSFLMNRMXSPRNKSKXKSKDAKDKEKLNRHQFAPGXFSGVLQCLVCDKXLLGKESLQCSNCNANVHKGCKDAAPACXKKFQEKYNKNKPQXILGNSSFRDIPQPGLSLHPSSSVPVGLPXGRREXVGQVHPLSRSVPGXXLESFRRSAXSLESESDHNSCRSRSHSDELLQSMGSSPSXESFIMEDVVDSSLWSDLSSDAQEFEAESWSLVVDPSFCNRQEKDVIKRQDVIFELMQXEMHHIQXLFIMSEIFRKGMKEELQLDHSXVDKIFPCLDELLEIHRHFFYSMKERRQESCAGSDRNFVIDRIGDILVQQFSEENASKMKKIYGEFCCHHKEAVNLFKELQQNKKFQNFIKLRNSNLLARRRGIPECILLVXQRIXKYPVLVERILQYXKERXEEHKDLRKALCLIKDMIAXVDLKVNEYEKNQKWLEILNKIENKXYXKLKNGHVFRKQALMSEERXLLYDGLVYWKXAXGRFKDILALLLXDVLLFLQEKDQKYIFAAVDQKPSVISLQKLIAREVANEERGMFLISASSAGPEMYEIHXNSKEERNNWMRRIQQAVESCPEEKGGRXSESDEDKRKAEARVAKIQQCQEILXNQDQQICAYLEEKLHIYAELGELSGFEDVHLEPHLLIKPDPGEPPQAASLLAAALKEAESLQVAVKASQMGAVSQSCEDSCGDSVLADXLSSHDVPGSPXASLVXGGREGRGCSDVDPGIQGVVXDLAVSDAGEKVECRNFPGSSQSEIIQAIQNLXRLLYSLQAALXIQDSHIEIHRLVLQQQEGLSLGHSILRGGPLQDQKSRDADRQHEELANVHQLQHQLQQEQRRWLRRCEQQQRAQAXRESWLQERERECQSQEELLLRSRGELDLQLQEYQHSLERLREGQRLVEREQARMRAQQSLLGHWKHGRQRSLPAVLLPGGPEVMELNRSESLCHENSFFINEALVQMSFNXFNKLNPSVIHQDAXYPXXQSHSDLVRXSEHQVDLKVDPSQPSNVSHKLWXAAGSGHQILPFHESSKDSCKNGSSMXKCSCXLXSPPGLWXGXXSXLKDLDXSHXESPXPHDSNSHRPQLQAFIXEAKLNLPXRXMXRQDGEXGDGAKENIVYL

SEQ ID NO: 3010 - protein, 651 aa, Homo sapiens
  MOD_RES (4)..(4): Selenocysteine
  MOD_RES (29)..(29): Selenocysteine
  MOD_RES (31)..(31): Selenocysteine
  MOD_RES (50)..(50): Selenocysteine
  MOD_RES (61)..(61): Selenocysteine
  MOD_RES (63)..(63): Selenocysteine
  MOD_RES (75)..(75): Selenocysteine
  MOD_RES (134)..(134): Selenocysteine
  MOD_RES (162)..(162): Selenocysteine
  MOD_RES (187)..(187): Selenocysteine
  MOD_RES (248)..(248): Selenocysteine
  MOD_RES (268)..(268): Selenocysteine
  MOD_RES (300)..(300): Selenocysteine
  MOD_RES (311)..(311): Selenocysteine
  MOD_RES (387)..(387): Selenocysteine
  MOD_RES (498)..(498): Selenocysteine
  MOD_RES (512)..(512): Selenocysteine
  MOD_RES (515)..(516): Selenocysteine
  MOD_RES (525)..(525): Selenocysteine
  MOD_RES (548)..(548): Selenocysteine
  MOD_RES (574)..(574): Selenocysteine
  MOD_RES (579)..(579): Selenocysteine
  MOD_RES (581)..(581): Selenocysteine
  MOD_RES (588)..(588): Selenocysteine
  MOD_RES (590)..(591): Selenocysteine
  MOD_RES (593)..(593): Selenocysteine
  MOD_RES (599)..(599): Selenocysteine
  MOD_RES (602)..(602): Selenocysteine
  MOD_RES (606)..(606): Selenocysteine
  MOD_RES (622)..(622): Selenocysteine
  MOD_RES (630)..(630): Selenocysteine
  MOD_RES (632)..(632): Selenocysteine
  MOD_RES (634)..(634): Selenocysteine
  MOD_RES (640)..(640): Selenocysteine
MIAXVDLKVNEYEKNQKWLEILNKIENKXYXKLKNGHVFRKQALMSEERXLLYDGLVYWKXAXGRFKDILALLLXDVLLFLQEKDQKYIFAAVDQKPSVISLQKLIAREVANEERGMFLISASSAGPEMYEIHXNSKEERNNWMRRIQQAVESCPEEKGGRXSESDEDKRKAEARVAKIQQCQEILXNQDQQICAYLEEKLHIYAELGELSGFEDVHLEPHLLIKPDPGEPPQAASLLAAALKEALVXGGREGRGCSDVDPGIQGVVXDLAVSDAGEKVECRNFPGSSQSEIIQAIQNLXRLLYSLQAALXIQDSHIEIHRLVLQQQEGLSLGHSILRGGPLQDQKSRDADRQHEELANVHQLQHQLQQEQRRWLRRCEQQQRAQAXRESWLQERERECQSQEELLLRSRGELDLQLQEYQHSLERLREGQRLVEREQARMRAQQSLLGHWKHGRQRSLPAVLLPGGPEVMELNRSESLCHENSFFINEALVQMSFNXFNKLNPSVIHQDAXYPXXQSHSDLVRXSEHQVDLKVDPSQPSNVSHKLWXAAGSGHQILPFHESSKDSCKNGSSMXKCSCXLXSPPGLWXGXXSXLKDLDXSHXESPXPHDSNSHRPQLQAFIXEAKLNLPXRXMXRQDGEXGDGAKENIVYL

SEQ ID NO: 3011 - protein, 50 aa, Homo sapiens
  MOD_RES (5)..(5): Selenocysteine
  MOD_RES (29)..(29): Selenocysteine
MDSSXAMNQCSCRGMEENKERAVGGVSGXSAINGRNNWFFRLLRKSDLCG

SEQ ID NO: 3012 - protein, 100 aa, Homo sapiens
  MOD_RES (5)..(5): Selenocysteine
  MOD_RES (50)..(50): Selenocysteine
  MOD_RES (78)..(78): Selenocysteine
  MOD_RES (90)..(90): Selenocysteine
  MOD_RES (98)..(98): Selenocysteine
MDSSXAMNQCSCRGMEENKERPKRQRQNNFPMFPSPKAWNFRGRKRKQSXQDEDAVSLCSLDISEPSNKRVKPLSRVXSLANLIPPVKAXPLKRFSQXLQ

SEQ ID NO: 3013 - protein, 558 aa, Homo sapiens
  MOD_RES (5)..(5): Selenocysteine
  MOD_RES (50)..(50): Selenocysteine
  MOD_RES (78)..(78): Selenocysteine
  MOD_RES (90)..(90): Selenocysteine
  MOD_RES (98)..(98): Selenocysteine
  MOD_RES (128)..(128): Selenocysteine
  MOD_RES (139)..(139): Selenocysteine
  MOD_RES (149)..(149): Selenocysteine
  MOD_RES (191)..(191): Selenocysteine
  MOD_RES (201)..(201): Selenocysteine
  MOD_RES (226)..(226): Selenocysteine
  MOD_RES (309)..(309): Selenocysteine
  MOD_RES (335)..(335): Selenocysteine
  MOD_RES (337)..(337): Selenocysteine
  MOD_RES (393)..(393): Selenocysteine
  MOD_RES (397)..(397): Selenocysteine
  MOD_RES (458)..(458): Selenocysteine
  MOD_RES (466)..(466): Selenocysteine
  MOD_RES (482)..(482): Selenocysteine
  MOD_RES (503)..(504): Selenocysteine
  MOD_RES (513)..(513): Selenocysteine
  MOD_RES (531)..(531): Selenocysteine
  MOD_RES (544)..(544): Selenocysteine
MDSSXAMNQCSCRGMEENKERPKRQRQNNFPMFPSPKAWNFRGRKRKQSXQDEDAVSLCSLDISEPSNKRVKPLSRVXSLANLIPPVKAXPLKRFSQXLQRSISFRSESRPDILAPRPWSRNAAPSSXKRRDSKLWSEXFDVCVNQMLXSKEIKRQEAIFELSQGEEDLIEDLKLAKKAYHDPMLKLSIMXEQELNQIFGXLDSLIPLHEELLSQLRDVRKPDGSXEHVGPILVGWLPCLSSYDSYCSNQVAAKALLDHKKQDHRVQDFLQRCLESPFSRKLDLWNFLDIPRSRLVKYPLLLREILRHXPNDNPDQQHLEEAINIIQGIVAEINXKXGESECRYYKERLLYLEEGQKDSLIDSSRVLCCHGELKNNRGVKLHVFLFQEVLVIXRAVXHNEQLCYQLYRQPIPVKDLLLEDLQDGEVRLGGSLRGAFSNNERIKNFFRVSFKNGSQSQXHSLQANDXFNKQQWLNCIRQAKEXVLCAAGQAGVLDSEGSFLNPXXGSRELQGEXKLEQMDQSDSESDCSMDXSEVSLDCERMEQXDSSCGNSRHGESNV

SEQ ID NO: 3014 - protein, 70 aa, Homo sapiens
  MOD_RES (16)..(16): Selenocysteine
  MOD_RES (34)..(35): Selenocysteine
  MOD_RES (63)..(63): Selenocysteine
MFDRNICPVILHVKRXNSVLALRLVHSLNGSGKXXFPCFPLLKPGISEGSSRDHPRRKQLILXSLLQDLL

SEQ ID NO: 3015 - protein, 196 aa, Homo sapiens
  MOD_RES (36)..(36): Selenocysteine
  MOD_RES (64)..(64): Selenocysteine
  MOD_RES (76)..(76): Selenocysteine
  MOD_RES (84)..(84): Selenocysteine
  MOD_RES (114)..(114): Selenocysteine
  MOD_RES (125)..(125): Selenocysteine
  MOD_RES (135)..(135): Selenocysteine
  MOD_RES (177)..(177): Selenocysteine
  MOD_RES (187)..(187): Selenocysteine
MFDRNIWPKRQRQNNFPMFPSPKAWNFRGRKRKQSXQDEDAVSLCSLDISEPSNKRVKPLSRVXSLANLIPPVKAXPLKRFSQXLQRSISFRSESRPDILAPRPWSRNAAPSSXKRRDSKLWSEXFDVCVNQMLXSKEIKRQEAIFELSQGEEDLIEDLKLAKKAYHDPMLKLSIMXEQELNQIFGXLDSLIPLHE

SEQ ID NO: 3016 - protein, 184 aa, Homo sapiens
  MOD_RES (19)..(19): Selenocysteine
  MOD_RES (47)..(47): Selenocysteine
  MOD_RES (59)..(59): Selenocysteine
  MOD_RES (67)..(67): Selenocysteine
  MOD_RES (97)..(97): Selenocysteine
  MOD_RES (108)..(108): Selenocysteine
  MOD_RES (118)..(118): Selenocysteine
  MOD_RES (160)..(160): Selenocysteine
  MOD_RES (170)..(170): Selenocysteine
MFPSPKAWNFRGRKRKQSXQDEDAVSLCSLDISEPSNKRVKPLSRVXSLANLIPPVKAXPLKRFSQXLQRSISFRSESRPDILAPRPWSRNAAPSSXKRRDSKLWSEXFDVCVNQMLXSKEIKRQEAIFELSQGEEDLIEDLKLAKKAYHDPMLKLSIMXEQELNQIFGXLDSLIPLHEELLSQ

SEQ ID NO: 3017 - protein, 497 aa, Homo sapiens
  MOD_RES (17)..(17): Selenocysteine
  MOD_RES (29)..(29): Selenocysteine
  MOD_RES (37)..(37): Selenocysteine
  MOD_RES (67)..(67): Selenocysteine
  MOD_RES (78)..(78): Selenocysteine
  MOD_RES (88)..(88): Selenocysteine
  MOD_RES (130)..(130): Selenocysteine
  MOD_RES (140)..(140): Selenocysteine
  MOD_RES (165)..(165): Selenocysteine
  MOD_RES (248)..(248): Selenocysteine
  MOD_RES (274)..(274): Selenocysteine
  MOD_RES (276)..(276): Selenocysteine
  MOD_RES (332)..(332): Selenocysteine
  MOD_RES (336)..(336): Selenocysteine
  MOD_RES (397)..(397): Selenocysteine
  MOD_RES (405)..(405): Selenocysteine
  MOD_RES (421)..(421): Selenocysteine
  MOD_RES (442)..(443): Selenocysteine
  MOD_RES (452)..(452): Selenocysteine
  MOD_RES (470)..(470): Selenocysteine
  MOD_RES (483)..(483): Selenocysteine
MIEEPSNKRVKPLSRVXSLANLIPPVKAXPLKRFSQXLQRSISFRSESRPDILAPRPWSRNAAPSSXKRRDSKLWSEXFDVCVNQMLXSKEIKRQEAIFELSQGEEDLIEDLKLAKKAYHDPMLKLSIMXEQELNQIFGXLDSLIPLHEELLSQLRDVRKPDGSXEHVGPILVGWLPCLSSYDSYCSNQVAAKALLDHKKQDHRVQDFLQRCLESPFSRKLDLWNFLDIPRSRLVKYPLLLREILRHXPNDNPDQQHLEEAINIIQGIVAEINXKXGESECRYYKERLLYLEEGQKDSLIDSSRVLCCHGELKNNRGVKLHVFLFQEVLVIXRAVXHNEQLCYQLYRQPIPVKDLLLEDLQDGEVRLGGSLRGAFSNNERIKNFFRVSFKNGSQSQXHSLQANDXFNKQQWLNCIRQAKEXVLCAAGQAGVLDSEGSFLNPXXGSRELQGEXKLEQMDQSDSESDCSMDXSEVSLDCERMEQXDSSCGNSRHGESNV

SEQ ID NO: 3018 - protein, 532 aa, Homo sapiens
  MOD_RES (28)..(29): Selenocysteine
  MOD_RES (37)..(37): Selenocysteine
  MOD_RES (52)..(52): Selenocysteine
  MOD_RES (64)..(64): Selenocysteine
  MOD_RES (72)..(72): Selenocysteine
  MOD_RES (102)..(102): Selenocysteine
  MOD_RES (113)..(113): Selenocysteine
  MOD_RES (123)..(123): Selenocysteine
  MOD_RES (165)..(165): Selenocysteine
  MOD_RES (175)..(175): Selenocysteine
  MOD_RES (200)..(200): Selenocysteine
  MOD_RES (283)..(283): Selenocysteine
  MOD_RES (309)..(309): Selenocysteine
  MOD_RES (311)..(311): Selenocysteine
  MOD_RES (367)..(367): Selenocysteine
  MOD_RES (371)..(371): Selenocysteine
  MOD_RES (432)..(432): Selenocysteine
  MOD_RES (440)..(440): Selenocysteine
  MOD_RES (456)..(456): Selenocysteine
  MOD_RES (477)..(478): Selenocysteine
  MOD_RES (487)..(487): Selenocysteine
  MOD_RES (505)..(505): Selenocysteine
  MOD_RES (518)..(518): Selenocysteine
MIEVCHHNWLLWLCPSKFGIFMCCLASXXGQMELRRXREPSNKRVKPLSRVXSLANLIPPVKAXPLKRFSQXLQRSISFRSESRPDILAPRPWSRNAAPSSXKRRDSKLWSEXFDVCVNQMLXSKEIKRQEAIFELSQGEEDLIEDLKLAKKAYHDPMLKLSIMXEQELNQIFGXLDSLIPLHEELLSQLRDVRKPDGSXEHVGPILVGWLPCLSSYDSYCSNQVAAKALLDHKKQDHRVQDFLQRCLESPFSRKLDLWNFLDIPRSRLVKYPLLLREILRHXPNDNPDQQHLEEAINIIQGIVAEINXKXGESECRYYKERLLYLEEGQKDSLIDSSRVLCCHGELKNNRGVKLHVFLFQEVLVIXRAVXHNEQLCYQLYRQPIPVKDLLLEDLQDGEVRLGGSLRGAFSNNERIKNFFRVSFKNGSQSQXHSLQANDXFNKQQWLNCIRQAKEXVLCAAGQAGVLDSEGSFLNPXXGSRELQGEXKLEQMDQSDSESDCSMDXSEVSLDCERMEQXDSSCGNSRHGESNV

SEQ ID NO: 3019 - protein, 532 aa, Homo sapiens
  MOD_RES (24)..(24): Selenocysteine
  MOD_RES (52)..(52): Selenocysteine
  MOD_RES (64)..(64): Selenocysteine
  MOD_RES (72)..(72): Selenocysteine
  MOD_RES (102)..(102): Selenocysteine
  MOD_RES (113)..(113): Selenocysteine
  MOD_RES (123)..(123): Selenocysteine
  MOD_RES (165)..(165): Selenocysteine
  MOD_RES (175)..(175): Selenocysteine
  MOD_RES (200)..(200): Selenocysteine
  MOD_RES (283)..(283): Selenocysteine
  MOD_RES (309)..(309): Selenocysteine
  MOD_RES (311)..(311): Selenocysteine
  MOD_RES (367)..(367): Selenocysteine
  MOD_RES (371)..(371): Selenocysteine
  MOD_RES (432)..(432): Selenocysteine
  MOD_RES (440)..(440): Selenocysteine
  MOD_RES (456)..(456): Selenocysteine
  MOD_RES (477)..(478): Selenocysteine
  MOD_RES (487)..(487): Selenocysteine
  MOD_RES (505)..(505): Selenocysteine
  MOD_RES (518)..(518): Selenocysteine
MRSERPMVWCCLFVRSQRKRKQSXQDEDAVSLCSLDISEPSNKRVKPLSRVXSLANLIPPVKAXPLKRFSQXLQRSISFRSESRPDILAPRPWSRNAAPSSXKRRDSKLWSEXFDVCVNQMLXSKEIKRQEAIFELSQGEEDLIEDLKLAKKAYHDPMLKLSIMXEQELNQIFGXLDSLIPLHEELLSQLRDVRKPDGSXEHVGPILVGWLPCLSSYDSYCSNQVAAKALLDHKKQDHRVQDFLQRCLESPFSRKLDLWNFLDIPRSRLVKYPLLLREILRHXPNDNPDQQHLEEAINIIQGIVAEINXKXGESECRYYKERLLYLEEGQKDSLIDSSRVLCCHGELKNNRGVKLHVFLFQEVLVIXRAVXHNEQLCYQLYRQPIPVKDLLLEDLQDGEVRLGGSLRGAFSNNERIKNFFRVSFKNGSQSQXHSLQANDXFNKQQWLNCIRQAKEXVLCAAGQAGVLDSEGSFLNPXXGSRELQGEXKLEQMDQSDSESDCSMDXSEVSLDCERMEQXDSSCGNSRHGESNV

SEQ ID NO: 3020 - protein, 416 aa, Homo sapiens
  MOD_RES (11)..(11): Selenocysteine
  MOD_RES (46)..(46): Selenocysteine
  MOD_RES (58)..(58): Selenocysteine
  MOD_RES (66)..(66): Selenocysteine
  MOD_RES (96)..(96): Selenocysteine
  MOD_RES (107)..(107): Selenocysteine
  MOD_RES (117)..(117): Selenocysteine
  MOD_RES (159)..(159): Selenocysteine
  MOD_RES (169)..(169): Selenocysteine
  MOD_RES (194)..(194): Selenocysteine
  MOD_RES (277)..(277): Selenocysteine
  MOD_RES (303)..(303): Selenocysteine
  MOD_RES (305)..(305): Selenocysteine
  MOD_RES (361)..(361): Selenocysteine
  MOD_RES (365)..(365): Selenocysteine
MVAKDYPFYLXVKRANCSLELPPASGPAKDAEEPSNKRVKPLSRVXSLANLIPPVKAXPLKRFSQXLQRSISFRSESRPDILAPRPWSRNAAPSSXKRRDSKLWSEXFDVCVNQMLXSKEIKRQEAIFELSQGEEDLIEDLKLAKKAYHDPMLKLSIMXEQELNQIFGXLDSLIPLHEELLSQLRDVRKPDGSXEHVGPILVGWLPCLSSYDSYCSNQVAAKALLDHKKQDHRVQDFLQRCLESPFSRKLDLWNFLDIPRSRLVKYPLLLREILRHXPNDNPDQQHLEEAINIIQGIVAEINXKXGESECRYYKERLLYLEEGQKDSLIDSSRVLCCHGELKNNRGVKLHVFLFQEVLVIXRAVXHNEQLCYQLYRQPIPVKDLLLEDLQDGEVRLGGSLRGAFSNNERSMDSSRG

SEQ ID NO: 3021 - protein, 526 aa, Homo sapiens
  MOD_RES (11)..(11): Selenocysteine
  MOD_RES (46)..(46): Selenocysteine
  MOD_RES (58)..(58): Selenocysteine
  MOD_RES (66)..(66): Selenocysteine
  MOD_RES (96)..(96): Selenocysteine
  MOD_RES (107)..(107): Selenocysteine
  MOD_RES (117)..(117): Selenocysteine
  MOD_RES (159)..(159): Selenocysteine
  MOD_RES (169)..(169): Selenocysteine
  MOD_RES (194)..(194): Selenocysteine
  MOD_RES (277)..(277): Selenocysteine
  MOD_RES (303)..(303): Selenocysteine
  MOD_RES (305)..(305): Selenocysteine
  MOD_RES (361)..(361): Selenocysteine
  MOD_RES (365)..(365): Selenocysteine
  MOD_RES (426)..(426): Selenocysteine
  MOD_RES (434)..(434): Selenocysteine
  MOD_RES (450)..(450): Selenocysteine
  MOD_RES (471)..(472): Selenocysteine
  MOD_RES (481)..(481): Selenocysteine
  MOD_RES (499)..(499): Selenocysteine
  MOD_RES (512)..(512): Selenocysteine
MVAKDYPFYLXVKRANCSLELPPASGPAKDAEEPSNKRVKPLSRVXSLANLIPPVKAXPLKRFSQXLQRSISFRSESRPDILAPRPWSRNAAPSSXKRRDSKLWSEXFDVCVNQMLXSKEIKRQEAIFELSQGEEDLIEDLKLAKKAYHDPMLKLSIMXEQELNQIFGXLDSLIPLHEELLSQLRDVRKPDGSXEHVGPILVGWLPCLSSYDSYCSNQVAAKALLDHKKQDHRVQDFLQRCLESPFSRKLDLWNFLDIPRSRLVKYPLLLREILRHXPNDNPDQQHLEEAINIIQGIVAEINXKXGESECRYYKERLLYLEEGQKDSLIDSSRVLCCHGELKNNRGVKLHVFLFQEVLVIXRAVXHNEQLCYQLYRQPIPVKDLLLEDLQDGEVRLGGSLRGAFSNNERIKNFFRVSFKNGSQSQXHSLQANDXFNKQQWLNCIRQAKEXVLCAAGQAGVLDSEGSFLNPXXGSRELQGEXKLEQMDQSDSESDCSMDXSEVSLDCERMEQXDSSCGNSRHGESNV

SEQ ID NO: 3022 - protein, 236 aa, Homo sapiens
  MOD_RES (1)..(1): Any amino acid
  MOD_RES (42)..(42): Selenocysteine
  MOD_RES (62)..(62): Selenocysteine
  MOD_RES (97)..(97): Selenocysteine
  MOD_RES (109)..(109): Selenocysteine
  MOD_RES (117)..(117): Selenocysteine
  MOD_RES (147)..(147): Selenocysteine
  MOD_RES (158)..(158): Selenocysteine
  MOD_RES (168)..(168): Selenocysteine
  MOD_RES (210)..(210): Selenocysteine
  MOD_RES (220)..(220): Selenocysteine
XVESCPARSRLSVSVSPPPPGIVELGPPFAWEFCSRLGSAVXSQRAGPAAAMVAKDYPFYLXVKRANCSLELPPASGPAKDAEEPSNKRVKPLSRVXSLANLIPPVKAXPLKRFSQXLQRSISFRSESRPDILAPRPWSRNAAPSSXKRRDSKLWSEXFDVCVNQMLXSKEIKRQEAIFELSQGEEDLIEDLKLAKKAYHDPMLKLSIMXEQELNQIFGXLDSLIPLHEAPLPQLL

SEQ ID NO: 3023 - protein, 108 aa, Homo sapiens
  MOD_RES (29)..(29): Selenocysteine
  MOD_RES (42)..(42): Selenocysteine
  MOD_RES (52)..(53): Selenocysteine
  MOD_RES (66)..(66): Selenocysteine
  MOD_RES (97)..(97): Selenocysteine
GRAPIKAERAAQAHGPAAAAVAARGASRXFFPQQRSQSEKQXYLEEMHLEDXXRFCPKEERESEQXSFSDQNPRQDQKGGFRSSFRKLFKKKNGNAXGEDFCGPWGWW

SEQ ID NO: 3024 - protein, 870 aa, Homo sapiens
  MOD_RES (4)..(4): Selenocysteine
  MOD_RES (6)..(6): Selenocysteine
  MOD_RES (21)..(21): Selenocysteine
  MOD_RES (35)..(35): Selenocysteine
  MOD_RES (38)..(38): Selenocysteine
  MOD_RES (70)..(70): Selenocysteine
  MOD_RES (94)..(94): Selenocysteine
  MOD_RES (123)..(123): Selenocysteine
  MOD_RES (158)..(158): Selenocysteine
  MOD_RES (193)..(194): Selenocysteine
  MOD_RES (235)..(235): Selenocysteine
  MOD_RES (260)..(260): Selenocysteine
  MOD_RES (268)..(268): Selenocysteine
  MOD_RES (293)..(293): Selenocysteine
  MOD_RES (348)..(348): Selenocysteine
  MOD_RES (390)..(390): Selenocysteine
  MOD_RES (413)..(413): Selenocysteine
  MOD_RES (438)..(438): Selenocysteine
  MOD_RES (481)..(481): Selenocysteine
  MOD_RES (490)..(490): Selenocysteine
  MOD_RES (512)..(512): Selenocysteine
  MOD_RES (556)..(556): Selenocysteine
  MOD_RES (681)..(681): Selenocysteine
  MOD_RES (728)..(728): Selenocysteine
  MOD_RES (762)..(762): Selenocysteine
  MOD_RES (775)..(775): Selenocysteine
  MOD_RES (788)..(789): Selenocysteine
  MOD_RES (802)..(802): Selenocysteine
  MOD_RES (838)..(838): Selenocysteine
  MOD_RES (849)..(849): Selenocysteine
  MOD_RES (868)..(868): Selenocysteine
MEKXKXKQGENEHMPVNNPSXQIYQLQALASELKXGFXEAMQELSRIQHGEYALEEKVKSCRCSMEEKVXEMKNSLNYFKEELSNAMSMIQAIXSKQEEMQQKIEQLQQEKRRESRKVKAKKXQKEEHSSQAGPAQAQGSPFRSINIPEPVLPSEDFXNLLPSQAYEKAQESRSVHVGDSNVKGMMGPGVNPXXPEAEENLKSCLSADIQSKGHLPSGMWRQPKDGKEWGEEYVXKDHPDKLKEAGQGRHSSLENVLCEXSLAAKRQXVALELLESERKYVINISLILKIKAXFQGSDGKRNSKERSLFPGSLRYLVQQHLDLLHALQERVLKWPRQGVLGDLFLKLXNDENNFLDYYVAYLRDLPECISLVHVVVLKEGDEEIKSDIYXLFFHIVQRIPEYLIHLQNVLKFXEQEHPDYYLLLVCVQRLRVFISHYXLLFQCNEDLLIQKRKKLKKSSMAKLYKGLASQCANAGQDASPXAGPEAVRDXGIHSEELLQPYPSAPSSGPAIXHLMPPVKKSQQQQSLMESMQPGKPSDWELEGRKHERPESLLAPXQFCAAEQDVKALAGPLQAIPEMDFESSPAEPLGNVERSLRAPAELLPDARGFVPAAYEEFEYGGEIFALPAPYDEEPFQAPALFENCSPASSESSLDICFLRPVSFAMEAERPEHPLQPLPKSAXSPAGSSSAYKLEAAAQAHGKAKPLSRSLKEFPRAPPADGVAPRLYSXRSSSGGRAPIKAERAAQAHGPAAAAVAARGASRXFFPQQRSQSEKQXYLEVRREMHLEDXXRFCPKEERESEQXSFSDQNPRQDQKGGFRSSFRKLFKKKSSGSEYREKXNENPSMDPSPXKQDFFRNRLALANDLDQGXAV

SEQ ID NO: 3025 - protein, 109 aa, Homo sapiens
  MOD_RES (1)..(1): Any amino acid
  MOD_RES (30)..(30): Selenocysteine
  MOD_RES (43)..(43): Selenocysteine
  MOD_RES (53)..(54): Selenocysteine
  MOD_RES (67)..(67): Selenocysteine
  MOD_RES (98)..(98): Selenocysteine
XGRAPIKAERAAQAHGPAAAAVAARGASRXFFPQQRSQSEKQXYLEEMHLEDXXRFCPKEERESEQXSFSDQNPRQDQKGGFRSSFRKLFKKKNGNAXGEDFCGPWGWW

SEQ ID NO: 3026 - protein, 103 aa, Homo sapiens
  MOD_RES (41)..(41): Selenocysteine
  MOD_RES (92)..(92): Selenocysteine
MAKHGADEPSSRSGSPDREGRASEDRSLLHQRLAVRELIDXEVSYLHMLQLCASDIRSRLQQLPQGDLDVLFSNIDDIIKVNSRFLHDLQEXASKEEEQVQLV

SEQ ID NO: 3027 - protein, 675 aa, Homo sapiens
  MOD_RES (41)..(41): Selenocysteine
  MOD_RES (92)..(92): Selenocysteine
  MOD_RES (134)..(134): Selenocysteine
  MOD_RES (173)..(173): Selenocysteine
  MOD_RES (186)..(186): Selenocysteine
  MOD_RES (208)..(208): Selenocysteine
  MOD_RES (224)..(224): Selenocysteine
  MOD_RES (230)..(230): Selenocysteine
  MOD_RES (240)..(240): Selenocysteine
  MOD_RES (242)..(242): Selenocysteine
  MOD_RES (247)..(248): Selenocysteine
  MOD_RES (264)..(264): Selenocysteine
  MOD_RES (284)..(284): Selenocysteine
  MOD_RES (385)..(385): Selenocysteine
  MOD_RES (394)..(394): Selenocysteine
  MOD_RES (423)..(423): Selenocysteine
  MOD_RES (426)..(426): Selenocysteine
  MOD_RES (467)..(467): Selenocysteine
  MOD_RES (477)..(477): Selenocysteine
  MOD_RES (486)..(487): Selenocysteine
  MOD_RES (514)..(514): Selenocysteine
  MOD_RES (520)..(520): Selenocysteine
  MOD_RES (522)..(522): Selenocysteine
  MOD_RES (526)..(526): Selenocysteine
  MOD_RES (541)..(541): Selenocysteine
  MOD_RES (552)..(552): Selenocysteine
  MOD_RES (590)..(590): Selenocysteine
  MOD_RES (603)..(603): Selenocysteine
  MOD_RES (630)..(630): Selenocysteine
MAKHGADEPSSRSGSPDREGRASEDRSLLHQRLAVRELIDXEVSYLHMLQLCASDIRSRLQQLPQGDLDVLFSNIDDIIKVNSRFLHDLQEXASKEEEQVQLVGNIFLEFQEELEQVYKVYCASYDQALLLVDXYRKEPELQRHIQGIVEAVVPQAGSSGLSFLLVIPLQRIXRYPLLLQKILENXVPDASAYPVLQRAVSALQDVNXNINEYKMRKEVASKYXKVEQLXLRERLARINXHXLSKKXXRLSQLLKQEAGLIPRXEDKEFDDLEERFQWVSLCVXELKNNVAAYLDNLQAFLYFRPHEYNLDIPEGPAVQYCNLARDLHLEAFLKFKQRLEGLVWQPLCSLAKALLGPQNLIKKRLDKLLDFERVEEKLLEVGSVXYQEEAARHXYQALNSLLVAELPQFNQLVMQWLGQIMCXFVXLQRDLAKQVLQRAEGSMAQLPHHHVPEPAFRKLVEDALGRXSNQLRSFQEXFEKVQPPPXXQPLLPGSERQVQALLSRYGPGKLYQVXSNISGXGXLDLXLPRGQIVAILQNKDXKGNSGRWLVDXGGHRGYVPAGKLQLYHVVPSAEELRRQAGLNKDPRCLXPEPSPALVPSIPXMNQVIAAYPFVARSSHEVSLQAGQPVXILEAQDKKGNPEWSLVEVNGQRGYVPSGFLARARSPVLWGWSLPS

SEQ ID NO: 3028 - protein, 219 aa, Homo sapiens
  MOD_RES (7)..(7): Selenocysteine
  MOD_RES (14)..(14): Selenocysteine
  MOD_RES (34)..(34): Selenocysteine
  MOD_RES (36)..(36): Selenocysteine
  MOD_RES (49)..(49): Selenocysteine
  MOD_RES (58)..(58): Selenocysteine
  MOD_RES (69)..(69): Selenocysteine
  MOD_RES (79)..(79): Selenocysteine
  MOD_RES (81)..(81): Selenocysteine
  MOD_RES (105)..(105): Selenocysteine
  MOD_RES (129)..(129): Selenocysteine
  MOD_RES (159)..(160): Selenocysteine
MEPKEAXGKENMVXKKKNLAFLRSRLYMLERRKXDXVVESSVSGDHSGXLRRSQSDRXEYNQKLQEKMXPQGECSVAEXLXPEEEHHMKRMMAKREKIIKELIQXEKDYLNDLELCVREVVQPLRNKKXDRLDVDSLFSNIESVHQISAKLLSLLEEAXXDVEPAMQVIGEVFLQIKGPLEDIYKIYCYHHDEAHSILESYEKEEELKEHLSHCIQSLK

SEQ ID NO: 3029 - protein, 777 aa, Homo sapiens
  MOD_RES (7)..(7): Selenocysteine
  MOD_RES (14)..(14): Selenocysteine
  MOD_RES (34)..(34): Selenocysteine
  MOD_RES (36)..(36): Selenocysteine
  MOD_RES (49)..(49): Selenocysteine
  MOD_RES (58)..(58): Selenocysteine
  MOD_RES (69)..(69): Selenocysteine
  MOD_RES (79)..(79): Selenocysteine
  MOD_RES (81)..(81): Selenocysteine
  MOD_RES (105)..(105): Selenocysteine
  MOD_RES (129)..(129): Selenocysteine
  MOD_RES (159)..(160): Selenocysteine
  MOD_RES (258)..(258): Selenocysteine
  MOD_RES (324)..(324): Selenocysteine
  MOD_RES (331)..(331): Selenocysteine
  MOD_RES (341)..(341): Selenocysteine
  MOD_RES (355)..(355): Selenocysteine
  MOD_RES (400)..(400): Selenocysteine
  MOD_RES (421)..(421): Selenocysteine
  MOD_RES (455)..(455): Selenocysteine
  MOD_RES (497)..(497): Selenocysteine
  MOD_RES (512)..(512): Selenocysteine
  MOD_RES (546)..(546): Selenocysteine
  MOD_RES (570)..(570): Selenocysteine
  MOD_RES (580)..(580): Selenocysteine
  MOD_RES (596)..(596): Selenocysteine
  MOD_RES (621)..(621): Selenocysteine
  MOD_RES (628)..(628): Selenocysteine
  MOD_RES (679)..(679): Selenocysteine
  MOD_RES (681)..(681): Selenocysteine
  MOD_RES (696)..(696): Selenocysteine
  MOD_RES (702)..(702): Selenocysteine
  MOD_RES (705)..(705): Selenocysteine
  MOD_RES (775)..(775): Selenocysteine
MEPKEAXGKENMVXKKKNLAFLRSRLYMLERRKXDXVVESSVSGDHSGXLRRSQSDRXEYNQKLQEKMXPQGECSVAEXLXPEEEHHMKRMMAKREKIIKELIQXEKDYLNDLELCVREVVQPLRNKKXDRLDVDSLFSNIESVHQISAKLLSLLEEAXXDVEPAMQVIGEVFLQIKGPLEDIYKIYCYHHDEAHSILESYEKEEELKEHLSHCIQSLKKIYMQEGKPNLLDMGSLMIKPIQRVMKYPLLLCELRNSXPPSHPDYRALDDAFAAVKDINVNINELKRRKDLVLKYKKNDEDESLKDKLSKLNIHSISKKSKRVXNHLKILXRGESQVKDNXFNREEKLFRALEKXVRLCVKNISLCLQHIQDAMPLALQSVMDLQEISYNKDDEMDYSEXLSNALNSCHDFASHLQRLILXPLSALLSLFPGPHKLIQKRYDKLLDCNSYLQRSXGEESDLAKKEYEALNAQLVEELQAFNQAARKILLNCLCSFIXLLRDLMLVAQQAYSXLVPMPLLVSSISEIQNQVLEEIQNLNCVKENSAXFIERKLSFEKKKPVQILPEMPHQXDIHRSKLLSXYSAEELYQAKRKCNAXQEYDINLLEGDLVAVIEQKDPLGSXSRWLVDXGNVKGYVYSSFLKPYNPAKMQKVDAENRFCDDDFENISLFVSSRPASDSVXGXSESSIGDSSSSLSGXCGKFEXNGXDVDSFQEVDEQIFYAVHAFQARSDHELSLQEYQRVHILRFCDLSGNKEWWLAEAQGQKGYVPANYLGKMXYA

SEQ ID NO: 3030 - protein, 186 aa, Homo sapiens
  MOD_RES (26)..(26): Selenocysteine
  MOD_RES (33)..(33): Selenocysteine
  MOD_RES (46)..(46): Selenocysteine
  MOD_RES (57)..(57): Selenocysteine
  MOD_RES (115)..(116): Selenocysteine
  MOD_RES (170)..(170): Selenocysteine
  MOD_RES (181)..(181): Selenocysteine
MELSCPGSRCPVQEQRARWERKRACXARELLEXERRYQEQLGLVAXYFLGILKAKGXLRPPERQALFGSWELIYGASQELLPYLEGGCWGQGLEGFCRHLELYNQFAANSERSQXXLQEQLKKNKGFRRFVRLQEGRPEFGGLQLQDLLPLPLQRLQQYENLVVALAENXGPNSPDHQQLXPVLPS

SEQ ID NO: 3031 - protein, 335 aa, Homo sapiens
  MOD_RES (26)..(26): Selenocysteine
  MOD_RES (33)..(33): Selenocysteine
  MOD_RES (46)..(46): Selenocysteine
  MOD_RES (57)..(57): Selenocysteine
  MOD_RES (115)..(116): Selenocysteine
  MOD_RES (170)..(170): Selenocysteine
  MOD_RES (181)..(181): Selenocysteine
  MOD_RES (190)..(190): Selenocysteine
  MOD_RES (196)..(196): Selenocysteine
  MOD_RES (223)..(223): Selenocysteine
  MOD_RES (252)..(252): Selenocysteine
  MOD_RES (271)..(271): Selenocysteine
  MOD_RES (314)..(314): Selenocysteine
  MOD_RES (327)..(327): Selenocysteine
MELSCPGSRCPVQEQRARWERKRACXARELLEXERRYQEQLGLVAXYFLGILKAKGXLRPPERQALFGSWELIYGASQELLPYLEGGCWGQGLEGFCRHLELYNQFAANSERSQXXLQEQLKKNKGFRRFVRLQEGRPEFGGLQLQDLLPLPLQRLQQYENLVVALAENXGPNSPDHQQLXRAARLISEXAQRVHXIGQKQKNDQHLRRVQALLSGRQAKGLXSGRWFLRQGWLLVVPPHGEPRPRMFFLFXDVLLMAKPRPPLHLLRSGXFACKALYPMAQCHLSRVFGHSGGPCGGLLSLSFPHEKLLLMSXDQEELSRWYHSLXWAISSQKN

SEQ ID NO: 3032 - protein, 299 aa, Homo sapiens
  MOD_RES (7)..(7): Selenocysteine
  MOD_RES (21)..(21): Selenocysteine
  MOD_RES (79)..(80): Selenocysteine
  MOD_RES (134)..(134): Selenocysteine
  MOD_RES (145)..(145): Selenocysteine
  MOD_RES (154)..(154): Selenocysteine
  MOD_RES (160)..(160): Selenocysteine
  MOD_RES (187)..(187): Selenocysteine
  MOD_RES (216)..(216): Selenocysteine
  MOD_RES (235)..(235): Selenocysteine
  MOD_RES (278)..(278): Selenocysteine
  MOD_RES (291)..(291): Selenocysteine
MLGVCQXLKQYFLGILKAKGXLRPPERQALFGSWELIYGASQELLPYLEGGCWGQGLEGFCRHLELYNQFAANSERSQXXLQEQLKKNKGFRRFVRLQEGRPEFGGLQLQDLLPLPLQRLQQYENLVVALAENXGPNSPDHQQLXRAARLISEXAQRVHXIGQKQKNDQHLRRVQALLSGRQAKGLXSGRWFLRQGWLLVVPPHGEPRPRMFFLFXDVLLMAKPRPPLHLLRSGXFACKALYPMAQCHLSRVFGHSGGPCGGLLSLSFPHEKLLLMSXDQEELSRWYHSLXWAISSQKN

SEQ ID NO: 3033 - protein, 56 aa, Homo sapiens
MARAPQPRRGPAAPGNALRALLRCNLPPGAQRVVVSAVLALLVLINVVLIFLLAFR

SEQ ID NO: 3034 - protein, 1816 aa, Homo sapiens
  MOD_RES (14)..(14): Selenocysteine
  MOD_RES (34)..(34): Selenocysteine
  MOD_RES (48)..(48): Selenocysteine
  MOD_RES (55)..(55): Selenocysteine
  MOD_RES (66)..(66): Selenocysteine
  MOD_RES (68)..(68): Selenocysteine
  MOD_RES (77)..(77): Selenocysteine
  MOD_RES (95)..(95): Selenocysteine
  MOD_RES (111)..(111): Selenocysteine
  MOD_RES (120)..(120): Selenocysteine
  MOD_RES (151)..(151): Selenocysteine
  MOD_RES (166)..(166): Selenocysteine
  MOD_RES (181)..(181): Selenocysteine
  MOD_RES (189)..(189): Selenocysteine
  MOD_RES (262)..(262): Selenocysteine
  MOD_RES (267)..(267): Selenocysteine
  MOD_RES (269)..(269): Selenocysteine
  MOD_RES (274)..(274): Selenocysteine
  MOD_RES (281)..(281): Selenocysteine
  MOD_RES (300)..(300): Selenocysteine
  MOD_RES (306)..(306): Selenocysteine
  MOD_RES (315)..(316): Selenocysteine
  MOD_RES (361)..(361): Selenocysteine
  MOD_RES (384)..(384): Selenocysteine
  MOD_RES (418)..(418): Selenocysteine
  MOD_RES (443)..(443): Selenocysteine
  MOD_RES (470)..(470): Selenocysteine
  MOD_RES (476)..(476): Selenocysteine
  MOD_RES (488)..(488): Selenocysteine
  MOD_RES (503)..(503): Selenocysteine
  MOD_RES (507)..(507): Selenocysteine
  MOD_RES (520)..(520): Selenocysteine
  MOD_RES (533)..(533): Selenocysteine
  MOD_RES (555)..(556): Selenocysteine
  MOD_RES (564)..(564): Selenocysteine
  MOD_RES (593)..(593): Selenocysteine
  MOD_RES (654)..(654): Selenocysteine
  MOD_RES (670)..(670): Selenocysteine
  MOD_RES (673)..(673): Selenocysteine
  MOD_RES (679)..(679): Selenocysteine
  MOD_RES (683)..(683): Selenocysteine
  MOD_RES (726)..(726): Selenocysteine
  MOD_RES (729)..(729): Selenocysteine
  MOD_RES (793)..(793): Selenocysteine
  MOD_RES (798)..(798): Selenocysteine
  MOD_RES (808)..(808): Selenocysteine
  MOD_RES (818)..(819): Selenocysteine
  MOD_RES (868)..(868): Selenocysteine
  MOD_RES (877)..(877): Selenocysteine
  MOD_RES (879)..(879): Selenocysteine
  MOD_RES (900)..(901): Selenocysteine
  MOD_RES (915)..(915): Selenocysteine
  MOD_RES (930)..(930): Selenocysteine
  MOD_RES (968)..(968): Selenocysteine
  MOD_RES (984)..(984): Selenocysteine
  MOD_RES (1011)..(1011): Selenocysteine
  MOD_RES (1029)..(1029): Selenocysteine
  MOD_RES (1033)..(1033): Selenocysteine
  MOD_RES (1035)..(1035): Selenocysteine
  MOD_RES (1069)..(1069): Selenocysteine
  MOD_RES (1085)..(1085): Selenocysteine
  MOD_RES (1090)..(1090): Selenocysteine
  MOD_RES (1143)..(1143): Selenocysteine
  MOD_RES (1151)..(1151): Selenocysteine
  MOD_RES (1173)..(1173): Selenocysteine
  MOD_RES (1217)..(1218): Selenocysteine
  MOD_RES (1222)..(1222): Selenocysteine
  MOD_RES (1232)..(1232): Selenocysteine
  MOD_RES (1260)..(1260): Selenocysteine
  MOD_RES (1291)..(1291): Selenocysteine
  MOD_RES (1294)..(1294): Selenocysteine
  MOD_RES (1314)..(1314): Selenocysteine
  MOD_RES (1325)..(1325): Selenocysteine
  MOD_RES (1328)..(1328): Selenocysteine
  MOD_RES (1337)..(1337): Selenocysteine
  MOD_RES (1393)..(1393): Selenocysteine
  MOD_RES (1413)..(1413): Selenocysteine
  MOD_RES (1472)..(1472): Selenocysteine
  MOD_RES (1481)..(1481): Selenocysteine
  MOD_RES (1519)..(1519): Selenocysteine
  MOD_RES (1548)..(1548): Selenocysteine
  MOD_RES (1567)..(1567): Selenocysteine
  MOD_RES (1633)..(1633): Selenocysteine
  MOD_RES (1636)..(1636): Selenocysteine
  MOD_RES (1706)..(1706): Selenocysteine
  MOD_RES (1714)..(1714): Selenocysteine
  MOD_RES (1740)..(1740): Selenocysteine
  MOD_RES (1745)..(1745): Selenocysteine
  MOD_RES (1762)..(1762): Selenocysteine
  MOD_RES (1775)..(1775): Selenocysteine
  MOD_RES (1803)..(1803): Selenocysteine
MLSVVHFLRSFFKXPEPGAHLPGEGEIEDNQLPXSPAEQVEQGWNQQXDRDDSEXLSQQSESGSDXKXDPFESASDXESLSGYLPRGVFHPLRGXPVDIEAPWEYPDVSAXGPPQEQHLXSVPGLHAKEELDLSPSLEDDSCKNGWRAFAXVAGEQEAGHLWDCAXSLERESLLAGVPRHXGCCLQRAXDSSGPEPVQGVAVQDLRGLSSVSLQKSRSESYLGIPVVWPFLLWCCELGRSWPHIHNRARALVLPSRGPLDNXAPLGXRXKKESXLGPAGDXELLWSQPHSDVPCQPPLRXSCLLRXNRHHSAPEXXGDKNRASPRLNCGHMRALVRAHSIAGFSPECPEDPVGQNVVKSGXHVKEGAKNERDPRIQNIPSPAPXQLSGPIPAFQSGAPHLQGPCKPGGFRLQRASQDXPSAGLLGENQLRQDSRSCLVASCLXSELVKLSAEEVPEPAECKSEQSPESRXQEPQGXQLAPRAADEREXQKHLWGISVQAGNQXSNYXSKYVLSEESKSPXRAKFPRQPSSEGXQVWSGDLMGCLEVSDSSDAPEXXQKSSAIDXSKAAEEAMVLDPNYREQALQGLSEFKAAXVSHCGPGAEEGEQGPGGAGGRQLEPKAGGEASRGRGALIIVAVEQKGLQASRSNAGPVPEXLPRDFPKERPESPLSXGEXPCESPXRGKXPAGNECELPAAPIQGAGDGALQRVAQAAELGRVLVPQAASEEXPSXEEPPGERLRGESRSSGSGERGPEEAPEGGAAAARGQRPRVPALEPPQPPRGLRKGAQEPGKRPXFSKVXSFRKGRPLAXESPGGVPAPXXEGRRWGSSGPEGLPRENPPAAAGRDAPPLHHGDASAWPEFVPQAAGDRXAGPAGAGHXGXSGDLGSRGPSSESCNAKRLKXXEKKLRARLALAHKXFSNFIESIVLEKENXHERSPSSPKGEKEKSRLRQGSWRAFLKSKDAGSPKKPXLVSLPLGPEVLSPAEXDSHCEERAEDKEGYVFSDHWAPPLASXPLSSSLVSPEHRRKSEPXIKCXAXQEGGRYLPSGIFPEKSWLASPGSPRAQQAGIAHXLPSSSACCLAYENPGXPCRPXSPKPLSPRPSAQRMGLHYPGRGSAISMVSLGSYSYVDSSSGDPERPKIPKGQXSFLLSLQXLNQDEQKEESREGGQGPRGLGXVPWLRDLPGSENHMPWEEPAGEKPSCSHSQKAFHMEPAQKPCFXXDMVXWALLCISAEXVRGEAPSQPRGIPHRSPVSVDDLWLEKXQRKKLQKQAHVERRLHIGAVHKDGVKCWRKXIIXSPESLNLPRRSHPLSQSAPXGLNHMGWPEHXPGXAMPDGALDXAVCADEVGSEEDLYDDLHSSSHHYSHPGGGGEQLAINELISDGSVVCAEALWDHVXMDDQELGFKAGDVIEVMDAXNREWWWGRVADGEGWFPASFVRLRVNQDEPADDDAPLAGNSGAEDGGAEAQSSKDQMRXNVINEILSXERDYIKHLRDICEQADFQIYSEYCNNHPNACVELSRLXKLSKYVYFFEACRLLQKMIDISLDGFLLXPVQKICKYPLQLAELLKYXHPQHRDFKDVEAALHAMKNVAQLINERKRRLENIDKIAQWQSSIEDWEGEDLLVRSSELIYSGELXRVXQPQAKSQQRMFFLFDHQLIYCKKDLLRRDVLYYKGRLDMDGLEVVDLEDGKDRDLHVSIKNAFRLHRGAXGDSHLLCXRKPEQKQRWLKAFAREREQVQLDQEXGFSIXELQRKQAMLNASKQQVXGKPKAVGRPCYLXRQKHPALPSNRPQQQVLVLAEPRRKPSXFWHSISRLAPFRK

SEQ ID NO: 3035 - protein, 630 aa, Homo sapiens
  MOD_RES (31)..(32): Selenocysteine
  MOD_RES (36)..(36): Selenocysteine
  MOD_RES (46)..(46): Selenocysteine
  MOD_RES (74)..(74): Selenocysteine
  MOD_RES (105)..(105): Selenocysteine
  MOD_RES (108)..(108): Selenocysteine
  MOD_RES (128)..(128): Selenocysteine
  MOD_RES (139)..(139): Selenocysteine
  MOD_RES (142)..(142): Selenocysteine
  MOD_RES (151)..(151): Selenocysteine
  MOD_RES (207)..(207): Selenocysteine
  MOD_RES (227)..(227): Selenocysteine
  MOD_RES (286)..(286): Selenocysteine
  MOD_RES (295)..(295): Selenocysteine
  MOD_RES (333)..(333): Selenocysteine
  MOD_RES (362)..(362): Selenocysteine
  MOD_RES (381)..(381): Selenocysteine
  MOD_RES (447)..(447): Selenocysteine
  MOD_RES (450)..(450): Selenocysteine
  MOD_RES (520)..(520): Selenocysteine
  MOD_RES (528)..(528): Selenocysteine
  MOD_RES (554)..(554): Selenocysteine
  MOD_RES (559)..(559): Selenocysteine
  MOD_RES (576)..(576): Selenocysteine
  MOD_RES (589)..(589): Selenocysteine
  MOD_RES (617)..(617): Selenocysteine
MPWEEPAGEKPSCSHSQKAFHMEPAQKPCFXXDMVXWALLCISAEXVRGEAPSQPRGIPHRSPVSVDDLWLEKXQRKKLQKQAHVERRLHIGAVHKDGVKCWRKXIIXSPESLNLPRRSHPLSQSAPXGLNHMGWPEHXPGXAMPDGALDXAVCADEVGSEEDLYDDLHSSSHHYSHPGGGGEQLAINELISDGSVVCAEALWDHVXMDDQELGFKAGDVIEVMDAXNREWWWGRVADGEGWFPASFVRLRVNQDEPADDDAPLAGNSGAEDGGAEAQSSKDQMRXNVINEILSXERDYIKHLRDICEQADFQIYSEYCNNHPNACVELSRLXKLSKYVYFFEACRLLQKMIDISLDGFLLXPVQKICKYPLQLAELLKYXHPQHRDFKDVEAALHAMKNVAQLINERKRRLENIDKIAQWQSSIEDWEGEDLLVRSSELIYSGELXRVXQPQAKSQQRMFFLFDHQLIYCKKDLLRRDVLYYKGRLDMDGLEVVDLEDGKDRDLHVSIKNAFRLHRGAXGDSHLLCXRKPEQKQRWLKAFAREREQVQLDQEXGFSIXELQRKQAMLNASKQQVXGKPKAVGRPCYLXRQKHPALPSNRPQQQVLVLAEPRRKPSXFWHSISRLAPFRK

SEQ ID NO: 3036 - protein, 670 aa, Homo sapiens
  MOD_RES (31)..(32): Selenocysteine
  MOD_RES (36)..(36): Selenocysteine
  MOD_RES (46)..(46): Selenocysteine
  MOD_RES (74)..(74): Selenocysteine
  MOD_RES (105)..(105): Selenocysteine
  MOD_RES (108)..(108): Selenocysteine
  MOD_RES (128)..(128): Selenocysteine
  MOD_RES (139)..(139): Selenocysteine
  MOD_RES (142)..(142): Selenocysteine
  MOD_RES (151)..(151): Selenocysteine
  MOD_RES (207)..(207): Selenocysteine
  MOD_RES (227)..(227): Selenocysteine
  MOD_RES (286)..(286): Selenocysteine
  MOD_RES (295)..(295): Selenocysteine
  MOD_RES (328)..(328): Selenocysteine
  MOD_RES (393)..(393): Selenocysteine
  MOD_RES (422)..(422): Selenocysteine
  MOD_RES (441)..(441): Selenocysteine
  MOD_RES (507)..(507): Selenocysteine
  MOD_RES (510)..(510): Selenocysteine
  MOD_RES (580)..(580): Selenocysteine
  MOD_RES (588)..(588): Selenocysteine
  MOD_RES (614)..(614): Selenocysteine
  MOD_RES (619)..(619): Selenocysteine
  MOD_RES (636)..(636): Selenocysteine
  MOD_RES (644)..(644): Selenocysteine
MPWEEPAGEKPSCSHSQKAFHMEPAQKPCFXXDMVXWALLCISAEXVRGEAPSQPRGIPHRSPVSVDDLWLEKXQRKKLQKQAHVERRLHIGAVHKDGVKCWRKXIIXSPESLNLPRRSHPLSQSAPXGLNHMGWPEHXPGXAMPDGALDXAVCADEVGSEEDLYDDLHSSSHHYSHPGGGGEQLAINELISDGSVVCAEALWDHVXMDDQELGFKAGDVIEVMDAXNREWWWGRVADGEGWFPASFVRLRVNQDEPADDDAPLAGNSGAEDGGAEAQSSKDQMRXNVINEILSXERDYIKHLRDICEGYVRQCRKRADMFSEEQLRXIFGNIEDIYRCQKAFVKALEQRFNRERPHLSELGACFLEHQADFQIYSEYCNNHPNACVELSRLXKLSKYVYFFEACRLLQKMIDISLDGFLLXPVQKICKYPLQLAELLKYXHPQHRDFKDVEAALHAMKNVAQLINERKRRLENIDKIAQWQSSIEDWEGEDLLVRSSELIYSGELXRVXQPQAKSQQRMFFLFDHQLIYCKKDLLRRDVLYYKGRLDMDGLEVVDLEDGKDRDLHVSIKNAFRLHRGAXGDSHLLCXRKPEQKQRWLKAFAREREQVQLDQEXGFSIXELQRKQAMLNASKQQVXGKPKGRRXAAPPPRLPGPYPADIIPFSEPQSQAS

SEQ ID NO: 3037 - protein, 690 aa, Homo sapiens
  MOD_RES (31)..(32): Selenocysteine
  MOD_RES (36)..(36): Selenocysteine
  MOD_RES (46)..(46): Selenocysteine
  MOD_RES (74)..(74): Selenocysteine
  MOD_RES (105)..(105): Selenocysteine
  MOD_RES (108)..(108): Selenocysteine
  MOD_RES (128)..(128): Selenocysteine
  MOD_RES (139)..(139): Selenocysteine
  MOD_RES (142)..(142): Selenocysteine
  MOD_RES (151)..(151): Selenocysteine
  MOD_RES (207)..(207): Selenocysteine
  MOD_RES (227)..(227): Selenocysteine
  MOD_RES (286)..(286): Selenocysteine
  MOD_RES (295)..(295): Selenocysteine
  MOD_RES (328)..(328): Selenocysteine
  MOD_RES (393)..(393): Selenocysteine
  MOD_RES (422)..(422): Selenocysteine
  MOD_RES (441)..(441): Selenocysteine
  MOD_RES (507)..(507): Selenocysteine
  MOD_RES (510)..(510): Selenocysteine
  MOD_RES (580)..(580): Selenocysteine
  MOD_RES (588)..(588): Selenocysteine
  MOD_RES (614)..(614): Selenocysteine
  MOD_RES (619)..(619): Selenocysteine
  MOD_RES (636)..(636): Selenocysteine
  MOD_RES (649)..(649): Selenocysteine
  MOD_RES (677)..(677): Selenocysteine
MPWEEPAGEKPSCSHSQKAFHMEPAQKPCFXXDMVXWALLCISAEXVRGEAPSQPRGIPHRSPVSVDDLWLEKXQRKKLQKQAHVERRLHIGAVHKDGVKCWRKXIIXSPESLNLPRRSHPLSQSAPXGLNHMGWPEHXPGXAMPDGALDXAVCADEVGSEEDLYDDLHSSSHHYSHPGGGGEQLAINELISDGSVVCAEALWDHVXMDDQELGFKAGDVIEVMDAXNREWWWGRVADGEGWFPASFVRLRVNQDEPADDDAPLAGNSGAEDGGAEAQSSKDQMRXNVINEILSXERDYIKHLRDICEGYVRQCRKRADMFSEEQLRXIFGNIEDIYRCQKAFVKALEQRFNRERPHLSELGACFLEHQADFQIYSEYCNNHPNACVELSRLXKLSKYVYFFEACRLLQKMIDISLDGFLLXPVQKICKYPLQLAELLKYXHPQHRDFKDVEAALHAMKNVAQLINERKRRLENIDKIAQWQSSIEDWEGEDLLVRSSELIYSGELXRVXQPQAKSQQRMFFLFDHQLIYCKKDLLRRDVLYYKGRLDMDGLEVVDLEDGKDRDLHVSIKNAFRLHRGAXGDSHLLCXRKPEQKQRWLKAFAREREQVQLDQEXGFSIXELQRKQAMLNASKQQVXGKPKAVGRPCYLXRQKHPALPSNRPQQQVLVLAEPRRKPSXFWHSISRLAPFRK

SEQ ID NO: 3038 - protein, 192 aa, Homo sapiens
  MOD_RES (31)..(32): Selenocysteine
  MOD_RES (36)..(36): Selenocysteine
  MOD_RES (46)..(46): Selenocysteine
  MOD_RES (74)..(74): Selenocysteine
  MOD_RES (105)..(105): Selenocysteine
  MOD_RES (108)..(108): Selenocysteine
  MOD_RES (128)..(128): Selenocysteine
  MOD_RES (139)..(139): Selenocysteine
  MOD_RES (142)..(142): Selenocysteine
  MOD_RES (151)..(151): Selenocysteine
  MOD_RES (179)..(179): Selenocysteine
MPWEEPAGEKPSCSHSQKAFHMEPAQKPCFXXDMVXWALLCISAEXVRGEAPSQPRGIPHRSPVSVDDLWLEKXQRKKLQKQAHVERRLHIGAVHKDGVKCWRKXIIXSPESLNLPRRSHPLSQSAPXGLNHMGWPEHXPGXAVGRPCYLXRQKHPALPSNRPQQQVLVLAEPRRKPSXFWHSISRLAPFRK

SEQ ID NO: 3039 - protein, 517 aa, Homo sapiens
  MOD_RES (18)..(18): Selenocysteine
  MOD_RES (28)..(28): Selenocysteine
  MOD_RES (84)..(84): Selenocysteine
  MOD_RES (104)..(104): Selenocysteine
  MOD_RES (163)..(163): Selenocysteine
  MOD_RES (172)..(172): Selenocysteine
  MOD_RES (205)..(205): Selenocysteine
  MOD_RES (270)..(270): Selenocysteine
  MOD_RES (299)..(299): Selenocysteine
  MOD_RES (318)..(318): Selenocysteine
  MOD_RES (384)..(384): Selenocysteine
  MOD_RES (387)..(387): Selenocysteine
  MOD_RES (457)..(457): Selenocysteine
  MOD_RES (465)..(465): Selenocysteine
  MOD_RES (491)..(491): Selenocysteine
  MOD_RES (496)..(496): Selenocysteine
  MOD_RES (513)..(513): Selenocysteine
MRGAVSRSWSLESLRSAXAAMPDGALDXAVCADEVGSEEDLYDDLHSSSHHYSHPGGGGEQLAINELISDGSVVCAEALWDHVXMDDQELGFKAGDVIEVMDAXNREWWWGRVADGEGWFPASFVRLRVNQDEPADDDAPLAGNSGAEDGGAEAQSSKDQMRXNVINEILSXERDYIKHLRDICEGYVRQCRKRADMFSEEQLRXIFGNIEDIYRCQKAFVKALEQRFNRERPHLSELGACFLEHQADFQIYSEYCNNHPNACVELSRLXKLSKYVYFFEACRLLQKMIDISLDGFLLXPVQKICKYPLQLAELLKYXHPQHRDFKDVEAALHAMKNVAQLINERKRRLENIDKIAQWQSSIEDWEGEDLLVRSSELIYSGELXRVXQPQAKSQQRMFFLFDHQLIYCKKDLLRRDVLYYKGRLDMDGLEVVDLEDGKDRDLHVSIKNAFRLHRGAXGDSHLLCXRKPEQKQRWLKAFAREREQVQLDQEXGFSIXELQRKQAMLNASKQQVXGKPK

SEQ ID NO: 3040 - protein, 619 aa, Homo sapiens
  MOD_RES (38)..(38): Selenocysteine
  MOD_RES (68)..(68): Selenocysteine
  MOD_RES (70)..(70): Selenocysteine
  MOD_RES (80)..(80): Selenocysteine
  MOD_RES (136)..(136): Selenocysteine
  MOD_RES (156)..(156): Selenocysteine
  MOD_RES (215)..(215): Selenocysteine
  MOD_RES (224)..(224): Selenocysteine
  MOD_RES (257)..(257): Selenocysteine
  MOD_RES (322)..(322): Selenocysteine
  MOD_RES (351)..(351): Selenocysteine
  MOD_RES (370)..(370): Selenocysteine
  MOD_RES (436)..(436): Selenocysteine
  MOD_RES (439)..(439): Selenocysteine
  MOD_RES (509)..(509): Selenocysteine
  MOD_RES (517)..(517): Selenocysteine
  MOD_RES (543)..(543): Selenocysteine
  MOD_RES (548)..(548): Selenocysteine
  MOD_RES (565)..(565): Selenocysteine
  MOD_RES (578)..(578): Selenocysteine
  MOD_RES (606)..(606): Selenocysteine
MRPDGQQALDAVVRSFDCHSEAALRQRNDVIYCSLPRXAQGIVQREDQLEVLVSLREVWGRRRGRDGXCXGAMPDGALDXAVCADEVGSEEDLYDDLHSSSHHYSHPGGGGEQLAINELISDGSVVCAEALWDHVXMDDQELGFKAGDVIEVMDAXNREWWWGRVADGEGWFPASFVRLRVNQDEPADDDAPLAGNSGAEDGGAEAQSSKDQMRXNVINEILSXERDYIKHLRDICEGYVRQCRKRADMFSEEQLRXIFGNIEDIYRCQKAFVKALEQRFNRERPHLSELGACFLEHQADFQIYSEYCNNHPNACVELSRLXKLSKYVYFFEACRLLQKMIDISLDGFLLXPVQKICKYPLQLAELLKYXHPQHRDFKDVEAALHAMKNVAQLINERKRRLENIDKIAQWQSSIEDWEGEDLLVRSSELIYSGELXRVXQPQAKSQQRMFFLFDHQLIYCKKDLLRRDVLYYKGRLDMDGLEVVDLEDGKDRDLHVSIKNAFRLHRGAXGDSHLLCXRKPEQKQRWLKAFAREREQVQLDQEXGFSIXELQRKQAMLNASKQQVXGKPKAVGRPCYLXRQKHPALPSNRPQQQVLVLAEPRRKPSXFWHSISRLAPFRK

SEQ ID NO: 3041 - protein, 372 aa, Homo sapiens
  MOD_RES (5)..(5): Selenocysteine
  MOD_RES (23)..(23): Selenocysteine
  MOD_RES (27)..(27): Selenocysteine
  MOD_RES (29)..(29): Selenocysteine
  MOD_RES (63)..(63): Selenocysteine
  MOD_RES (79)..(79): Selenocysteine
  MOD_RES (84)..(84): Selenocysteine
  MOD_RES (137)..(137): Selenocysteine
  MOD_RES (145)..(145): Selenocysteine
  MOD_RES (167)..(167): Selenocysteine
  MOD_RES (211)..(212): Selenocysteine
  MOD_RES (216)..(216): Selenocysteine
  MOD_RES (226)..(226): Selenocysteine
  MOD_RES (254)..(254): Selenocysteine
  MOD_RES (285)..(285): Selenocysteine
  MOD_RES (288)..(288): Selenocysteine
  MOD_RES (308)..(308): Selenocysteine
  MOD_RES (319)..(319): Selenocysteine
  MOD_RES (322)..(322): Selenocysteine
  MOD_RES (331)..(331): Selenocysteine
  MOD_RES (359)..(359): Selenocysteine
PLASXPLSSSLVSPEHRRKSEPXIKCXAXQEGGRYLPSGIFPEKSWLASPGSPRAQQAGIAHXLPSSSACCLAYENPGXPCRPXSPKPLSPRPSAQRMGLHYPGRGSAISMVSLGSYSYVDSSSGDPERPKIPKGQXSFLLSLQXLNQDEQKEESREGGQGPRGLGXVPWLRDLPGSENHMPWEEPAGEKPSCSHSQKAFHMEPAQKPCFXXDMVXWALLCISAEXVRGEAPSQPRGIPHRSPVSVDDLWLEKXQRKKLQKQAHVERRLHIGAVHKDGVKCWRKXIIXSPESLNLPRRSHPLSQSAPXGLNHMGWPEHXPGXAVGRPCYLXRQKHPALPSNRPQQQVLVLAEPRRKPSXFWHSISRLAPFRK

SEQ ID NO: 3042 - protein, 287 aa, Homo sapiens
  MOD_RES (1)..(1): Any amino acid
  MOD_RES (10)..(10): Selenocysteine
  MOD_RES (39)..(39): Selenocysteine
  MOD_RES (58)..(58): Selenocysteine
  MOD_RES (124)..(124): Selenocysteine
  MOD_RES (127)..(127): Selenocysteine
  MOD_RES (197)..(197): Selenocysteine
  MOD_RES (205)..(205): Selenocysteine
  MOD_RES (231)..(231): Selenocysteine
  MOD_RES (236)..(236): Selenocysteine
  MOD_RES (253)..(253): Selenocysteine
  MOD_RES (261)..(261): Selenocysteine
XACVELSRLXKLSKYVYFFEACRLLQKMIDISLDGFLLXPVQKICKYPLQLAELLKYXHPQHRDFKDVEAALHAMKNVAQLINERKRRLENIDKIAQWQSSIEDWEGEDLLVRSSELIYSGELXRVXQPQAKSQQRMFFLFDHQLIYCKKDLLRRDVLYYKGRLDMDGLEVVDLEDGKDRDLHVSIKNAFRLHRGAXGDSHLLCXRKPEQKQRWLKAFAREREQVQLDQEXGFSIXELQRKQAMLNASKQQVXGKPKGRRXAAPPPRLPGPYPADIIPFSEPQSQAS

SEQ ID NO: 3043 - protein, 695 aa, Homo sapiens
  MOD_RES (1)..(1): Any amino acid
  MOD_RES (12)..(12): Selenocysteine
  MOD_RES (56)..(57): Selenocysteine
  MOD_RES (61)..(61): Selenocysteine
  MOD_RES (71)..(71): Selenocysteine
  MOD_RES (99)..(99): Selenocysteine
  MOD_RES (130)..(130): Selenocysteine
  MOD_RES (133)..(133): Selenocysteine
  MOD_RES (153)..(153): Selenocysteine
  MOD_RES (164)..(164): Selenocysteine
  MOD_RES (167)..(167): Selenocysteine
  MOD_RES (176)..(176): Selenocysteine
  MOD_RES (232)..(232): Selenocysteine
  MOD_RES (252)..(252): Selenocysteine
  MOD_RES (311)..(311): Selenocysteine
  MOD_RES (320)..(320): Selenocysteine
  MOD_RES (353)..(353): Selenocysteine
  MOD_RES (418)..(418): Selenocysteine
  MOD_RES (447)..(447): Selenocysteine
  MOD_RES (466)..(466): Selenocysteine
  MOD_RES (532)..(532): Selenocysteine
  MOD_RES (535)..(535): Selenocysteine
  MOD_RES (605)..(605): Selenocysteine
  MOD_RES (613)..(613): Selenocysteine
  MOD_RES (639)..(639): Selenocysteine
  MOD_RES (644)..(644): Selenocysteine
  MOD_RES (661)..(661): Selenocysteine
  MOD_RES (669)..(669): Selenocysteine
XEGGQGPRGLGXVPWLRDLPGSENHMPWEEPAGEKPSCSHSQKAFHMEPAQKPCFXXDMVXWALLCISAEXVRGEAPSQPRGIPHRSPVSVDDLWLEKXQRKKLQKQAHVERRLHIGAVHKDGVKCWRKXIIXSPESLNLPRRSHPLSQSAPXGLNHMGWPEHXPGXAMPDGALDXAVCADEVGSEEDLYDDLHSSSHHYSHPGGGGEQLAINELISDGSVVCAEALWDHVXMDDQELGFKAGDVIEVMDAXNREWWWGRVADGEGWFPASFVRLRVNQDEPADDDAPLAGNSGAEDGGAEAQSSKDQMRXNVINEILSXERDYIKHLRDICEGYVRQCRKRADMFSEEQLRXIFGNIEDIYRCQKAFVKALEQRFNRERPHLSELGACFLEHQADFQIYSEYCNNHPNACVELSRLXKLSKYVYFFEACRLLQKMIDISLDGFLLXPVQKICKYPLQLAELLKYXHPQHRDFKDVEAALHAMKNVAQLINERKRRLENIDKIAQWQSSIEDWEGEDLLVRSSELIYSGELXRVXQPQAKSQQRMFFLFDHQLIYCKKDLLRRDVLYYKGRLDMDGLEVVDLEDGKDRDLHVSIKNAFRLHRGAXGDSHLLCXRKPEQKQRWLKAFAREREQVQLDQEXGFSIXELQRKQAMLNASKQQVXGKPKGRRXAAPPPRLPGPYPADIIPFSEPQSQAS

SEQ ID NO: 3044 - protein, 142 aa, Homo sapiens
  MOD_RES (1)..(1): Any amino acid
  MOD_RES (14)..(14): Selenocysteine
  MOD_RES (29)..(29): Selenocysteine
  MOD_RES (67)..(67): Selenocysteine
  MOD_RES (83)..(83): Selenocysteine
  MOD_RES (110)..(110): Selenocysteine
  MOD_RES (128)..(128): Selenocysteine
  MOD_RES (132)..(132): Selenocysteine
  MOD_RES (134)..(134): Selenocysteine
XKKLRARLALAHKXFSNFIESIVLEKENXHERSPSSPKGEKEKSRLRQGSWRAFLKSKDAGSPKKPXLVSLPLGPEVLSPAEXDSHCEERAEDKEGYVFSDHWAPPLASXPLSSSLVSPEHRRKSEPXIKCXAXQEGDAKPR

SEQ ID NO: 3045 - protein, 502 aa, Homo sapiens
  MOD_RES (13)..(13): Selenocysteine
  MOD_RES (24)..(24): Selenocysteine
  MOD_RES (27)..(27): Selenocysteine
  MOD_RES (39)..(39): Selenocysteine
  MOD_RES (48)..(48): Selenocysteine
  MOD_RES (146)..(146): Selenocysteine
  MOD_RES (159)..(159): Selenocysteine
  MOD_RES (164)..(164): Selenocysteine
  MOD_RES (200)..(200): Selenocysteine
  MOD_RES (224)..(224): Selenocysteine
  MOD_RES (249)..(249): Selenocysteine
  MOD_RES (257)..(257): Selenocysteine
  MOD_RES (270)..(270): Selenocysteine
  MOD_RES (273)..(273): Selenocysteine
  MOD_RES (312)..(312): Selenocysteine
  MOD_RES (371)..(371): Selenocysteine
  MOD_RES (375)..(375): Selenocysteine
  MOD_RES (423)..(423): Selenocysteine
  MOD_RES (432)..(432): Selenocysteine
  MOD_RES (434)..(434): Selenocysteine
  MOD_RES (439)..(439): Selenocysteine
  MOD_RES (476)..(476): Selenocysteine
  MOD_RES (499)..(499): Selenocysteine
MEPEPVEDCVQSXLAALYPPFEAXAPXLLGQVFQVVERXYREDALRYXLDFLVPAKHLLAKVQQEACAQYSGFLFFHEGWPLCLHEQVVVQLAALPWQLLRPGDFYLQVVPSAAQAPRLALKCLAPGGGRVQEVPVPNEACAYLFXPEWLQGINKDRPXGRLSXCLLSAPSGIQRLPWAELICPRFVHKEGLMVGHQPSXLPPELPSGPPGLPSPPLPEEALGXRSPGDGHNAPVEGPEGEYVELLEVXLPVRGSPXDAEGSPGLSRVRXVPXRKGAGGKGRHRRHRAWMHQKGLGPRGQDGARPPGEGSSXGASPESPPGAEAVPEAAVLEVSEPPAEAVGEASGSCPLRPGELRGGGGGGQGAEGPPGXPRRXGKGNRRKKRAAGRGALSRGGDSAPLSPGDKEDASHQEALGNLPSPRHXGPEGPLSDXPXPPLEXVQEGKGDNIPEEALAVSVSDHPDVAWDLMASGFLILXAWPFCVFRRGGPEWASSADHYPXVPS

SEQ ID NO: 3046 - protein, 557 aa, Homo sapiens
  MOD_RES (13)..(13): Selenocysteine
  MOD_RES (24)..(24): Selenocysteine
  MOD_RES (27)..(27): Selenocysteine
  MOD_RES (39)..(39): Selenocysteine
  MOD_RES (48)..(48): Selenocysteine
  MOD_RES (146)..(146): Selenocysteine
  MOD_RES (159)..(159): Selenocysteine
  MOD_RES (164)..(164): Selenocysteine
  MOD_RES (200)..(200): Selenocysteine
  MOD_RES (224)..(224): Selenocysteine
  MOD_RES (249)..(249): Selenocysteine
  MOD_RES (257)..(257): Selenocysteine
  MOD_RES (270)..(270): Selenocysteine
  MOD_RES (273)..(273): Selenocysteine
  MOD_RES (312)..(312): Selenocysteine
  MOD_RES (371)..(371): Selenocysteine
  MOD_RES (375)..(375): Selenocysteine
  MOD_RES (450)..(450): Selenocysteine
  MOD_RES (465)..(465): Selenocysteine
  MOD_RES (486)..(486): Selenocysteine
  MOD_RES (495)..(495): Selenocysteine
  MOD_RES (497)..(497): Selenocysteine
  MOD_RES (502)..(502): Selenocysteine
  MOD_RES (539)..(539): Selenocysteine
MEPEPVEDCVQSXLAALYPPFEAXAPXLLGQVFQVVERXYREDALRYXLDFLVPAKHLLAKVQQEACAQYSGFLFFHEGWPLCLHEQVVVQLAALPWQLLRPGDFYLQVVPSAAQAPRLALKCLAPGGGRVQEVPVPNEACAYLFXPEWLQGINKDRPXGRLSXCLLSAPSGIQRLPWAELICPRFVHKEGLMVGHQPSXLPPELPSGPPGLPSPPLPEEALGXRSPGDGHNAPVEGPEGEYVELLEVXLPVRGSPXDAEGSPGLSRVRXVPXRKGAGGKGRHRRHRAWMHQKGLGPRGQDGARPPGEGSSXGASPESPPGAEAVPEAAVLEVSEPPAEAVGEASGSCPLRPGELRGGGGGGQGAEGPPGXPRRXGKGNRRKKRAAGRGALSRGGDSAPLSPGDKEDASHQEALGNLPSPSEHKLPECHLVKEEYEGSGKPESEPKELKXAGEKEPQLSEACGPXEEGAGERELEGPGLLCMAGHXGPEGPLSDXPXPPLEXVQEGKGDNIPEEALAVSVSDHPDVAWDLMASGFLILXGQWASVGEGKQDWEREAI

SEQ ID NO: 3047 - protein, 620 aa, Homo sapiens
  MOD_RES (13)..(13): Selenocysteine
  MOD_RES (24)..(24): Selenocysteine
  MOD_RES (27)..(27): Selenocysteine
  MOD_RES (39)..(39): Selenocysteine
  MOD_RES (48)..(48): Selenocysteine
  MOD_RES (146)..(146): Selenocysteine
  MOD_RES (159)..(159): Selenocysteine
  MOD_RES (164)..(164): Selenocysteine
  MOD_RES (200)..(200): Selenocysteine
  MOD_RES (224)..(224): Selenocysteine
  MOD_RES (249)..(249): Selenocysteine
  MOD_RES (257)..(257): Selenocysteine
  MOD_RES (270)..(270): Selenocysteine
  MOD_RES (273)..(273): Selenocysteine
  MOD_RES (312)..(312): Selenocysteine
  MOD_RES (371)..(371): Selenocysteine
  MOD_RES (375)..(375): Selenocysteine
  MOD_RES (450)..(450): Selenocysteine
  MOD_RES (465)..(465): Selenocysteine
  MOD_RES (486)..(486): Selenocysteine
  MOD_RES (495)..(495): Selenocysteine
  MOD_RES (497)..(497): Selenocysteine
  MOD_RES (502)..(502): Selenocysteine
  MOD_RES (539)..(539): Selenocysteine
  MOD_RES (551)..(551): Selenocysteine
  MOD_RES (553)..(553): Selenocysteine
  MOD_RES (567)..(567): Selenocysteine
  MOD_RES (570)..(571): Selenocysteine
  MOD_RES (585)..(585): Selenocysteine
MEPEPVEDCVQSXLAALYPPFEAXAPXLLGQVFQVVERXYREDALRYXLDFLVPAKHLLAKVQQEACAQYSGFLFFHEGWPLCLHEQVVVQLAALPWQLLRPGDFYLQVVPSAAQAPRLALKCLAPGGGRVQEVPVPNEACAYLFXPEWLQGINKDRPXGRLSXCLLSAPSGIQRLPWAELICPRFVHKEGLMVGHQPSXLPPELPSGPPGLPSPPLPEEALGXRSPGDGHNAPVEGPEGEYVELLEVXLPVRGSPXDAEGSPGLSRVRXVPXRKGAGGKGRHRRHRAWMHQKGLGPRGQDGARPPGEGSSXGASPESPPGAEAVPEAAVLEVSEPPAEAVGEASGSCPLRPGELRGGGGGGQGAEGPPGXPRRXGKGNRRKKRAAGRGALSRGGDSAPLSPGDKEDASHQEALGNLPSPSEHKLPECHLVKEEYEGSGKPESEPKELKXAGEKEPQLSEACGPXEEGAGERELEGPGLLCMAGHXGPEGPLSDXPXPPLEXVQEGKGDNIPEEALAVSVSDHPDVAWDLMASGFLILXGGVDQSGRALLXIXPPCPPEEPPPSRDXLNXXLHYLHSLLRPDLQXLGLSVLLDLRQAPPLPPALIPALSQLQFRVILFCP

SEQ ID NO: 3048 - protein, 1519 aa, Homo sapiens
  MOD_RES (13)..(13): Selenocysteine
  MOD_RES (24)..(24): Selenocysteine
  MOD_RES (27)..(27): Selenocysteine
  MOD_RES (39)..(39): Selenocysteine
  MOD_RES (48)..(48): Selenocysteine
  MOD_RES (146)..(146): Selenocysteine
  MOD_RES (159)..(159): Selenocysteine
  MOD_RES (164)..(164): Selenocysteine
  MOD_RES (200)..(200): Selenocysteine
  MOD_RES (224)..(224): Selenocysteine
  MOD_RES (249)..(249): Selenocysteine
  MOD_RES (257)..(257): Selenocysteine
  MOD_RES (270)..(270): Selenocysteine
  MOD_RES (273)..(273): Selenocysteine
  MOD_RES (312)..(312): Selenocysteine
  MOD_RES (371)..(371): Selenocysteine
  MOD_RES (375)..(375): Selenocysteine
  MOD_RES (450)..(450): Selenocysteine
  MOD_RES (465)..(465): Selenocysteine
  MOD_RES (486)..(486): Selenocysteine
  MOD_RES (495)..(495): Selenocysteine
  MOD_RES (497)..(497): Selenocysteine
  MOD_RES (502)..(502): Selenocysteine
  MOD_RES (539)..(539): Selenocysteine
  MOD_RES (551)..(551): Selenocysteine
  MOD_RES (553)..(553): Selenocysteine
  MOD_RES (567)..(567): Selenocysteine
  MOD_RES (570)..(571): Selenocysteine
  MOD_RES (585)..(585): Selenocysteine
  MOD_RES (633)..(633): Selenocysteine
  MOD_RES (729)..(729): Selenocysteine
  MOD_RES (745)..(745): Selenocysteine
  MOD_RES (757)..(757): Selenocysteine
  MOD_RES (813)..(813): Selenocysteine
  MOD_RES (820)..(820): Selenocysteine
  MOD_RES (849)..(849): Selenocysteine
  MOD_RES (918)..(918): Selenocysteine
  MOD_RES (1043)..(1043): Selenocysteine
  MOD_RES (1045)..(1045): Selenocysteine
  MOD_RES (1051)..(1051): Selenocysteine
  MOD_RES (1074)..(1074): Selenocysteine
  MOD_RES (1103)..(1103): Selenocysteine
  MOD_RES (1116)..(1116): Selenocysteine
  MOD_RES (1122)..(1122): Selenocysteine
  MOD_RES (1139)..(1139): Selenocysteine
  MOD_RES (1150)..(1150): Selenocysteine
  MOD_RES (1212)..(1212): Selenocysteine
  MOD_RES (1279)..(1279): Selenocysteine
  MOD_RES (1321)..(1321): Selenocysteine
  MOD_RES (1327)..(1327): Selenocysteine
  MOD_RES (1351)..(1351): Selenocysteine
  MOD_RES (1355)..(1355): Selenocysteine
  MOD_RES (1364)..(1364): Selenocysteine
  MOD_RES (1406)..(1406): Selenocysteine
  MOD_RES (1412)..(1412): Selenocysteine
  MOD_RES (1418)..(1418): Selenocysteine
  MOD_RES (1466)..(1466): Selenocysteine
  MOD_RES (1492)..(1492): Selenocysteine
  MOD_RES (1494)..(1494): Selenocysteine
  MOD_RES (1516)..(1517): Selenocysteine
MEPEPVEDCVQSXLAALYPPFEAXAPXLLGQVFQVVERXYREDALRYXLDFLVPAKHLLAKVQQEACAQYSGFLFFHEGWPLCLHEQVVVQLAALPWQLLRPGDFYLQVVPSAAQAPRLALKCLAPGGGRVQEVPVPNEACAYLFXPEWLQGINKDRPXGRLSXCLLSAPSGIQRLPWAELICPRFVHKEGLMVGHQPSXLPPELPSGPPGLPSPPLPEEALGXRSPGDGHNAPVEGPEGEYVELLEVXLPVRGSPXDAEGSPGLSRVRXVPXRKGAGGKGRHRRHRAWMHQKGLGPRGQDGARPPGEGSSXGASPESPPGAEAVPEAAVLEVSEPPAEAVGEASGSCPLRPGELRGGGGGGQGAEGPPGXPRRXGKGNRRKKRAAGRGALSRGGDSAPLSPGDKEDASHQEALGNLPSPSEHKLPECHLVKEEYEGSGKPESEPKELKXAGEKEPQLSEACGPXEEGAGERELEGPGLLCMAGHXGPEGPLSDXPXPPLEXVQEGKGDNIPEEALAVSVSDHPDVAWDLMASGFLILXGGVDQSGRALLXIXPPCPPEEPPPSRDXLNXXLHYLHSLLRPDLQXLGLSVLLDLRQAPPLPPALIPALSQLQDSGDPPLVQRLLILIHDDLPXELCGFQGAEVLSENDLKRVAKPEELQWELGGHRDPSPSHWVEIHQEVVRLCRLCQGVLGSVRQAIEELEGAAEPEEEEAVGMPKPLQKVLADPRLXALQRDGGAILMRLRSXPSSKLEGQGPAXLYQEVDEAIHQLVRLSNLHVQQQEQRQCLRRLQQVLQWLSGPGEEQLASFAMPGDXLSALQEXELRFRAFSAEVQERLAQAREALALEENAXSQKVLDIFEQRLEQVESGLHRALRLQRFFQQAHEWVDEGFARLAGAGPGREAVLAALALRRAPEPSAGXFQEMRALALDLGSPAALREWGRCQARCQELERRIQQHVGEEASPRGYRRRRADGASSGGAQWGPRSPSPSLSSLLLPSSPGPRPAPSHCSLAPCGEDYEEEGPELAPEAEGRPPRAVLIRGLEVXSXEVVDRXCSPREHVLLGRARGPDGPWGVGXPRMERKRSISAQQRLVSELIACEQDYVAXLSEPVPPPGPELXPELRGXWAAALSARERLRSFHRXHFLRELQGCAXHPLRIGACFLRHGDQFSLYAQYVKHRHKLENGLAALSPLSKGSMEAGPYLPRALQQPLEQLXRYGRLLEELLREAGPELSSECRALGAAVQLLREQEARGRDLLAVEAVRGCEIDLKEQGQLLHRDPFXVICGRKKCLRHVFLFEHLLLFSKLKGPEGGSEMFVYKQAFKXADMGLXENIGDSGLCFELWFRRRRAREAYXLQAXSPEIKLKWXSSIAQLLWRQAAHNKELRVQQMVSMGIGNKPFLDIKALGERXLSALLXGRAARXRASVAVSSFEHAGPSLPGLSPGACSLPARVEEEAWDLDVKQISLAPEXLDSSGDVSPGPRNSPSLQPPHPGSSXPXLASRGILGLSRQSHARALSDPXXPL

SEQ ID NO: 3049 - protein, 181 aa, Homo sapiens
  MOD_RES (59)..(59): Selenocysteine
  MOD_RES (77)..(77): Selenocysteine
  MOD_RES (131)..(131): Selenocysteine
  MOD_RES (173)..(173): Selenocysteine
  MOD_RES (179)..(179): Selenocysteine
MEAEEAQRGASPPISAIEEFSIIPEAPMRSSQVSALGLEAQEDEDPSYKWREEHRLSAXQQNSRGPAVEKHPGPSDXVVFREKKPKEVMGGFSRRCSKLINSSQLLYQEYSDVVLNKEIQSQQRLESLSEXPGPSSPRQPRKALVSSESYLQRLSMASSGSLWQEIPVVRNSXVLLSMXHE

SEQ ID NO: 3050 - protein, 1597 aa, Homo sapiens
  MOD_RES (59)..(59): Selenocysteine
  MOD_RES (74)..(74): Selenocysteine
  MOD_RES (100)..(100): Selenocysteine
  MOD_RES (118)..(118): Selenocysteine
  MOD_RES (157)..(157): Selenocysteine
  MOD_RES (160)..(160): Selenocysteine
  MOD_RES (172)..(172): Selenocysteine
  MOD_RES (180)..(180): Selenocysteine
  MOD_RES (193)..(193): Selenocysteine
  MOD_RES (203)..(203): Selenocysteine
  MOD_RES (245)..(245): Selenocysteine
  MOD_RES (294)..(294): Selenocysteine
  MOD_RES (347)..(347): Selenocysteine
  MOD_RES (356)..(356): Selenocysteine
  MOD_RES (430)..(430): Selenocysteine
  MOD_RES (435)..(435): Selenocysteine
  MOD_RES (437)..(437): Selenocysteine
  MOD_RES (471)..(471): Selenocysteine
  MOD_RES (494)..(494): Selenocysteine
  MOD_RES (500)..(500): Selenocysteine
  MOD_RES (510)..(510): Selenocysteine
  MOD_RES (514)..(514): Selenocysteine
  MOD_RES (529)..(529): Selenocysteine
  MOD_RES (546)..(546): Selenocysteine
  MOD_RES (555)..(555): Selenocysteine
  MOD_RES (570)..(570): Selenocysteine
  MOD_RES (584)..(584): Selenocysteine
  MOD_RES (586)..(586): Selenocysteine
  MOD_RES (596)..(596): Selenocysteine
  MOD_RES (598)..(598): Selenocysteine
  MOD_RES (613)..(613): Selenocysteine
  MOD_RES (616)..(616): Selenocysteine
  MOD_RES (645)..(645): Selenocysteine
  MOD_RES (658)..(658): Selenocysteine
  MOD_RES (664)..(664): Selenocysteine
  MOD_RES (668)..(668): Selenocysteine
  MOD_RES (702)..(702): Selenocysteine
  MOD_RES (735)..(735): Selenocysteine
  MOD_RES (742)..(742): Selenocysteine
  MOD_RES (752)..(752): Selenocysteine
  MOD_RES (794)..(794): Selenocysteine
  MOD_RES (804)..(804): Selenocysteine
  MOD_RES (816)..(816): Selenocysteine
  MOD_RES (849)..(849): Selenocysteine
  MOD_RES (865)..(865): Selenocysteine
  MOD_RES (878)..(878): Selenocysteine
  MOD_RES (886)..(886): Selenocysteine
  MOD_RES (896)..(896): Selenocysteine
  MOD_RES (902)..(902): Selenocysteine
  MOD_RES (906)..(906): Selenocysteine
  MOD_RES (910)..(910): Selenocysteine
  MOD_RES (912)..(912): Selenocysteine
  MOD_RES (929)..(929): Selenocysteine
  MOD_RES (938)..(939): Selenocysteine
  MOD_RES (942)..(942): Selenocysteine
  MOD_RES (949)..(949): Selenocysteine
  MOD_RES (971)..(972): Selenocysteine
  MOD_RES (1067)..(1067): Selenocysteine
  MOD_RES (1121)..(1121): Selenocysteine
  MOD_RES (1163)..(1163): Selenocysteine
  MOD_RES (1169)..(1169): Selenocysteine
  MOD_RES (1204)..(1204): Selenocysteine
  MOD_RES (1209)..(1209): Selenocysteine
  MOD_RES (1231)..(1231): Selenocysteine
  MOD_RES (1269)..(1269): Selenocysteine
  MOD_RES (1272)..(1272): Selenocysteine
  MOD_RES (1277)..(1277): Selenocysteine
  MOD_RES (1318)..(1318): Selenocysteine
  MOD_RES (1331)..(1331): Selenocysteine
  MOD_RES (1342)..(1342): Selenocysteine
  MOD_RES (1365)..(1365): Selenocysteine
  MOD_RES (1398)..(1398): Selenocysteine
  MOD_RES (1414)..(1414): Selenocysteine
  MOD_RES (1473)..(1473): Selenocysteine
  MOD_RES (1484)..(1484): Selenocysteine
  MOD_RES (1486)..(1486): Selenocysteine
  MOD_RES (1540)..(1540): Selenocysteine
  MOD_RES (1587)..(1587): Selenocysteine
MEAEEAQRGASPPISAIEEFSIIPEAPMRSSQVSALGLEAQEDEDPSYKWREEHRLSAXQQSELRDVCDYAIEXMPSFPKEGSADVEPNQESLVAEACDXPEHWEAVPQSLAGRQARXLAPPELWACPIQSEHLDMAPFSSDLGSEEEEVEFWPGLXSLXLGSGQAEEEEEXSSDNSGQXRYYSPCEEHPAEXNQNEGSESGXIRQGEELPPEELQESQGLLHPQEVQVLEEQGQQEAGFRGEGXLREDVCADGLLGEEQMIEQVNDEKGEQKQKQEQVQDVMLGRQGERMGLXGEPEGLNDGEWEQEDMERKAQGQGGPEQGEERKRELQVPEENRADSQDEKSQXFLGKSEEVXGKQEDHGIKEKGVPVSGQEAKEPESWDGGRLGAVGRARSREEENEHHGPSMPALIAPEDSPHCDLFPGASYLMXQIPGXQXESRAEELSPAALSPSLEPIRCSHQPISLLGSFLXEESPDKEIDQNSQQEESRLRKGXVSSQGXEVVFASASVXPPRXPDSAPPSPAEAYPIXPASVSARPPVAFPRREXSCAARAPEXASAPLSMDDPSPCGXSEMCPAALYGFPSXGXSPPRPPANSXGXVQHLRSDSFPGSHRXEQXPDLVGMLLSYSHSELPQRPPKPAIYSSVXPRRDRRSGRDYSXVSASPXALSXLKQDSQESISNLERPSSPPSIQPWVSPHNPAFAXESPAYGSSPSFVSMEDVRIHEPLPPPPPQRRDXHPSVVEXDGHARVVVPXLKQHSHPPPLALGSGLHAPHKGPLPQASDPAVARQHRPLPSXPDSSHHAQAXPRWRYNKPLPPXPDLPQPHLPPISAPGSSRIYRPLPPLPIIDPPXEPPPLPPKSRGRSRSXRGGHMNSGGHAKXRPACQDWXVPLPASAGRXSWPPAXARSXESFXSXSRSKSEVSPGMAFSNMXNFLCPSSPXXPWXPELQGPXSKDEAGVSEHPEAPAREPLRRXXPQQGASGPGRSPVGQARQPEKPSHLHLEKASSWPHRRDSGRPPGDSSGQAVAPSEGANKHKGWSRQGLRRPSILPEGSSDSRGPAVEKHPGPSDXVVFREKKPKEVMGGFSRRCSKLINSSQLLYQEYSDVVLNKEIQSQQRLESLSEXPGPSSPRQPRKALVSSESYLQRLSMASSGSLWQEIPVVRNSXVLLSMXHEDQKLQEVKFELIVSEASYLRSLNIAVDHFQLSXSLRAXLSNQEHQWLFSRLQDVRDVSAXFLSDLEENFENNIFSFQVCDVVLNHAPDFRRVYLPYVXNQXYQERXFQSLMNSNSNFREVLEKLESDPVCQRLSLKSFLILPFQRIXRLKLLLQNILKRXQPGSSEEAEAXKAHHALEQLIRDCNNNVQSMRRXEELIYLSQKIEFECKIFPLISQSRWLVKSGELXALEFSASPGLRRKLNXRPVHLHLFNDCLLLSRPREGSRFLVFDHAPFSSIRGEKCEMKLHGPHKNLFRLFLRQNXQGAQAEFLFRXEXQSEKLRWISALAMPREELDLLECYNSPQVQCLRAYKPRENDELALEKADVVMVXQQSSDGWLEGVRLSDGERGWFPVQQVEFISNPEVRAQNLKEAHRVKXAKLQLVEQQA

SEQ ID NO: 3051 - protein, 519 aa, Homo sapiens
  MOD_RES (43)..(43): Selenocysteine
  MOD_RES (85)..(85): Selenocysteine
  MOD_RES (91)..(91): Selenocysteine
  MOD_RES (126)..(126): Selenocysteine
  MOD_RES (131)..(131): Selenocysteine
  MOD_RES (153)..(153): Selenocysteine
  MOD_RES (191)..(191): Selenocysteine
  MOD_RES (194)..(194): Selenocysteine
  MOD_RES (199)..(199): Selenocysteine
  MOD_RES (240)..(240): Selenocysteine
  MOD_RES (253)..(253): Selenocysteine
  MOD_RES (264)..(264): Selenocysteine
  MOD_RES (287)..(287): Selenocysteine
  MOD_RES (320)..(320): Selenocysteine
  MOD_RES (336)..(336): Selenocysteine
  MOD_RES (395)..(395): Selenocysteine
  MOD_RES (406)..(406): Selenocysteine
  MOD_RES (408)..(408): Selenocysteine
  MOD_RES (462)..(462): Selenocysteine
  MOD_RES (509)..(509): Selenocysteine
MGGFSRRCSKLINSSQLLYQEYSDVVLNKEIQSQQRLESLSEXPGPSSPRQPRKALVSSESYLQRLSMASSGSLWQEIPVVRNSXVLLSMXHEDQKLQEVKFELIVSEASYLRSLNIAVDHFQLSXSLRAXLSNQEHQWLFSRLQDVRDVSAXFLSDLEENFENNIFSFQVCDVVLNHAPDFRRVYLPYVXNQXYQERXFQSLMNSNSNFREVLEKLESDPVCQRLSLKSFLILPFQRIXRLKLLLQNILKRXQPGSSEEAEAXKAHHALEQLIRDCNNNVQSMRRXEELIYLSQKIEFECKIFPLISQSRWLVKSGELXALEFSASPGLRRKLNXRPVHLHLFNDCLLLSRPREGSRFLVFDHAPFSSIRGEKCEMKLHGPHKNLFRLFLRQNXQGAQAEFLFRXEXQSEKLRWISALAMPREELDLLECYNSPQVQCLRAYKPRENDELALEKADVVMVXQQSSDGWLEGVRLSDGERGWFPVQQVEFISNPEVRAQNLKEAHRVKXAKLQLVEQQA

SEQ ID NO: 3052 - protein, 797 aa, Homo sapiens
  MOD_RES (1)..(1): Any amino acid
  MOD_RES (6)..(6): Selenocysteine
  MOD_RES (48)..(48): Selenocysteine
  MOD_RES (58)..(58): Selenocysteine
  MOD_RES (70)..(70): Selenocysteine
  MOD_RES (103)..(103): Selenocysteine
  MOD_RES (119)..(119): Selenocysteine
  MOD_RES (132)..(132): Selenocysteine
  MOD_RES (140)..(140): Selenocysteine
  MOD_RES (150)..(150): Selenocysteine
  MOD_RES (156)..(156): Selenocysteine
  MOD_RES (160)..(160): Selenocysteine
  MOD_RES (164)..(164): Selenocysteine
  MOD_RES (166)..(166): Selenocysteine
  MOD_RES (183)..(183): Selenocysteine
  MOD_RES (192)..(193): Selenocysteine
  MOD_RES (196)..(196): Selenocysteine
  MOD_RES (203)..(203): Selenocysteine
  MOD_RES (225)..(226): Selenocysteine
  MOD_RES (321)..(321): Selenocysteine
  MOD_RES (375)..(375): Selenocysteine
  MOD_RES (417)..(417): Selenocysteine
  MOD_RES (423)..(423): Selenocysteine
  MOD_RES (458)..(458): Selenocysteine
  MOD_RES (463)..(463): Selenocysteine
  MOD_RES (485)..(485): Selenocysteine
  MOD_RES (523)..(523): Selenocysteine
  MOD_RES (526)..(526): Selenocysteine
  MOD_RES (531)..(531): Selenocysteine
  MOD_RES (572)..(572): Selenocysteine
  MOD_RES (585)..(585): Selenocysteine
  MOD_RES (596)..(596): Selenocysteine
  MOD_RES (619)..(619): Selenocysteine
  MOD_RES (652)..(652): Selenocysteine
  MOD_RES (668)..(668): Selenocysteine
  MOD_RES (740)..(740): Selenocysteine
  MOD_RES (787)..(787): Selenocysteine
XVVVPXLKQHSHPPPLALGSGLHAPHKGPLPQASDPAVARQHRPLPSXPDSSHHAQAXPRWRYNKPLPPXPDLPQPHLPPISAPGSSRIYRPLPPLPIIDPPXEPPPLPPKSRGRSRSXRGGHMNSGGHAKXRPACQDWXVPLPASAGRXSWPPAXARSXESFXSXSRSKSEVSPGMAFSNMXNFLCPSSPXXPWXPELQGPXSKDEAGVSEHPEAPAREPLRRXXPQQGASGPGRSPVGQARQPEKPSHLHLEKASSWPHRRDSGRPPGDSSGQAVAPSEGANKHKGWSRQGLRRPSILPEGSSDSRGPAVEKHPGPSDXVVFREKKPKEVMGGFSRRCSKLINSSQLLYQEYSDVVLNKEIQSQQRLESLSEXPGPSSPRQPRKALVSSESYLQRLSMASSGSLWQEIPVVRNSXVLLSMXHEDQKLQEVKFELIVSEASYLRSLNIAVDHFQLSXSLRAXLSNQEHQWLFSRLQDVRDVSAXFLSDLEENFENNIFSFQVCDVVLNHAPDFRRVYLPYVXNQXYQERXFQSLMNSNSNFREVLEKLESDPVCQRLSLKSFLILPFQRIXRLKLLLQNILKRXQPGSSEEAEAXKAHHALEQLIRDCNNNVQSMRRXEELIYLSQKIEFECKIFPLISQSRWLVKSGELXALEFSASPGLRRKLNXRPVHLHLFNDCLLLSRPRESEKLRWISALAMPREELDLLECYNSPQVQCLRAYKPRENDELALEKADVVMVXQQSSDGWLEGVRLSDGERGWFPVQQVEFISNPEVRAQNLKEAHRVKXAKLQLVEQQA

SEQ ID NO: 3053 - protein, 776 aa, Homo sapiens
  MOD_RES (9)..(9): Selenocysteine
  MOD_RES (23)..(23): Selenocysteine
  MOD_RES (62)..(62): Selenocysteine
  MOD_RES (79)..(79): Selenocysteine
  MOD_RES (102)..(102): Selenocysteine
  MOD_RES (110)..(110): Selenocysteine
  MOD_RES (130)..(130): Selenocysteine
  MOD_RES (133)..(133): Selenocysteine
  MOD_RES (142)..(142): Selenocysteine
  MOD_RES (152)..(152): Selenocysteine
  MOD_RES (156)..(156): Selenocysteine
  MOD_RES (174)..(174): Selenocysteine
  MOD_RES (190)..(190): Selenocysteine
  MOD_RES (201)..(201): Selenocysteine
  MOD_RES (206)..(206): Selenocysteine
  MOD_RES (234)..(234): Selenocysteine
  MOD_RES (238)..(238): Selenocysteine
  MOD_RES (243)..(243): Selenocysteine
  MOD_RES (252)..(252): Selenocysteine
  MOD_RES (266)..(266): Selenocysteine
  MOD_RES (279)..(279): Selenocysteine
  MOD_RES (283)..(283): Selenocysteine
  MOD_RES (294)..(294): Selenocysteine
  MOD_RES (298)..(298): Selenocysteine
  MOD_RES (346)..(346): Selenocysteine
  MOD_RES (370)..(371): Selenocysteine
  MOD_RES (385)..(385): Selenocysteine
  MOD_RES (397)..(397): Selenocysteine
  MOD_RES (413)..(413): Selenocysteine
  MOD_RES (501)..(501): Selenocysteine
  MOD_RES (504)..(504): Selenocysteine
  MOD_RES (515)..(515): Selenocysteine
  MOD_RES (519)..(519): Selenocysteine
  MOD_RES (522)..(522): Selenocysteine
  MOD_RES (559)..(559): Selenocysteine
  MOD_RES (573)..(573): Selenocysteine
  MOD_RES (625)..(625): Selenocysteine
  MOD_RES (635)..(635): Selenocysteine
  MOD_RES (650)..(650): Selenocysteine
  MOD_RES (668)..(668): Selenocysteine
  MOD_RES (680)..(680): Selenocysteine
  MOD_RES (701)..(701): Selenocysteine
  MOD_RES (707)..(707): Selenocysteine
  MOD_RES (717)..(717): Selenocysteine
  MOD_RES (760)..(760): Selenocysteine
  MOD_RES (772)..(772): Selenocysteine
MNPEEQIVXWLISLGVLESPKKXICDPEEFLKSSLKNGVVLCKLINRLMPGSVEKFCLDPQXEADCINNINDFLKGCAXLQVEIFDPDDLYSGVNFSKVLSXLLAVNKAXEDQLSERPCGRSSSLSAANXSQXNPQGAVSSXVSGLQRQSKXVEMXENGSHQLIVKARFNFKQXNEDELSVCKGDIIYVXRVEEGGWWEGXLNGRXGWFPSNYVREIKSSERPLSPKAVKGFEXAPLXKNYYXVVLQNILDXEKEYAKELQSLLVXYLRPLQSNNNLSXVEVXSLLGNFEEVCXFQQXLCQALEECSKFPENQHKVGGCLLSLMPHFKSMYLAYCANHPSAVNVLXQHSDELEQFMENQGASSPGILILXXNLSKPFMRLEKYVXLLQELERHMEDXHPDHQDILKAIVAFKXLMGQCQDLRKRKQLELQILSEPIQAWEGEDIKNLGNVIFMSQVMVQYGACEEKEERYLMLFSNVLIMLSASPRMSGFIYQGKIPIAGXVVXRLDEIEGNDCXFEIXGNXVERIVVHCNNNQDFQEWLEQLNRLIRGPASCSSLSKXSSSSCSAHSSFSSXGQPRGPLEPPQIIKPWSLSCLRPAPPLRPSAALGYKERMSYILKESSKSPKXMKKFLHKRKXERKPSEEEYVIRKSXAALEEDAQILKVIEAYCXSANFQQGHGSSXRKDSIPQVLLPEEEKLIIEEXRSNGQXIMEEKSLVDXVYALKDEVRELKQENKRMKQCLEEELKSRRDLEKLVRRLLKQXDECIRGESSSKXSILP

SEQ ID NO: 3054 - protein, 622 aa, Homo sapiens
  MOD_RES (2)..(2): Selenocysteine
  MOD_RES (20)..(20): Selenocysteine
  MOD_RES (36)..(36): Selenocysteine
  MOD_RES (47)..(47): Selenocysteine
  MOD_RES (52)..(52): Selenocysteine
  MOD_RES (80)..(80): Selenocysteine
  MOD_RES (84)..(84): Selenocysteine
  MOD_RES (89)..(89): Selenocysteine
  MOD_RES (98)..(98): Selenocysteine
  MOD_RES (112)..(112): Selenocysteine
  MOD_RES (125)..(125): Selenocysteine
  MOD_RES (129)..(129): Selenocysteine
  MOD_RES (140)..(140): Selenocysteine
  MOD_RES (144)..(144): Selenocysteine
  MOD_RES (192)..(192): Selenocysteine
  MOD_RES (216)..(217): Selenocysteine
  MOD_RES (231)..(231): Selenocysteine
  MOD_RES (243)..(243): Selenocysteine
  MOD_RES (259)..(259): Selenocysteine
  MOD_RES (347)..(347): Selenocysteine
  MOD_RES (350)..(350): Selenocysteine
  MOD_RES (361)..(361): Selenocysteine
  MOD_RES (365)..(365): Selenocysteine
  MOD_RES (368)..(368): Selenocysteine
  MOD_RES (405)..(405): Selenocysteine
  MOD_RES (419)..(419): Selenocysteine
  MOD_RES (471)..(471): Selenocysteine
  MOD_RES (481)..(481): Selenocysteine
  MOD_RES (496)..(496): Selenocysteine
  MOD_RES (514)..(514): Selenocysteine
  MOD_RES (526)..(526): Selenocysteine
  MOD_RES (547)..(547): Selenocysteine
  MOD_RES (553)..(553): Selenocysteine
  MOD_RES (563)..(563): Selenocysteine
  MOD_RES (606)..(606): Selenocysteine
  MOD_RES (618)..(618): Selenocysteine
MXENGSHQLIVKARFNFKQXNEDELSVCKGDIIYVXRVEEGGWWEGXLNGRXGWFPSNYVREIKSSERPLSPKAVKGFEXAPLXKNYYXVVLQNILDXEKEYAKELQSLLVXYLRPLQSNNNLSXVEVXSLLGNFEEVCXFQQXLCQALEECSKFPENQHKVGGCLLSLMPHFKSMYLAYCANHPSAVNVLXQHSDELEQFMENQGASSPGILILXXNLSKPFMRLEKYVXLLQELERHMEDXHPDHQDILKAIVAFKXLMGQCQDLRKRKQLELQILSEPIQAWEGEDIKNLGNVIFMSQVMVQYGACEEKEERYLMLFSNVLIMLSASPRMSGFIYQGKIPIAGXVVXRLDEIEGNDCXFEIXGNXVERIVVHCNNNQDFQEWLEQLNRLIRGPASCSSLSKXSSSSCSAHSSFSSXGQPRGPLEPPQIIKPWSLSCLRPAPPLRPSAALGYKERMSYILKESSKSPKXMKKFLHKRKXERKPSEEEYVIRKSXAALEEDAQILKVIEAYCXSANFQQGHGSSXRKDSIPQVLLPEEEKLIIEEXRSNGQXIMEEKSLVDXVYALKDEVRELKQENKRMKQCLEEELKSRRDLEKLVRRLLKQXDECIRGESSSKXSILP

SEQ ID NO: 3055 - protein, 547 aa, Homo sapiens
  MOD_RES (12)..(12): Selenocysteine
  MOD_RES (26)..(26): Selenocysteine
  MOD_RES (36)..(36): Selenocysteine
  MOD_RES (40)..(40): Selenocysteine
  MOD_RES (47)..(47): Selenocysteine
  MOD_RES (81)..(81): Selenocysteine
  MOD_RES (103)..(103): Selenocysteine
  MOD_RES (107)..(107): Selenocysteine
  MOD_RES (120)..(120): Selenocysteine
  MOD_RES (132)..(132): Selenocysteine
  MOD_RES (144)..(145): Selenocysteine
  MOD_RES (159)..(159): Selenocysteine
  MOD_RES (173)..(173): Selenocysteine
  MOD_RES (207)..(207): Selenocysteine
  MOD_RES (220)..(220): Selenocysteine
  MOD_RES (225)..(225): Selenocysteine
  MOD_RES (272)..(273): Selenocysteine
  MOD_RES (276)..(276): Selenocysteine
  MOD_RES (278)..(278): Selenocysteine
  MOD_RES (321)..(321): Selenocysteine
  MOD_RES (324)..(324): Selenocysteine
  MOD_RES (330)..(330): Selenocysteine
  MOD_RES (340)..(340): Selenocysteine
  MOD_RES (347)..(347): Selenocysteine
  MOD_RES (361)..(361): Selenocysteine
  MOD_RES (366)..(366): Selenocysteine
  MOD_RES (375)..(375): Selenocysteine
  MOD_RES (378)..(379): Selenocysteine
  MOD_RES (390)..(390): Selenocysteine
  MOD_RES (423)..(423): Selenocysteine
  MOD_RES (448)..(448): Selenocysteine
  MOD_RES (466)..(466): Selenocysteine
  MOD_RES (470)..(470): Selenocysteine
  MOD_RES (473)..(473): Selenocysteine
  MOD_RES (477)..(477): Selenocysteine
  MOD_RES (481)..(481): Selenocysteine
  MOD_RES (525)..(525): Selenocysteine
  MOD_RES (534)..(534): Selenocysteine
MGSCSSQSVQKXRRGRKVVLQNILEXENEYSKELQXVLSXYLRPLQXSEKLSSANISYLMGNLEEICSFQQMLVQSLEECXKLPEAQQRVGGCFLNLMPQMKXLYLXYCANHPSAVNVLXEHSEELGEFMEXKGASSPGILVLXXGLSKPFMRLDKYPXLLKELERHMEDYHXDRQDIQKSMAAFKNLSAQCQEVRKRKELELQILXEAIRNWEGDDIKXLGNVXYMSQVLIQCAGSEEKNERYLLLFPNVLLMLSASPRMSGFIYQGKLPXXGMXIXKLEDSENHRNAFEISGSMIERILVSCNNQQDLQEWVEHLQKQXKVXSVGNPXIKPHSVPSHXLPSHPVXPSSKHADSKPAPLXPAYHXLPHPSHHGXPHXXINWGPLEPPKXPKPWSLSCLRPAPPLRPSAALCYKEDLSKSPKXMKKLLPKRKPERKPSDEEFASRKSXAALEEDAQILKVIEAYCXSAKXRQXLNSXWQGXDLMHNHVLADDDQPSLDSLGRRSSLSRLEPSDLSEDSDYDSIWXAHSYRMGSXSRKSCCSYISHQN

SEQ ID NO: 3056 - protein, 143 aa, Homo sapiens
  MOD_RES (3)..(3): Selenocysteine
  MOD_RES (24)..(24): Selenocysteine
  MOD_RES (29)..(29): Selenocysteine
  MOD_RES (61)..(61): Selenocysteine
  MOD_RES (63)..(63): Selenocysteine
  MOD_RES (77)..(77): Selenocysteine
  MOD_RES (95)..(95): Selenocysteine
  MOD_RES (111)..(111): Selenocysteine
  MOD_RES (122)..(122): Selenocysteine
  MOD_RES (127)..(127): Selenocysteine
MKXFDANDLYQGQNFNKVLSSLVXLNKVXADIGLGSDSVCARPSSHRIKSFDSLGSQSLHXRXSKLFQGQYRSLDMXDNSNNQLVVRAKFNFQQXNEDELSFSKGDVIHVXRVEEGGWWEGXLNGRXGWFPSNYVREVKASGK

SEQ ID NO: 3057 - protein, 753 aa, Homo sapiens
  MOD_RES (7)..(7): Selenocysteine
  MOD_RES (9)..(9): Selenocysteine
  MOD_RES (13)..(13): Selenocysteine
  MOD_RES (23)..(23): Selenocysteine
  MOD_RES (52)..(52): Selenocysteine
  MOD_RES (56)..(56): Selenocysteine
  MOD_RES (77)..(77): Selenocysteine
  MOD_RES (82)..(82): Selenocysteine
  MOD_RES (114)..(114): Selenocysteine
  MOD_RES (116)..(116): Selenocysteine
  MOD_RES (130)..(130): Selenocysteine
  MOD_RES (148)..(148): Selenocysteine
  MOD_RES (164)..(164): Selenocysteine
  MOD_RES (175)..(175): Selenocysteine
  MOD_RES (180)..(180): Selenocysteine
  MOD_RES (204)..(204): Selenocysteine
  MOD_RES (214)..(215): Selenocysteine
  MOD_RES (232)..(232): Selenocysteine
  MOD_RES (242)..(242): Selenocysteine
  MOD_RES (246)..(246): Selenocysteine
  MOD_RES (253)..(253): Selenocysteine
  MOD_RES (287)..(287): Selenocysteine
  MOD_RES (309)..(309): Selenocysteine
  MOD_RES (313)..(313): Selenocysteine
  MOD_RES (326)..(326): Selenocysteine
  MOD_RES (338)..(338): Selenocysteine
  MOD_RES (350)..(351): Selenocysteine
  MOD_RES (365)..(365): Selenocysteine
  MOD_RES (379)..(379): Selenocysteine
  MOD_RES (413)..(413): Selenocysteine
  MOD_RES (426)..(426): Selenocysteine
  MOD_RES (431)..(431): Selenocysteine
  MOD_RES (478)..(479): Selenocysteine
  MOD_RES (482)..(482): Selenocysteine
  MOD_RES (484)..(484): Selenocysteine
  MOD_RES (527)..(527): Selenocysteine
  MOD_RES (530)..(530): Selenocysteine
  MOD_RES (536)..(536): Selenocysteine
  MOD_RES (546)..(546): Selenocysteine
  MOD_RES (553)..(553): Selenocysteine
  MOD_RES (567)..(567): Selenocysteine
  MOD_RES (572)..(572): Selenocysteine
  MOD_RES (581)..(581): Selenocysteine
  MOD_RES (584)..(585): Selenocysteine
  MOD_RES (596)..(596): Selenocysteine
  MOD_RES (629)..(629): Selenocysteine
  MOD_RES (654)..(654): Selenocysteine
  MOD_RES (672)..(672): Selenocysteine
  MOD_RES (676)..(676): Selenocysteine
  MOD_RES (679)..(679): Selenocysteine
  MOD_RES (683)..(683): Selenocysteine
  MOD_RES (687)..(687): Selenocysteine
  MOD_RES (731)..(731): Selenocysteine
  MOD_RES (740)..(740): Selenocysteine
MNSAEQXVXWLIXLGVLESPKKXISDPEGFLQASLKDGVVLCRLLERLLPGXIEKXFDANDLYQGQNFNKVLSSLVXLNKVXADIGLGSDSVCARPSSHRIKSFDSLGSQSLHXRXSKLFQGQYRSLDMXDNSNNQLVVRAKFNFQQXNEDELSFSKGDVIHVXRVEEGGWWEGXLNGRXGWFPSNYVREVKASEKPVSPKSGXLKSPPKGFDXXAINKSYYNVVLQNILEXENEYSKELQXVLSXYLRPLQXSEKLSSANISYLMGNLEEICSFQQMLVQSLEECXKLPEAQQRVGGCFLNLMPQMKXLYLXYCANHPSAVNVLXEHSEELGEFMEXKGASSPGILVLXXGLSKPFMRLDKYPXLLKELERHMEDYHXDRQDIQKSMAAFKNLSAQCQEVRKRKELELQILXEAIRNWEGDDIKXLGNVXYMSQVLIQCAGSEEKNERYLLLFPNVLLMLSASPRMSGFIYQGKLPXXGMXIXKLEDSENHRNAFEISGSMIERILVSCNNQQDLQEWVEHLQKQXKVXSVGNPXIKPHSVPSHXLPSHPVXPSSKHADSKPAPLXPAYHXLPHPSHHGXPHXXINWGPLEPPKXPKPWSLSCLRPAPPLRPSAALCYKEDLSKSPKXMKKLLPKRKPERKPSDEEFASRKSXAALEEDAQILKVIEAYCXSAKXRQXLNSXWQGXDLMHNHVLADDDQPSLDSLGRRSSLSRLEPSDLSEDSDYDSIWXAHSYRMGSXSRKSCCSYISHQN

SEQ ID NO: 3058 - protein, 803 aa, Homo sapiens
  MOD_RES (7)..(7): Selenocysteine
  MOD_RES (9)..(9): Selenocysteine
  MOD_RES (13)..(13): Selenocysteine
  MOD_RES (23)..(23): Selenocysteine
  MOD_RES (52)..(52): Selenocysteine
  MOD_RES (98)..(99): Selenocysteine
  MOD_RES (106)..(106): Selenocysteine
  MOD_RES (127)..(127): Selenocysteine
  MOD_RES (132)..(132): Selenocysteine
  MOD_RES (164)..(164): Selenocysteine
  MOD_RES (166)..(166): Selenocysteine
  MOD_RES (180)..(180): Selenocysteine
  MOD_RES (198)..(198): Selenocysteine
  MOD_RES (214)..(214): Selenocysteine
  MOD_RES (225)..(225): Selenocysteine
  MOD_RES (230)..(230): Selenocysteine
  MOD_RES (254)..(254): Selenocysteine
  MOD_RES (264)..(265): Selenocysteine
  MOD_RES (282)..(282): Selenocysteine
  MOD_RES (292)..(292): Selenocysteine
  MOD_RES (296)..(296): Selenocysteine
  MOD_RES (303)..(303): Selenocysteine
  MOD_RES (337)..(337): Selenocysteine
  MOD_RES (359)..(359): Selenocysteine
  MOD_RES (363)..(363): Selenocysteine
  MOD_RES (376)..(376): Selenocysteine
  MOD_RES (388)..(388): Selenocysteine
  MOD_RES (400)..(401): Selenocysteine
  MOD_RES (415)..(415): Selenocysteine
  MOD_RES (429)..(429): Selenocysteine
  MOD_RES (463)..(463): Selenocysteine
  MOD_RES (476)..(476): Selenocysteine
  MOD_RES (481)..(481): Selenocysteine
  MOD_RES (528)..(529): Selenocysteine
  MOD_RES (532)..(532): Selenocysteine
  MOD_RES (534)..(534): Selenocysteine
  MOD_RES (577)..(577): Selenocysteine
  MOD_RES (580)..(580): Selenocysteine
  MOD_RES (586)..(586): Selenocysteine
  MOD_RES (596)..(596): Selenocysteine
  MOD_RES (603)..(603): Selenocysteine
  MOD_RES (617)..(617): Selenocysteine
  MOD_RES (622)..(622): Selenocysteine
  MOD_RES (631)..(631): Selenocysteine
  MOD_RES (634)..(635): Selenocysteine
  MOD_RES (646)..(646): Selenocysteine
  MOD_RES (679)..(679): Selenocysteine
  MOD_RES (704)..(704): Selenocysteine
  MOD_RES (722)..(722): Selenocysteine
  MOD_RES (726)..(726): Selenocysteine
  MOD_RES (729)..(729): Selenocysteine
  MOD_RES (733)..(733): Selenocysteine
  MOD_RES (737)..(737): Selenocysteine
  MOD_RES (781)..(781): Selenocysteine
  MOD_RES (790)..(790): Selenocysteine
MNSAEQXVXWLIXLGVLESPKKXISDPEGFLQASLKDGVVLCRLLERLLPGXIEKVYPEPRSESECLSNIREFLRGCGASLRLELLFPPSQPPQHLVXXILLSASXFDANDLYQGQNFNKVLSSLVXLNKVXADIGLGSDSVCARPSSHRIKSFDSLGSQSLHXRXSKLFQGQYRSLDMXDNSNNQLVVRAKFNFQQXNEDELSFSKGDVIHVXRVEEGGWWEGXLNGRXGWFPSNYVREVKASEKPVSPKSGXLKSPPKGFDXXAINKSYYNVVLQNILEXENEYSKELQXVLSXYLRPLQXSEKLSSANISYLMGNLEEICSFQQMLVQSLEECXKLPEAQQRVGGCFLNLMPQMKXLYLXYCANHPSAVNVLXEHSEELGEFMEXKGASSPGILVLXXGLSKPFMRLDKYPXLLKELERHMEDYHXDRQDIQKSMAAFKNLSAQCQEVRKRKELELQILXEAIRNWEGDDIKXLGNVXYMSQVLIQCAGSEEKNERYLLLFPNVLLMLSASPRMSGFIYQGKLPXXGMXIXKLEDSENHRNAFEISGSMIERILVSCNNQQDLQEWVEHLQKQXKVXSVGNPXIKPHSVPSHXLPSHPVXPSSKHADSKPAPLXPAYHXLPHPSHHGXPHXXINWGPLEPPKXPKPWSLSCLRPAPPLRPSAALCYKEDLSKSPKXMKKLLPKRKPERKPSDEEFASRKSXAALEEDAQILKVIEAYCXSAKXRQXLNSXWQGXDLMHNHVLADDDQPSLDSLGRRSSLSRLEPSDLSEDSDYDSIWXAHSYRMGSXSRKSCCSYISHQN

SEQ ID NO: 3059 - protein, 782 aa, Homo sapiens
  MOD_RES (7)..(7): Selenocysteine
  MOD_RES (9)..(9): Selenocysteine
  MOD_RES (13)..(13): Selenocysteine
  MOD_RES (23)..(23): Selenocysteine
  MOD_RES (52)..(52): Selenocysteine
  MOD_RES (85)..(85): Selenocysteine
  MOD_RES (106)..(106): Selenocysteine
  MOD_RES (111)..(111): Selenocysteine
  MOD_RES (143)..(143): Selenocysteine
  MOD_RES (145)..(145): Selenocysteine
  MOD_RES (159)..(159): Selenocysteine
  MOD_RES (177)..(177): Selenocysteine
  MOD_RES (193)..(193): Selenocysteine
  MOD_RES (204)..(204): Selenocysteine
  MOD_RES (209)..(209): Selenocysteine
  MOD_RES (233)..(233): Selenocysteine
  MOD_RES (243)..(244): Selenocysteine
  MOD_RES (261)..(261): Selenocysteine
  MOD_RES (271)..(271): Selenocysteine
  MOD_RES (275)..(275): Selenocysteine
  MOD_RES (282)..(282): Selenocysteine
  MOD_RES (316)..(316): Selenocysteine
  MOD_RES (338)..(338): Selenocysteine
  MOD_RES (342)..(342): Selenocysteine
  MOD_RES (355)..(355): Selenocysteine
  MOD_RES (367)..(367): Selenocysteine
  MOD_RES (379)..(380): Selenocysteine
  MOD_RES (394)..(394): Selenocysteine
  MOD_RES (408)..(408): Selenocysteine
  MOD_RES (442)..(442): Selenocysteine
  MOD_RES (455)..(455): Selenocysteine
  MOD_RES (460)..(460): Selenocysteine
  MOD_RES (507)..(508): Selenocysteine
  MOD_RES (511)..(511): Selenocysteine
  MOD_RES (513)..(513): Selenocysteine
  MOD_RES (556)..(556): Selenocysteine
  MOD_RES (559)..(559): Selenocysteine
  MOD_RES (565)..(565): Selenocysteine
  MOD_RES (575)..(575): Selenocysteine
  MOD_RES (582)..(582): Selenocysteine
  MOD_RES (596)..(596): Selenocysteine
  MOD_RES (601)..(601): Selenocysteine
  MOD_RES (610)..(610): Selenocysteine
  MOD_RES (613)..(614): Selenocysteine
  MOD_RES (625)..(625): Selenocysteine
  MOD_RES (658)..(658): Selenocysteine
  MOD_RES (683)..(683): Selenocysteine
  MOD_RES (701)..(701): Selenocysteine
  MOD_RES (705)..(705): Selenocysteine
  MOD_RES (708)..(708): Selenocysteine
  MOD_RES (712)..(712): Selenocysteine
  MOD_RES (716)..(716): Selenocysteine
  MOD_RES (760)..(760): Selenocysteine
  MOD_RES (769)..(769): Selenocysteine
MNSAEQXVXWLIXLGVLESPKKXISDPEGFLQASLKDGVVLCRLLERLLPGXIEKVYPEPRSESECLSNIREFLRGCGASLRLEXFDANDLYQGQNFNKVLSSLVXLNKVXADIGLGSDSVCARPSSHRIKSFDSLGSQSLHXRXSKLFQGQYRSLDMXDNSNNQLVVRAKFNFQQXNEDELSFSKGDVIHVXRVEEGGWWEGXLNGRXGWFPSNYVREVKASEKPVSPKSGXLKSPPKGFDXXAINKSYYNVVLQNILEXENEYSKELQXVLSXYLRPLQXSEKLSSANISYLMGNLEEICSFQQMLVQSLEECXKLPEAQQRVGGCFLNLMPQMKXLYLXYCANHPSAVNVLXEHSEELGEFMEXKGASSPGILVLXXGLSKPFMRLDKYPXLLKELERHMEDYHXDRQDIQKSMAAFKNLSAQCQEVRKRKELELQILXEAIRNWEGDDIKXLGNVXYMSQVLIQCAGSEEKNERYLLLFPNVLLMLSASPRMSGFIYQGKLPXXGMXIXKLEDSENHRNAFEISGSMIERILVSCNNQQDLQEWVEHLQKQXKVXSVGNPXIKPHSVPSHXLPSHPVXPSSKHADSKPAPLXPAYHXLPHPSHHGXPHXXINWGPLEPPKXPKPWSLSCLRPAPPLRPSAALCYKEDLSKSPKXMKKLLPKRKPERKPSDEEFASRKSXAALEEDAQILKVIEAYCXSAKXRQXLNSXWQGXDLMHNHVLADDDQPSLDSLGRRSSLSRLEPSDLSEDSDYDSIWXAHSYRMGSXSRKSCCSYISHQN

SEQ ID NO: 3060 - protein, 39 aa, Homo sapiens
  MOD_RES (2)..(2): Selenocysteine
  MOD_RES (20)..(20): Selenocysteine
  MOD_RES (36)..(36): Selenocysteine
MXDNSNNQLVVRAKFNFQQXNEDELSFSKGDVIHVXRVE

SEQ ID NO: 3061 - protein, 61 aa, Homo sapiens
  MOD_RES (2)..(2): Selenocysteine
  MOD_RES (20)..(20): Selenocysteine
  MOD_RES (36)..(36): Selenocysteine
  MOD_RES (47)..(47): Selenocysteine
  MOD_RES (52)..(52): Selenocysteine
MXDNSNNQLVVRAKFNFQQXNEDELSFSKGDVIHVXRVEEGGWWEGXLNGRXGWFPSNYVR

SEQ ID NO: 3062 - protein, 66 aa, Homo sapiens
  MOD_RES (2)..(2): Selenocysteine
  MOD_RES (20)..(20): Selenocysteine
  MOD_RES (36)..(36): Selenocysteine
  MOD_RES (47)..(47): Selenocysteine
  MOD_RES (52)..(52): Selenocysteine
MXDNSNNQLVVRAKFNFQQXNEDELSFSKGDVIHVXRVEEGGWWEGXLNGRXGWFPSNYVREVKAS

SEQ ID NO: 3063 - protein, 151 aa, Homo sapiens
  MOD_RES (2)..(2): Selenocysteine
  MOD_RES (20)..(20): Selenocysteine
  MOD_RES (36)..(36): Selenocysteine
  MOD_RES (47)..(47): Selenocysteine
  MOD_RES (52)..(52): Selenocysteine
  MOD_RES (76)..(76): Selenocysteine
  MOD_RES (86)..(87): Selenocysteine
  MOD_RES (113)..(113): Selenocysteine
MXDNSNNQLVVRAKFNFQQXNEDELSFSKGDVIHVXRVEEGGWWEGXLNGRXGWFPSNYVREVKASEKPVSPKSGXLKSPPKGFDXXAINKSYYNVPVLSRGAESSAHEGGGXPRDCMEVEPGSPGSEVLPAGLKGMPASRHIWEPECAVV

SEQ ID NO: 3064 - protein, 447 aa, Homo sapiens
  MOD_RES (2)..(2): Selenocysteine
  MOD_RES (20)..(20): Selenocysteine
  MOD_RES (36)..(36): Selenocysteine
  MOD_RES (47)..(47): Selenocysteine
  MOD_RES (52)..(52): Selenocysteine
  MOD_RES (76)..(76): Selenocysteine
  MOD_RES (86)..(87): Selenocysteine
  MOD_RES (104)..(104): Selenocysteine
  MOD_RES (114)..(114): Selenocysteine
  MOD_RES (118)..(118): Selenocysteine
  MOD_RES (125)..(125): Selenocysteine
  MOD_RES (159)..(159): Selenocysteine
  MOD_RES (181)..(181): Selenocysteine
  MOD_RES (185)..(185): Selenocysteine
  MOD_RES (198)..(198): Selenocysteine
  MOD_RES (210)..(210): Selenocysteine
  MOD_RES (222)..(223): Selenocysteine
  MOD_RES (237)..(237): Selenocysteine
  MOD_RES (251)..(251): Selenocysteine
  MOD_RES (285)..(285): Selenocysteine
  MOD_RES (298)..(298): Selenocysteine
  MOD_RES (303)..(303): Selenocysteine
  MOD_RES (350)..(351): Selenocysteine
  MOD_RES (354)..(354): Selenocysteine
  MOD_RES (356)..(356): Selenocysteine
  MOD_RES (399)..(399): Selenocysteine
  MOD_RES (402)..(402): Selenocysteine
  MOD_RES (408)..(408): Selenocysteine
  MOD_RES (418)..(418): Selenocysteine
  MOD_RES (425)..(425): Selenocysteine
  MOD_RES (439)..(439): Selenocysteine
  MOD_RES (444)..(444): Selenocysteine
MXDNSNNQLVVRAKFNFQQXNEDELSFSKGDVIHVXRVEEGGWWEGXLNGRXGWFPSNYVREVKASEKPVSPKSGXLKSPPKGFDXXAINKSYYNVVLQNILEXENEYSKELQXVLSXYLRPLQXSEKLSSANISYLMGNLEEICSFQQMLVQSLEECXKLPEAQQRVGGCFLNLMPQMKXLYLXYCANHPSAVNVLXEHSEELGEFMEXKGASSPGILVLXXGLSKPFMRLDKYPXLLKELERHMEDYHXDRQDIQKSMAAFKNLSAQCQEVRKRKELELQILXEAIRNWEGDDIKXLGNVXYMSQVLIQCAGSEEKNERYLLLFPNVLLMLSASPRMSGFIYQGKLPXXGMXIXKLEDSENHRNAFEISGSMIERILVSCNNQQDLQEWVEHLQKQXKVXSVGNPXIKPHSVPSHXLPSHPVXPSSKHADSKPAPLXPAYHXLPH

SEQ ID NO: 3065 - protein, 625 aa, Homo sapiens
  MOD_RES (2)..(2): Selenocysteine
  MOD_RES (20)..(20): Selenocysteine
  MOD_RES (36)..(36): Selenocysteine
  MOD_RES (47)..(47): Selenocysteine
  MOD_RES (52)..(52): Selenocysteine
  MOD_RES (76)..(76): Selenocysteine
  MOD_RES (86)..(87): Selenocysteine
  MOD_RES (104)..(104): Selenocysteine
  MOD_RES (114)..(114): Selenocysteine
  MOD_RES (118)..(118): Selenocysteine
  MOD_RES (125)..(125): Selenocysteine
  MOD_RES (159)..(159): Selenocysteine
  MOD_RES (181)..(181): Selenocysteine
  MOD_RES (185)..(185): Selenocysteine
  MOD_RES (198)..(198): Selenocysteine
  MOD_RES (210)..(210): Selenocysteine
  MOD_RES (222)..(223): Selenocysteine
  MOD_RES (237)..(237): Selenocysteine
  MOD_RES (251)..(251): Selenocysteine
  MOD_RES (285)..(285): Selenocysteine
  MOD_RES (298)..(298): Selenocysteine
  MOD_RES (303)..(303): Selenocysteine
  MOD_RES (350)..(351): Selenocysteine
  MOD_RES (354)..(354): Selenocysteine
  MOD_RES (356)..(356): Selenocysteine
  MOD_RES (399)..(399): Selenocysteine
  MOD_RES (402)..(402): Selenocysteine
  MOD_RES (408)..(408): Selenocysteine
  MOD_RES (418)..(418): Selenocysteine
  MOD_RES (425)..(425): Selenocysteine
  MOD_RES (439)..(439): Selenocysteine
  MOD_RES (444)..(444): Selenocysteine
  MOD_RES (453)..(453): Selenocysteine
  MOD_RES (456)..(457): Selenocysteine
  MOD_RES (468)..(468): Selenocysteine
  MOD_RES (501)..(501): Selenocysteine
  MOD_RES (526)..(526): Selenocysteine
  MOD_RES (544)..(544): Selenocysteine
  MOD_RES (548)..(548): Selenocysteine
  MOD_RES (551)..(551): Selenocysteine
  MOD_RES (555)..(555): Selenocysteine
  MOD_RES (559)..(559): Selenocysteine
  MOD_RES (603)..(603): Selenocysteine
  MOD_RES (612)..(612): Selenocysteine
MXDNSNNQLVVRAKFNFQQXNEDELSFSKGDVIHVXRVEEGGWWEGXLNGRXGWFPSNYVREVKASEKPVSPKSGXLKSPPKGFDXXAINKSYYNVVLQNILEXENEYSKELQXVLSXYLRPLQXSEKLSSANISYLMGNLEEICSFQQMLVQSLEECXKLPEAQQRVGGCFLNLMPQMKXLYLXYCANHPSAVNVLXEHSEELGEFMEXKGASSPGILVLXXGLSKPFMRLDKYPXLLKELERHMEDYHXDRQDIQKSMAAFKNLSAQCQEVRKRKELELQILXEAIRNWEGDDIKXLGNVXYMSQVLIQCAGSEEKNERYLLLFPNVLLMLSASPRMSGFIYQGKLPXXGMXIXKLEDSENHRNAFEISGSMIERILVSCNNQQDLQEWVEHLQKQXKVXSVGNPXIKPHSVPSHXLPSHPVXPSSKHADSKPAPLXPAYHXLPHPSHHGXPHXXINWGPLEPPKXPKPWSLSCLRPAPPLRPSAALCYKEDLSKSPKXMKKLLPKRKPERKPSDEEFASRKSXAALEEDAQILKVIEAYCXSAKXRQXLNSXWQGXDLMHNHVLADDDQPSLDSLGRRSSLSRLEPSDLSEDSDYDSIWXAHSYRMGSXSRKSCCSYISHQN

SEQ ID NO: 3066 - protein, 646 aa, Homo sapiens
  MOD_RES (2)..(2): Selenocysteine
  MOD_RES (20)..(20): Selenocysteine
  MOD_RES (36)..(36): Selenocysteine
  MOD_RES (47)..(47): Selenocysteine
  MOD_RES (52)..(52): Selenocysteine
  MOD_RES (76)..(76): Selenocysteine
  MOD_RES (86)..(87): Selenocysteine
  MOD_RES (104)..(104): Selenocysteine
  MOD_RES (114)..(114): Selenocysteine
  MOD_RES (118)..(118): Selenocysteine
  MOD_RES (125)..(125): Selenocysteine
  MOD_RES (159)..(159): Selenocysteine
  MOD_RES (181)..(181): Selenocysteine
  MOD_RES (185)..(185): Selenocysteine
  MOD_RES (198)..(198): Selenocysteine
  MOD_RES (210)..(210): Selenocysteine
  MOD_RES (222)..(223): Selenocysteine
  MOD_RES (237)..(237): Selenocysteine
  MOD_RES (251)..(251): Selenocysteine
  MOD_RES (285)..(285): Selenocysteine
  MOD_RES (298)..(298): Selenocysteine
  MOD_RES (303)..(303): Selenocysteine
  MOD_RES (350)..(351): Selenocysteine
  MOD_RES (354)..(354): Selenocysteine
  MOD_RES (356)..(356): Selenocysteine
  MOD_RES (399)..(399): Selenocysteine
  MOD_RES (402)..(402): Selenocysteine
  MOD_RES (408)..(408): Selenocysteine
  MOD_RES (418)..(418): Selenocysteine
  MOD_RES (425)..(425): Selenocysteine
  MOD_RES (439)..(439): Selenocysteine
  MOD_RES (444)..(444): Selenocysteine
  MOD_RES (453)..(453): Selenocysteine
  MOD_RES (456)..(457): Selenocysteine
  MOD_RES (468)..(468): Selenocysteine
  MOD_RES (501)..(501): Selenocysteine
  MOD_RES (526)..(526): Selenocysteine
  MOD_RES (544)..(544): Selenocysteine
  MOD_RES (548)..(548): Selenocysteine
  MOD_RES (551)..(551): Selenocysteine
  MOD_RES (577)..(577): Selenocysteine
  MOD_RES (583)..(583): Selenocysteine
  MOD_RES (593)..(593): Selenocysteine
  MOD_RES (644)..(644): Selenocysteine
MXDNSNNQLVVRAKFNFQQXNEDELSFSKGDVIHVXRVEEGGWWEGXLNGRXGWFPSNYVREVKASEKPVSPKSGXLKSPPKGFDXXAINKSYYNVVLQNILEXENEYSKELQXVLSXYLRPLQXSEKLSSANISYLMGNLEEICSFQQMLVQSLEECXKLPEAQQRVGGCFLNLMPQMKXLYLXYCANHPSAVNVLXEHSEELGEFMEXKGASSPGILVLXXGLSKPFMRLDKYPXLLKELERHMEDYHXDRQDIQKSMAAFKNLSAQCQEVRKRKELELQILXEAIRNWEGDDIKXLGNVXYMSQVLIQCAGSEEKNERYLLLFPNVLLMLSASPRMSGFIYQGKLPXXGMXIXKLEDSENHRNAFEISGSMIERILVSCNNQQDLQEWVEHLQKQXKVXSVGNPXIKPHSVPSHXLPSHPVXPSSKHADSKPAPLXPAYHXLPHPSHHGXPHXXINWGPLEPPKXPKPWSLSCLRPAPPLRPSAALCYKEDLSKSPKXMKKLLPKRKPERKPSDEEFASRKSXAALEEDAQILKVIEAYCXSAKXRQXLNSSSRKESAPQVLLPEEEKIIVEEXKSNGQXVIEEKSLVDXVYALKDEVQELRQDNKKMKKSLEEEQRARKDLEKLVRKVLKNMNDPAWDEXNL

SEQ ID NO: 3067 - protein, 705 aa, Homo sapiens
  MOD_RES (2)..(2): Selenocysteine
  MOD_RES (20)..(20): Selenocysteine
  MOD_RES (36)..(36): Selenocysteine
  MOD_RES (47)..(47): Selenocysteine
  MOD_RES (52)..(52): Selenocysteine
  MOD_RES (76)..(76): Selenocysteine
  MOD_RES (86)..(87): Selenocysteine
  MOD_RES (104)..(104): Selenocysteine
  MOD_RES (114)..(114): Selenocysteine
  MOD_RES (118)..(118): Selenocysteine
  MOD_RES (125)..(125): Selenocysteine
  MOD_RES (159)..(159): Selenocysteine
  MOD_RES (181)..(181): Selenocysteine
  MOD_RES (185)..(185): Selenocysteine
  MOD_RES (198)..(198): Selenocysteine
  MOD_RES (210)..(210): Selenocysteine
  MOD_RES (222)..(223): Selenocysteine
  MOD_RES (237)..(237): Selenocysteine
  MOD_RES (251)..(251): Selenocysteine
  MOD_RES (285)..(285): Selenocysteine
  MOD_RES (298)..(298): Selenocysteine
  MOD_RES (303)..(303): Selenocysteine
  MOD_RES (350)..(351): Selenocysteine
  MOD_RES (354)..(354): Selenocysteine
  MOD_RES (356)..(356): Selenocysteine
  MOD_RES (399)..(399): Selenocysteine
  MOD_RES (402)..(402): Selenocysteine
  MOD_RES (408)..(408): Selenocysteine
  MOD_RES (418)..(418): Selenocysteine
  MOD_RES (425)..(425): Selenocysteine
  MOD_RES (439)..(439): Selenocysteine
  MOD_RES (444)..(444): Selenocysteine
  MOD_RES (453)..(453): Selenocysteine
  MOD_RES (456)..(457): Selenocysteine
  MOD_RES (468)..(468): Selenocysteine
  MOD_RES (501)..(501): Selenocysteine
  MOD_RES (526)..(526): Selenocysteine
  MOD_RES (544)..(544): Selenocysteine
  MOD_RES (548)..(548): Selenocysteine
  MOD_RES (551)..(551): Selenocysteine
  MOD_RES (555)..(555): Selenocysteine
  MOD_RES (559)..(559): Selenocysteine
  MOD_RES (603)..(603): Selenocysteine
  MOD_RES (612)..(612): Selenocysteine
  MOD_RES (636)..(636): Selenocysteine
  MOD_RES (642)..(642): Selenocysteine
  MOD_RES (652)..(652): Selenocysteine
  MOD_RES (703)..(703): Selenocysteine
MXDNSNNQLVVRAKFNFQQXNEDELSFSKGDVIHVXRVEEGGWWEGXLNGRXGWFPSNYVREVKASEKPVSPKSGXLKSPPKGFDXXAINKSYYNVVLQNILEXENEYSKELQXVLSXYLRPLQXSEKLSSANISYLMGNLEEICSFQQMLVQSLEECXKLPEAQQRVGGCFLNLMPQMKXLYLXYCANHPSAVNVLXEHSEELGEFMEXKGASSPGILVLXXGLSKPFMRLDKYPXLLKELERHMEDYHXDRQDIQKSMAAFKNLSAQCQEVRKRKELELQILXEAIRNWEGDDIKXLGNVXYMSQVLIQCAGSEEKNERYLLLFPNVLLMLSASPRMSGFIYQGKLPXXGMXIXKLEDSENHRNAFEISGSMIERILVSCNNQQDLQEWVEHLQKQXKVXSVGNPXIKPHSVPSHXLPSHPVXPSSKHADSKPAPLXPAYHXLPHPSHHGXPHXXINWGPLEPPKXPKPWSLSCLRPAPPLRPSAALCYKEDLSKSPKXMKKLLPKRKPERKPSDEEFASRKSXAALEEDAQILKVIEAYCXSAKXRQXLNSXWQGXDLMHNHVLADDDQPSLDSLGRRSSLSRLEPSDLSEDSDYDSIWXAHSYRMGSXSRSRKESAPQVLLPEEEKIIVEEXKSNGQXVIEEKSLVDXVYALKDEVQELRQDNKKMKKSLEEEQRARKDLEKLVRKVLKNMNDPAWDEXNL

SEQ ID NO: 3068 - protein, 130 aa, Homo sapiens
  MOD_RES (1)..(1): Any amino acid
  MOD_RES (44)..(45): Selenocysteine
  MOD_RES (48)..(48): Selenocysteine
  MOD_RES (50)..(50): Selenocysteine
  MOD_RES (93)..(93): Selenocysteine
  MOD_RES (96)..(96): Selenocysteine
  MOD_RES (102)..(102): Selenocysteine
  MOD_RES (112)..(112): Selenocysteine
  MOD_RES (115)..(115): Selenocysteine
  MOD_RES (123)..(123): Selenocysteine
XVLIQCAGSEEKNERYLLLFPNVLLMLSASPRMSGFIYQGKLPXXGMXIXKLEDSENHRNAFEISGSMIERILVSCNNQQDLQEWVEHLQKQXKVXSVGNPXIKPHSVPSHXVRXWCFSSFQXPGVASRG

SEQ ID NO: 3069 - protein, 42 aa, Homo sapiens
MANRELAFKAGDVIKVLDASNKDWWWGQIDDEEGWFPASFVR

SEQ ID NO: 3070 - protein, 115 aa, Homo sapiens
  MOD_RES (93)..(93): Selenocysteine
MANRELAFKAGDVIKVLDASNKDWWWGQIDDEEGWFPASFVRLWVNQEDEVEEGPSDVQNGHLDPNSDCLCLGRPLQNRDQMRANVINEIMSXERHYIKHLKDICEGYLKQCRKR

SEQ ID NO: 3071 - protein, 134 aa, Homo sapiens
  MOD_RES (93)..(93): Selenocysteine
MANRELAFKAGDVIKVLDASNKDWWWGQIDDEEGWFPASFVRLWVNQEDEVEEGPSDVQNGHLDPNSDCLCLGRPLQNRDQMRANVINEIMSXERHYIKHLKDICEGYLKQCRKRRDMFSDEQLKVIFGNIEDI

SEQ ID NO: 3072 - protein, 455 aa, Homo sapiens
  MOD_RES (93)..(93): Selenocysteine
  MOD_RES (220)..(220): Selenocysteine
  MOD_RES (239)..(239): Selenocysteine
  MOD_RES (260)..(260): Selenocysteine
  MOD_RES (301)..(301): Selenocysteine
  MOD_RES (378)..(378): Selenocysteine
  MOD_RES (427)..(427): Selenocysteine
  MOD_RES (438)..(438): Selenocysteine
MANRELAFKAGDVIKVLDASNKDWWWGQIDDEEGWFPASFVRLWVNQEDEVEEGPSDVQNGHLDPNSDCLCLGRPLQNRDQMRANVINEIMSXERHYIKHLKDICEGYLKQCRKRRDMFSDEQLKVIFGNIEDIYRFQMGFVRDLEKQYNNDDPHLSEIGPCFLEHQDGFWIYSEYCNNHLDACMELSKLMKDSRYQHFFEACRLLQQMIDIAIDGFLLXPVQKICKYPLQLAELLKYXAQDHSDYRYVAAALAVMRNVXQQINERKRRLENIDKIAQWQASVLDWEGEDILDRSSELIYXGEMAWIYQPYGRNQQRVFFLFDHQMVLCKKDLIRRDILYYKGRIDMDKYEVVDIEDGRDDDFNVSMKNAFKLHNKEXEEIHLFFAKKLEEKIRWLRAFREERKMVQEDEKIGFEISENQKRQAAMXVRKVPKQKGPXIGHLQAEEQGSQSESQS

SEQ ID NO: 3073 - protein, 495 aa, Homo sapiens
  MOD_RES (93)..(93): Selenocysteine
  MOD_RES (220)..(220): Selenocysteine
  MOD_RES (239)..(239): Selenocysteine
  MOD_RES (260)..(260): Selenocysteine
  MOD_RES (301)..(301): Selenocysteine
  MOD_RES (378)..(378): Selenocysteine
  MOD_RES (427)..(427): Selenocysteine
  MOD_RES (474)..(474): Selenocysteine
  MOD_RES (491)..(491): Selenocysteine
MANRELAFKAGDVIKVLDASNKDWWWGQIDDEEGWFPASFVRLWVNQEDEVEEGPSDVQNGHLDPNSDCLCLGRPLQNRDQMRANVINEIMSXERHYIKHLKDICEGYLKQCRKRRDMFSDEQLKVIFGNIEDIYRFQMGFVRDLEKQYNNDDPHLSEIGPCFLEHQDGFWIYSEYCNNHLDACMELSKLMKDSRYQHFFEACRLLQQMIDIAIDGFLLXPVQKICKYPLQLAELLKYXAQDHSDYRYVAAALAVMRNVXQQINERKRRLENIDKIAQWQASVLDWEGEDILDRSSELIYXGEMAWIYQPYGRNQQRVFFLFDHQMVLCKKDLIRRDILYYKGRIDMDKYEVVDIEDGRDDDFNVSMKNAFKLHNKEXEEIHLFFAKKLEEKIRWLRAFREERKMVQEDEKIGFEISENQKRQAAMXVRKVPKQKGVNSARSVPPSYPPPQDPLNHGQYLVPDGIAQSQVFEFXEPKRSQSPFWQNFSRLXPFKK

SEQ ID NO: 3074 - protein, 506 aa, Homo sapiens
  MOD_RES (93)..(93): Selenocysteine
  MOD_RES (220)..(220): Selenocysteine
  MOD_RES (239)..(239): Selenocysteine
  MOD_RES (260)..(260): Selenocysteine
  MOD_RES (301)..(301): Selenocysteine
  MOD_RES (378)..(378): Selenocysteine
  MOD_RES (427)..(427): Selenocysteine
  MOD_RES (474)..(474): Selenocysteine
  MOD_RES (503)..(503): Selenocysteine
  MOD_RES (506)..(506): Selenocysteine
MANRELAFKAGDVIKVLDASNKDWWWGQIDDEEGWFPASFVRLWVNQEDEVEEGPSDVQNGHLDPNSDCLCLGRPLQNRDQMRANVINEIMSXERHYIKHLKDICEGYLKQCRKRRDMFSDEQLKVIFGNIEDIYRFQMGFVRDLEKQYNNDDPHLSEIGPCFLEHQDGFWIYSEYCNNHLDACMELSKLMKDSRYQHFFEACRLLQQMIDIAIDGFLLXPVQKICKYPLQLAELLKYXAQDHSDYRYVAAALAVMRNVXQQINERKRRLENIDKIAQWQASVLDWEGEDILDRSSELIYXGEMAWIYQPYGRNQQRVFFLFDHQMVLCKKDLIRRDILYYKGRIDMDKYEVVDIEDGRDDDFNVSMKNAFKLHNKEXEEIHLFFAKKLEEKIRWLRAFREERKMVQEDEKIGFEISENQKRQAAMXVRKVPKQKGVNSARSVPPSYPPPQDPLNHGQYLVPDGIAQSQVFEFXEPKRSQSPFWQNFSRCLGSIDRSMEGFKXEPX

SEQ ID NO: 3075 - protein, 64 aa, Homo sapiens
MANRELAFKAGDVIKVLDASNKDWWWGQIDDEEGWFPASFVRSESANAICVPSHLCWLKNQSQG

SEQ ID NO: 3076 - protein, 489 aa, Homo sapiens
  MOD_RES (20)..(20): Selenocysteine
  MOD_RES (26)..(26): Selenocysteine
  MOD_RES (28)..(28): Selenocysteine
  MOD_RES (31)..(31): Selenocysteine
  MOD_RES (87)..(87): Selenocysteine
  MOD_RES (214)..(214): Selenocysteine
  MOD_RES (233)..(233): Selenocysteine
  MOD_RES (254)..(254): Selenocysteine
  MOD_RES (295)..(295): Selenocysteine
  MOD_RES (372)..(372): Selenocysteine
  MOD_RES (421)..(421): Selenocysteine
  MOD_RES (468)..(468): Selenocysteine
  MOD_RES (485)..(485): Selenocysteine
MHSYNIVKNKVIISWHQQAXPGMWAXVXSAXGEWGMLWVNQEDEVEEGPSDVQNGHLDPNSDCLCLGRPLQNRDQMRANVINEIMSXERHYIKHLKDICEGYLKQCRKRRDMFSDEQLKVIFGNIEDIYRFQMGFVRDLEKQYNNDDPHLSEIGPCFLEHQDGFWIYSEYCNNHLDACMELSKLMKDSRYQHFFEACRLLQQMIDIAIDGFLLXPVQKICKYPLQLAELLKYXAQDHSDYRYVAAALAVMRNVXQQINERKRRLENIDKIAQWQASVLDWEGEDILDRSSELIYXGEMAWIYQPYGRNQQRVFFLFDHQMVLCKKDLIRRDILYYKGRIDMDKYEVVDIEDGRDDDFNVSMKNAFKLHNKEXEEIHLFFAKKLEEKIRWLRAFREERKMVQEDEKIGFEISENQKRQAAMXVRKVPKQKGVNSARSVPPSYPPPQDPLNHGQYLVPDGIAQSQVFEFXEPKRSQSPFWQNFSRLXPFKK

SEQ ID NO: 3077 - protein, 454 aa, Homo sapiens
  MOD_RES (52)..(52): Selenocysteine
  MOD_RES (179)..(179): Selenocysteine
  MOD_RES (198)..(198): Selenocysteine
  MOD_RES (219)..(219): Selenocysteine
  MOD_RES (260)..(260): Selenocysteine
  MOD_RES (337)..(337): Selenocysteine
  MOD_RES (386)..(386): Selenocysteine
  MOD_RES (433)..(433): Selenocysteine
  MOD_RES (450)..(450): Selenocysteine
MLWVNQEDEVEEGPSDVQNGHLDPNSDCLCLGRPLQNRDQMRANVINEIMSXERHYIKHLKDICEGYLKQCRKRRDMFSDEQLKVIFGNIEDIYRFQMGFVRDLEKQYNNDDPHLSEIGPCFLEHQDGFWIYSEYCNNHLDACMELSKLMKDSRYQHFFEACRLLQQMIDIAIDGFLLXPVQKICKYPLQLAELLKYXAQDHSDYRYVAAALAVMRNVXQQINERKRRLENIDKIAQWQASVLDWEGEDILDRSSELIYXGEMAWIYQPYGRNQQRVFFLFDHQMVLCKKDLIRRDILYYKGRIDMDKYEVVDIEDGRDDDFNVSMKNAFKLHNKEXEEIHLFFAKKLEEKIRWLRAFREERKMVQEDEKIGFEISENQKRQAAMXVRKVPKQKGVNSARSVPPSYPPPQDPLNHGQYLVPDGIAQSQVFEFXEPKRSQSPFWQNFSRLXPFKK

SEQ ID NO: 3078 - protein, 483 aa, Homo sapiens
  MOD_RES (13)..(13): Selenocysteine
  MOD_RES (28)..(28): Selenocysteine
  MOD_RES (121)..(121): Selenocysteine
  MOD_RES (248)..(248): Selenocysteine
  MOD_RES (267)..(267): Selenocysteine
  MOD_RES (288)..(288): Selenocysteine
  MOD_RES (329)..(329): Selenocysteine
  MOD_RES (406)..(406): Selenocysteine
  MOD_RES (455)..(455): Selenocysteine
  MOD_RES (466)..(466): Selenocysteine
  MOD_RES (481)..(481): Selenocysteine
MQWIRGGSGMLIXGDSIVSAEAVWDHVXMANRELAFKAGDVIKVLDASNKDWWWGQIDDEEGWFPASFVRLWVNQEDEVEEGPSDVQNGHLDPNSDCLCLGRPLQNRDQMRANVINEIMSXERHYIKHLKDICEGYLKQCRKRRDMFSDEQLKVIFGNIEDIYRFQMGFVRDLEKQYNNDDPHLSEIGPCFLEHQDGFWIYSEYCNNHLDACMELSKLMKDSRYQHFFEACRLLQQMIDIAIDGFLLXPVQKICKYPLQLAELLKYXAQDHSDYRYVAAALAVMRNVXQQINERKRRLENIDKIAQWQASVLDWEGEDILDRSSELIYXGEMAWIYQPYGRNQQRVFFLFDHQMVLCKKDLIRRDILYYKGRIDMDKYEVVDIEDGRDDDFNVSMKNAFKLHNKEXEEIHLFFAKKLEEKIRWLRAFREERKMVQEDEKIGFEISENQKRQAAMXVRKVPKQKGGXGEGEIEFVGFFAGPXPA

SEQ ID NO: 3079 - protein, 487 aa, Homo sapiens
  MOD_RES (13)..(13): Selenocysteine
  MOD_RES (28)..(28): Selenocysteine
  MOD_RES (121)..(121): Selenocysteine
  MOD_RES (248)..(248): Selenocysteine
  MOD_RES (267)..(267): Selenocysteine
  MOD_RES (288)..(288): Selenocysteine
  MOD_RES (329)..(329): Selenocysteine
  MOD_RES (406)..(406): Selenocysteine
  MOD_RES (455)..(455): Selenocysteine
  MOD_RES (482)..(482): Selenocysteine
MQWIRGGSGMLIXGDSIVSAEAVWDHVXMANRELAFKAGDVIKVLDASNKDWWWGQIDDEEGWFPASFVRLWVNQEDEVEEGPSDVQNGHLDPNSDCLCLGRPLQNRDQMRANVINEIMSXERHYIKHLKDICEGYLKQCRKRRDMFSDEQLKVIFGNIEDIYRFQMGFVRDLEKQYNNDDPHLSEIGPCFLEHQDGFWIYSEYCNNHLDACMELSKLMKDSRYQHFFEACRLLQQMIDIAIDGFLLXPVQKICKYPLQLAELLKYXAQDHSDYRYVAAALAVMRNVXQQINERKRRLENIDKIAQWQASVLDWEGEDILDRSSELIYXGEMAWIYQPYGRNQQRVFFLFDHQMVLCKKDLIRRDILYYKGRIDMDKYEVVDIEDGRDDDFNVSMKNAFKLHNKEXEEIHLFFAKKLEEKIRWLRAFREERKMVQEDEKIGFEISENQKRQAAMXVRKLPFPQLSEARICSPKGFASVFNGXCCGES

SEQ ID NO: 3080 - protein, 463 aa, Homo sapiens
  MOD_RES (61)..(61): Selenocysteine
  MOD_RES (188)..(188): Selenocysteine
  MOD_RES (207)..(207): Selenocysteine
  MOD_RES (228)..(228): Selenocysteine
  MOD_RES (269)..(269): Selenocysteine
  MOD_RES (346)..(346): Selenocysteine
  MOD_RES (395)..(395): Selenocysteine
  MOD_RES (442)..(442): Selenocysteine
  MOD_RES (459)..(459): Selenocysteine
MQWIRGGSGMLWVNQEDEVEEGPSDVQNGHLDPNSDCLCLGRPLQNRDQMRANVINEIMSXERHYIKHLKDICEGYLKQCRKRRDMFSDEQLKVIFGNIEDIYRFQMGFVRDLEKQYNNDDPHLSEIGPCFLEHQDGFWIYSEYCNNHLDACMELSKLMKDSRYQHFFEACRLLQQMIDIAIDGFLLXPVQKICKYPLQLAELLKYXAQDHSDYRYVAAALAVMRNVXQQINERKRRLENIDKIAQWQASVLDWEGEDILDRSSELIYXGEMAWIYQPYGRNQQRVFFLFDHQMVLCKKDLIRRDILYYKGRIDMDKYEVVDIEDGRDDDFNVSMKNAFKLHNKEXEEIHLFFAKKLEEKIRWLRAFREERKMVQEDEKIGFEISENQKRQAAMXVRKVPKQKGVNSARSVPPSYPPPQDPLNHGQYLVPDGIAQSQVFEFXEPKRSQSPFWQNFSRLXPFKK

SEQ ID NO: 3081 - protein, 108 aa, Homo sapiens
  MOD_RES (12)..(12): Selenocysteine
MRANVINEIMSXERHYIKHLKDICEGYLKQCRKRRDMFSDEQLKVIFGNIEDIYRFQMGFVRDLEKQYNNDDPHLSEIGPCFLEHQDGFWIYSEYCNNHLDACMELSK

SEQ ID NO: 3082 - protein, 110 aa, Homo sapiens
  MOD_RES (12)..(12): Selenocysteine
MRANVINEIMSXERHYIKHLKDICEGYLKQCRKRRDMFSDEQLKVIFGNIEDIYRFQMGFVRDLEKQYNNDDPHLSEIGPCFLEHQDGFWIYSEYCNNHLDACMELSKLM

SEQ ID NO: 3083 - protein, 414 aa, Homo sapiens
  MOD_RES (12)..(12): Selenocysteine
  MOD_RES (139)..(139): Selenocysteine
  MOD_RES (158)..(158): Selenocysteine
  MOD_RES (179)..(179): Selenocysteine
  MOD_RES (220)..(220): Selenocysteine
  MOD_RES (297)..(297): Selenocysteine
  MOD_RES (346)..(346): Selenocysteine
  MOD_RES (393)..(393): Selenocysteine
  MOD_RES (410)..(410): Selenocysteine
MRANVINEIMSXERHYIKHLKDICEGYLKQCRKRRDMFSDEQLKVIFGNIEDIYRFQMGFVRDLEKQYNNDDPHLSEIGPCFLEHQDGFWIYSEYCNNHLDACMELSKLMKDSRYQHFFEACRLLQQMIDIAIDGFLLXPVQKICKYPLQLAELLKYXAQDHSDYRYVAAALAVMRNVXQQINERKRRLENIDKIAQWQASVLDWEGEDILDRSSELIYXGEMAWIYQPYGRNQQRVFFLFDHQMVLCKKDLIRRDILYYKGRIDMDKYEVVDIEDGRDDDFNVSMKNAFKLHNKEXEEIHLFFAKKLEEKIRWLRAFREERKMVQEDEKIGFEISENQKRQAAMXVRKVPKQKGVNSARSVPPSYPPPQDPLNHGQYLVPDGIAQSQVFEFXEPKRSQSPFWQNFSRLXPFKK

SEQ ID NO: 3084 - protein, 529 aa, Homo sapiens
  MOD_RES (19)..(19): Selenocysteine
  MOD_RES (34)..(34): Selenocysteine
  MOD_RES (127)..(127): Selenocysteine
  MOD_RES (254)..(254): Selenocysteine
  MOD_RES (273)..(273): Selenocysteine
  MOD_RES (294)..(294): Selenocysteine
  MOD_RES (335)..(335): Selenocysteine
  MOD_RES (412)..(412): Selenocysteine
  MOD_RES (461)..(461): Selenocysteine
  MOD_RES (508)..(508): Selenocysteine
  MOD_RES (525)..(525): Selenocysteine
MSVALAAPHASARSRSLIXGDSIVSAEAVWDHVXMANRELAFKAGDVIKVLDASNKDWWWGQIDDEEGWFPASFVRLWVNQEDEVEEGPSDVQNGHLDPNSDCLCLGRPLQNRDQMRANVINEIMSXERHYIKHLKDICEGYLKQCRKRRDMFSDEQLKVIFGNIEDIYRFQMGFVRDLEKQYNNDDPHLSEIGPCFLEHQDGFWIYSEYCNNHLDACMELSKLMKDSRYQHFFEACRLLQQMIDIAIDGFLLXPVQKICKYPLQLAELLKYXAQDHSDYRYVAAALAVMRNVXQQINERKRRLENIDKIAQWQASVLDWEGEDILDRSSELIYXGEMAWIYQPYGRNQQRVFFLFDHQMVLCKKDLIRRDILYYKGRIDMDKYEVVDIEDGRDDDFNVSMKNAFKLHNKEXEEIHLFFAKKLEEKIRWLRAFREERKMVQEDEKIGFEISENQKRQAAMXVRKVPKQKGVNSARSVPPSYPPPQDPLNHGQYLVPDGIAQSQVFEFXEPKRSQSPFWQNFSRLXPFKK

SEQ ID NO: 3085 - protein, 458 aa, Homo sapiens
  MOD_RES (2)..(2): Selenocysteine
  MOD_RES (6)..(6): Selenocysteine
  MOD_RES (21)..(21): Selenocysteine
  MOD_RES (114)..(114): Selenocysteine
  MOD_RES (241)..(241): Selenocysteine
  MOD_RES (260)..(260): Selenocysteine
  MOD_RES (281)..(281): Selenocysteine
  MOD_RES (322)..(322): Selenocysteine
  MOD_RES (399)..(399): Selenocysteine
  MOD_RES (448)..(448): Selenocysteine
MXLLIXGDSIVSAEAVWDHVXMANRELAFKAGDVIKVLDASNKDWWWGQIDDEEGWFPASFVRLWVNQEDEVEEGPSDVQNGHLDPNSDCLCLGRPLQNRDQMRANVINEIMSXERHYIKHLKDICEGYLKQCRKRRDMFSDEQLKVIFGNIEDIYRFQMGFVRDLEKQYNNDDPHLSEIGPCFLEHQDGFWIYSEYCNNHLDACMELSKLMKDSRYQHFFEACRLLQQMIDIAIDGFLLXPVQKICKYPLQLAELLKYXAQDHSDYRYVAAALAVMRNVXQQINERKRRLENIDKIAQWQASVLDWEGEDILDRSSELIYXGEMAWIYQPYGRNQQRVFFLFDHQMVLCKKDLIRRDILYYKGRIDMDKYEVVDIEDGRDDDFNVSMKNAFKLHNKEXEEIHLFFAKKLEEKIRWLRAFREERKMVQEDEKIGFEISENQKRQAAMXVRKVPKQKGS

SEQ ID NO: 3086 - protein, 516 aa, Homo sapiens
  MOD_RES (2)..(2): Selenocysteine
  MOD_RES (6)..(6): Selenocysteine
  MOD_RES (21)..(21): Selenocysteine
  MOD_RES (114)..(114): Selenocysteine
  MOD_RES (241)..(241): Selenocysteine
  MOD_RES (260)..(260): Selenocysteine
  MOD_RES (281)..(281): Selenocysteine
  MOD_RES (322)..(322): Selenocysteine
  MOD_RES (399)..(399): Selenocysteine
  MOD_RES (448)..(448): Selenocysteine
  MOD_RES (495)..(495): Selenocysteine
  MOD_RES (512)..(512): Selenocysteine
MXLLIXGDSIVSAEAVWDHVXMANRELAFKAGDVIKVLDASNKDWWWGQIDDEEGWFPASFVRLWVNQEDEVEEGPSDVQNGHLDPNSDCLCLGRPLQNRDQMRANVINEIMSXERHYIKHLKDICEGYLKQCRKRRDMFSDEQLKVIFGNIEDIYRFQMGFVRDLEKQYNNDDPHLSEIGPCFLEHQDGFWIYSEYCNNHLDACMELSKLMKDSRYQHFFEACRLLQQMIDIAIDGFLLXPVQKICKYPLQLAELLKYXAQDHSDYRYVAAALAVMRNVXQQINERKRRLENIDKIAQWQASVLDWEGEDILDRSSELIYXGEMAWIYQPYGRNQQRVFFLFDHQMVLCKKDLIRRDILYYKGRIDMDKYEVVDIEDGRDDDFNVSMKNAFKLHNKEXEEIHLFFAKKLEEKIRWLRAFREERKMVQEDEKIGFEISENQKRQAAMXVRKVPKQKGVNSARSVPPSYPPPQDPLNHGQYLVPDGIAQSQVFEFXEPKRSQSPFWQNFSRLXPFKK

SEQ ID NO: 3087 - protein, 564 aa, Homo sapiens
  MOD_RES (2)..(2): Selenocysteine
  MOD_RES (6)..(6): Selenocysteine
  MOD_RES (21)..(21): Selenocysteine
  MOD_RES (114)..(114): Selenocysteine
  MOD_RES (241)..(241): Selenocysteine
  MOD_RES (260)..(260): Selenocysteine
  MOD_RES (281)..(281): Selenocysteine
  MOD_RES (322)..(322): Selenocysteine
  MOD_RES (399)..(399): Selenocysteine
  MOD_RES (448)..(448): Selenocysteine
  MOD_RES (495)..(495): Selenocysteine
  MOD_RES (556)..(556): Selenocysteine
MXLLIXGDSIVSAEAVWDHVXMANRELAFKAGDVIKVLDASNKDWWWGQIDDEEGWFPASFVRLWVNQEDEVEEGPSDVQNGHLDPNSDCLCLGRPLQNRDQMRANVINEIMSXERHYIKHLKDICEGYLKQCRKRRDMFSDEQLKVIFGNIEDIYRFQMGFVRDLEKQYNNDDPHLSEIGPCFLEHQDGFWIYSEYCNNHLDACMELSKLMKDSRYQHFFEACRLLQQMIDIAIDGFLLXPVQKICKYPLQLAELLKYXAQDHSDYRYVAAALAVMRNVXQQINERKRRLENIDKIAQWQASVLDWEGEDILDRSSELIYXGEMAWIYQPYGRNQQRVFFLFDHQMVLCKKDLIRRDILYYKGRIDMDKYEVVDIEDGRDDDFNVSMKNAFKLHNKEXEEIHLFFAKKLEEKIRWLRAFREERKMVQEDEKIGFEISENQKRQAAMXVRKVPKQKGVNSARSVPPSYPPPQDPLNHGQYLVPDGIAQSQVFEFXEPKRSQSPFWQNFSRYCEGIKKPNRSKGVSDYDDAGVDFCSGNILHSGCFFYHWGFPCCSXSGSLQFCI

SEQ ID NO: 3088 - protein, 136 aa, Homo sapiens
  MOD_RES (2)..(2): Selenocysteine
  MOD_RES (6)..(6): Selenocysteine
  MOD_RES (21)..(21): Selenocysteine
  MOD_RES (114)..(114): Selenocysteine
MXLLIXGDSIVSAEAVWDHVXMANRELAFKAGDVIKVLDASNKDWWWGQIDDEEGWFPASFVRLWVNQEDEVEEGPSDVQNGHLDPNSDCLCLGRPLQNRDQMRANVINEIMSXERHYIKHLKDICEKVGGDMILL

SEQ ID NO: 3089 - protein, 35 aa, Homo sapiens
  MOD_RES (1)..(1): Any amino acid
  MOD_RES (15)..(15): Selenocysteine
XFEISENQKRQAAMXVRKVPKQKDIYPEEIVIIKV

SEQ ID NO: 3090 - protein, 263 aa, Homo sapiens
  MOD_RES (1)..(1): Any amino acid
  MOD_RES (22)..(22): Selenocysteine
  MOD_RES (149)..(149): Selenocysteine
  MOD_RES (168)..(168): Selenocysteine
  MOD_RES (189)..(189): Selenocysteine
  MOD_RES (230)..(230): Selenocysteine
XGRPLQNRDQMRANVINEIMSXERHYIKHLKDICEGYLKQCRKRRDMFSDEQLKVIFGNIEDIYRFQMGFVRDLEKQYNNDDPHLSEIGPCFLEHQDGFWIYSEYCNNHLDACMELSKLMKDSRYQHFFEACRLLQQMIDIAIDGFLLXPVQKICKYPLQLAELLKYXAQDHSDYRYVAAALAVMRNVXQQINERKRRLENIDKIAQWQASVLDWEGEDILDRSSELIYXGEMAWIYQPYGRNQQRVFFLFDHQMVLCKKQMC

SEQ ID NO: 3091 - protein, 91 aa, Homo sapiens
  MOD_RES (1)..(1): Any amino acid
  MOD_RES (7)..(7): Selenocysteine
  MOD_RES (48)..(48): Selenocysteine
  MOD_RES (85)..(85): Selenocysteine
XVMRNVXQQINERKRRLENIDKIAQWQASVLDWEGEDILDRSSELIYXGEMAWIYQPYGRNQQRVFFLFDHQMVLCKKALKFLKXRRGRLQ

SEQ ID NO: 3092 - protein, 2068 aa, Homo sapiens
  MOD_RES (118)..(118): Selenocysteine
  MOD_RES (238)..(238): Selenocysteine
  MOD_RES (286)..(286): Selenocysteine
  MOD_RES (290)..(290): Selenocysteine
  MOD_RES (292)..(292): Selenocysteine
  MOD_RES (294)..(294): Selenocysteine
  MOD_RES (300)..(300): Selenocysteine
  MOD_RES (377)..(377): Selenocysteine
  MOD_RES (398)..(398): Selenocysteine
  MOD_RES (426)..(426): Selenocysteine
  MOD_RES (433)..(433): Selenocysteine
  MOD_RES (448)..(448): Selenocysteine
  MOD_RES (468)..(468): Selenocysteine
  MOD_RES (493)..(493): Selenocysteine
  MOD_RES (540)..(541): Selenocysteine
  MOD_RES (572)..(572): Selenocysteine
  MOD_RES (590)..(590): Selenocysteine
  MOD_RES (619)..(619): Selenocysteine
  MOD_RES (653)..(653): Selenocysteine
  MOD_RES (663)..(663): Selenocysteine
  MOD_RES (685)..(685): Selenocysteine
  MOD_RES (783)..(783): Selenocysteine
  MOD_RES (852)..(852): Selenocysteine
  MOD_RES (894)..(894): Selenocysteine
  MOD_RES (897)..(897): Selenocysteine
  MOD_RES (926)..(926): Selenocysteine
  MOD_RES (953)..(953): Selenocysteine
  MOD_RES (976)..(976): Selenocysteine
  MOD_RES (979)..(979): Selenocysteine
  MOD_RES (988)..(988): Selenocysteine
  MOD_RES (991)..(991): Selenocysteine
  MOD_RES (1002)..(1004): Selenocysteine
  MOD_RES (1009)..(1009): Selenocysteine
  MOD_RES (1031)..(1031): Selenocysteine
  MOD_RES (1039)..(1039): Selenocysteine
  MOD_RES (1065)..(1065): Selenocysteine
  MOD_RES (1078)..(1078): Selenocysteine
  MOD_RES (1084)..(1084): Selenocysteine
  MOD_RES (1146)..(1146): Selenocysteine
  MOD_RES (1150)..(1150): Selenocysteine
  MOD_RES (1164)..(1164): Selenocysteine
  MOD_RES (1168)..(1168): Selenocysteine
  MOD_RES (1198)..(1198): Selenocysteine
  MOD_RES (1206)..(1206): Selenocysteine
  MOD_RES (1217)..(1217): Selenocysteine
  MOD_RES (1290)..(1290): Selenocysteine
  MOD_RES (1302)..(1302): Selenocysteine
  MOD_RES (1345)..(1345): Selenocysteine
  MOD_RES (1348)..(1348): Selenocysteine
  MOD_RES (1359)..(1360): Selenocysteine
  MOD_RES (1382)..(1382): Selenocysteine
  MOD_RES (1423)..(1423): Selenocysteine
  MOD_RES (1432)..(1432): Selenocysteine
  MOD_RES (1443)..(1443): Selenocysteine
  MOD_RES (1449)..(1449): Selenocysteine
  MOD_RES (1468)..(1468): Selenocysteine
  MOD_RES (1473)..(1473): Selenocysteine
  MOD_RES (1486)..(1486): Selenocysteine
  MOD_RES (1526)..(1526): Selenocysteine
  MOD_RES (1634)..(1635): Selenocysteine
  MOD_RES (1640)..(1640): Selenocysteine
  MOD_RES (1646)..(1646): Selenocysteine
  MOD_RES (1666)..(1667): Selenocysteine
  MOD_RES (1671)..(1671): Selenocysteine
  MOD_RES (1674)..(1675): Selenocysteine
  MOD_RES (1691)..(1691): Selenocysteine
  MOD_RES (1693)..(1693): Selenocysteine
  MOD_RES (1700)..(1700): Selenocysteine
  MOD_RES (1704)..(1704): Selenocysteine
  MOD_RES (1706)..(1706): Selenocysteine
  MOD_RES (1748)..(1748): Selenocysteine
  MOD_RES (1752)..(1752): Selenocysteine
  MOD_RES (1770)..(1770): Selenocysteine
  MOD_RES (1813)..(1813): Selenocysteine
  MOD_RES (1843)..(1843): Selenocysteine
  MOD_RES (1846)..(1846): Selenocysteine
  MOD_RES (1888)..(1888): Selenocysteine
  MOD_RES (1904)..(1904): Selenocysteine
  MOD_RES (1921)..(1921): Selenocysteine
  MOD_RES (1933)..(1933): Selenocysteine
  MOD_RES (1989)..(1989): Selenocysteine
  MOD_RES (2009)..(2009): Selenocysteine
  MOD_RES (2035)..(2035): Selenocysteine
MAAQVAPAAASSLGNPPPPPPSELKKAEQQQREEAGGEAAAAAAAERGEMKAAAGQESEGPAVGPPQPLGKELQDGAESNGGGGGGGAGSGGGPGAEPDLKNSNGNAGPRPALNNNLXEPPGGGGGGSSDGVGAPPHSAAAALPPPAYGFGQPYGRSPSAVAAAAAAVFHQQHGGQQSPGLAALQSGGGGGLEPYAGPQQNSHDHGFPNHQYNSYYPNRSAYPPPAPAYALSSPRGGXPGSGAAAAAGSKPPPSSSASASSSSSSFAQQRFGAMGGGGPSAAGGGXPQPXAXPXLNQLLXSPSSARGYQGYPGGDYSGGPQDGGAGKGPADMASQCWGAAAAAAAAAAASGGAQQRSHHAPMSPGSSGGGGQPLARXPQPSSPMDQMGKMRPQPYGGXNPYSQQQGPPSGPQQGHGYPGQPYGSQXPQRYPMXMQGRAQSAMGGLSYXQQIPPYGQQGPSGYGQQGQXPYYNQQSPHPQQQQPPYSQQPPSQXPHAQPSYQQQPQSQPPQLQSSQPPYSQQPSQPPHQQSPAPYPSQQSXXQQHPQSQPPYSQPQAQSPYQQQQPQQPAPSXLSQQAAYPQPQSQQSQQXAYSQQRFPPPQELSQDSFGSQASSAPSMXSSKGGQEDMNLSLQSRPSSLPDLSGSIDDLPMGXEGALSPGVSXSGISSSQGEQSNPAQSPFSPHXSPHLPGIRGPSPSPVGSPASVAQSRSGPLSPAAVPGNQMPPRPPSGQSDSIMHPSMNQSSIAQDRGYMQRNPQMPQYSSPQPGSALSPRQPSGGQIHXGMGSYQQNSMGSYGPQGGQYGPQGGYPRQPNYNALPNANYPSAGMAGGINPMGAGGQMHGQPGIPPYGXLPPGRMSHASMGNRPYGPNMANMPPQVGSGMCPPPGGMNRKXQEXAVAMHVAANSIQNRPPGYPNMNQGGMMGXGPPYGQGINSMAGMINPQGPPYSMGGXMANNSAGMAASPEMMGLGDVKLXPAXKMNNKADGXPKXESKSKKSSSSXXXNEKIXKLYELGGEPERKMWVDRYLAFXEEKAMGMXNLPAVGRKPLDLYRLYVSVKEIGGLXQVNKNKKWRELAXNLNVGXSSSAASSLKKQYIQCLYAFECKIERGEDPPPDIFAAADSKKSQPKIQPPSPAGSGSMQGPQXPQSXSSSMAEGGDLKPPXPASXPHSQIPPLPGMSRSNSVGIQDAFNDGSDSXFQKRNSMXPNPGYQPSMNXSDMMGRMSYEPNKDPYGSMRKAPGSDPFMSSGQGPNGGMGDPYSRAAGPGLGNVAMGPRQHYPYGGPYDRVRXEPGIGPEGNMSXGAPQPNLMPSNPDSGMYSPSRYPPQQQQQQQQRHDSYGNQFSXQGXPSGSPFPSQQXXMYQQQQQVSSPAPLPRPMENRXSPSKSPFLHSGMKMQKAGPPVPASHIAPAPVQPPMIRRDIXFPPGSVEAXQPVLKQRRRLXMKDIGXPEAWRVMMSLKSGLLAESXWALDXINILLYDDNSIMXFNLSQLPGLLELLVEYFRRCLIEIFGILKEYEVGDPGQRXLLDPGRFSKVSSPAPMEGGEEEEELLGPKLEEEEEEEVVENDEEIAFSGKDKPASENSEEKLISKFDKLPVKIVQKNDPFVVDCSDKLGRVQEFDSGLLHWRIGGGDXXEHIQXHFESKXELLPSRPHAPCPPAPRKHVXXAEGXPGXXDQEGPPPDGPPEKRIXAXMDDMLSXRSSXLXEDGAKSSEAIKESSKFPFGISPAQSHRNIKILEDEPHSKDEXPLCXLLDWQDSLAKRCVCVSNXIRSLSFVPGNDFEMSKHPGLLLILGKLILLHHKHPERKQAPLXYEKEEEQDQGVSCNKVEWWWDCLEMLRENXLVXLANISGQLDLSPYPESICLPVLDGLLHWAVCPSAEAQDPFSXLGPNAVLSPQRLVLEXLSKLSIQDNNVDLILAXPPFSRLEKLYSXMVRFLSDRKNPVCREMAVVLLANLAQGDSLAARAIAVQKGSIGNLLGFLEDSLAAXQFQQSQASLLHMQNPPFEPXSVDMMRRAARALLALAKVDENHSEFXLYESRLLDISVSPLMNSLVSQVICDVLFLIGQS

SEQ ID NO: 3093 - protein, 2285 aa, Homo sapiens
  MOD_RES (118)..(118): Selenocysteine
  MOD_RES (238)..(238): Selenocysteine
  MOD_RES (286)..(286): Selenocysteine
  MOD_RES (290)..(290): Selenocysteine
  MOD_RES (292)..(292): Selenocysteine
  MOD_RES (294)..(294): Selenocysteine
  MOD_RES (300)..(300): Selenocysteine
  MOD_RES (377)..(377): Selenocysteine
  MOD_RES (398)..(398): Selenocysteine
  MOD_RES (426)..(426): Selenocysteine
  MOD_RES (433)..(433): Selenocysteine
  MOD_RES (448)..(448): Selenocysteine
  MOD_RES (468)..(468): Selenocysteine
  MOD_RES (493)..(493): Selenocysteine
  MOD_RES (540)..(541): Selenocysteine
  MOD_RES (572)..(572): Selenocysteine
  MOD_RES (590)..(590): Selenocysteine
  MOD_RES (619)..(619): Selenocysteine
  MOD_RES (653)..(653): Selenocysteine
  MOD_RES (663)..(663): Selenocysteine
  MOD_RES (685)..(685): Selenocysteine
  MOD_RES (783)..(783): Selenocysteine
  MOD_RES (852)..(852): Selenocysteine
  MOD_RES (894)..(894): Selenocysteine
  MOD_RES (897)..(897): Selenocysteine
  MOD_RES (926)..(926): Selenocysteine
  MOD_RES (953)..(953): Selenocysteine
  MOD_RES (976)..(976): Selenocysteine
  MOD_RES (979)..(979): Selenocysteine
  MOD_RES (988)..(988): Selenocysteine
  MOD_RES (991)..(991): Selenocysteine
  MOD_RES (1002)..(1004): Selenocysteine
  MOD_RES (1009)..(1009): Selenocysteine
  MOD_RES (1031)..(1031): Selenocysteine
  MOD_RES (1039)..(1039): Selenocysteine
  MOD_RES (1065)..(1065): Selenocysteine
  MOD_RES (1078)..(1078): Selenocysteine
  MOD_RES (1084)..(1084): Selenocysteine
  MOD_RES (1146)..(1146): Selenocysteine
  MOD_RES (1150)..(1150): Selenocysteine
  MOD_RES (1164)..(1164): Selenocysteine
  MOD_RES (1168)..(1168): Selenocysteine
  MOD_RES (1198)..(1198): Selenocysteine
  MOD_RES (1206)..(1206): Selenocysteine
  MOD_RES (1217)..(1217): Selenocysteine
  MOD_RES (1290)..(1290): Selenocysteine
  MOD_RES (1302)..(1302): Selenocysteine
  MOD_RES (1345)..(1345): Selenocysteine
  MOD_RES (1348)..(1348): Selenocysteine
  MOD_RES (1359)..(1360): Selenocysteine
  MOD_RES (1376)..(1376): Selenocysteine
  MOD_RES (1395)..(1395): Selenocysteine
  MOD_RES (1438)..(1438): Selenocysteine
  MOD_RES (1440)..(1440): Selenocysteine
  MOD_RES (1443)..(1443): Selenocysteine
  MOD_RES (1470)..(1470): Selenocysteine
  MOD_RES (1496)..(1496): Selenocysteine
  MOD_RES (1505)..(1505): Selenocysteine
  MOD_RES (1514)..(1514): Selenocysteine
  MOD_RES (1529)..(1529): Selenocysteine
  MOD_RES (1535)..(1535): Selenocysteine
  MOD_RES (1550)..(1550): Selenocysteine
  MOD_RES (1565)..(1565): Selenocysteine
  MOD_RES (1599)..(1599): Selenocysteine
  MOD_RES (1640)..(1640): Selenocysteine
  MOD_RES (1649)..(1649): Selenocysteine
  MOD_RES (1660)..(1660): Selenocysteine
  MOD_RES (1666)..(1666): Selenocysteine
  MOD_RES (1685)..(1685): Selenocysteine
  MOD_RES (1690)..(1690): Selenocysteine
  MOD_RES (1703)..(1703): Selenocysteine
  MOD_RES (1743)..(1743): Selenocysteine
  MOD_RES (1851)..(1852): Selenocysteine
  MOD_RES (1857)..(1857): Selenocysteine
  MOD_RES (1863)..(1863): Selenocysteine
  MOD_RES (1883)..(1884): Selenocysteine
  MOD_RES (1888)..(1888): Selenocysteine
  MOD_RES (1891)..(1892): Selenocysteine
  MOD_RES (1908)..(1908): Selenocysteine
  MOD_RES (1910)..(1910): Selenocysteine
  MOD_RES (1917)..(1917): Selenocysteine
  MOD_RES (1921)..(1921): Selenocysteine
  MOD_RES (1923)..(1923): Selenocysteine
  MOD_RES (1965)..(1965): Selenocysteine
  MOD_RES (1969)..(1969): Selenocysteine
  MOD_RES (1987)..(1987): Selenocysteine
  MOD_RES (2030)..(2030): Selenocysteine
  MOD_RES (2060)..(2060): Selenocysteine
  MOD_RES (2063)..(2063): Selenocysteine
  MOD_RES (2105)..(2105): Selenocysteine
  MOD_RES (2121)..(2121): Selenocysteine
  MOD_RES (2138)..(2138): Selenocysteine
  MOD_RES (2150)..(2150): Selenocysteine
  MOD_RES (2206)..(2206): Selenocysteine
  MOD_RES (2226)..(2226): Selenocysteine
  MOD_RES (2252)..(2252): Selenocysteine
MAAQVAPAAASSLGNPPPPPPSELKKAEQQQREEAGGEAAAAAAAERGEMKAAAGQESEGPAVGPPQPLGKELQDGAESNGGGGGGGAGSGGGPGAEPDLKNSNGNAGPRPALNNNLXEPPGGGGGGSSDGVGAPPHSAAAALPPPAYGFGQPYGRSPSAVAAAAAAVFHQQHGGQQSPGLAALQSGGGGGLEPYAGPQQNSHDHGFPNHQYNSYYPNRSAYPPPAPAYALSSPRGGXPGSGAAAAAGSKPPPSSSASASSSSSSFAQQRFGAMGGGGPSAAGGGXPQPXAXPXLNQLLXSPSSARGYQGYPGGDYSGGPQDGGAGKGPADMASQCWGAAAAAAAAAAASGGAQQRSHHAPMSPGSSGGGGQPLARXPQPSSPMDQMGKMRPQPYGGXNPYSQQQGPPSGPQQGHGYPGQPYGSQXPQRYPMXMQGRAQSAMGGLSYXQQIPPYGQQGPSGYGQQGQXPYYNQQSPHPQQQQPPYSQQPPSQXPHAQPSYQQQPQSQPPQLQSSQPPYSQQPSQPPHQQSPAPYPSQQSXXQQHPQSQPPYSQPQAQSPYQQQQPQQPAPSXLSQQAAYPQPQSQQSQQXAYSQQRFPPPQELSQDSFGSQASSAPSMXSSKGGQEDMNLSLQSRPSSLPDLSGSIDDLPMGXEGALSPGVSXSGISSSQGEQSNPAQSPFSPHXSPHLPGIRGPSPSPVGSPASVAQSRSGPLSPAAVPGNQMPPRPPSGQSDSIMHPSMNQSSIAQDRGYMQRNPQMPQYSSPQPGSALSPRQPSGGQIHXGMGSYQQNSMGSYGPQGGQYGPQGGYPRQPNYNALPNANYPSAGMAGGINPMGAGGQMHGQPGIPPYGXLPPGRMSHASMGNRPYGPNMANMPPQVGSGMCPPPGGMNRKXQEXAVAMHVAANSIQNRPPGYPNMNQGGMMGXGPPYGQGINSMAGMINPQGPPYSMGGXMANNSAGMAASPEMMGLGDVKLXPAXKMNNKADGXPKXESKSKKSSSSXXXNEKIXKLYELGGEPERKMWVDRYLAFXEEKAMGMXNLPAVGRKPLDLYRLYVSVKEIGGLXQVNKNKKWRELAXNLNVGXSSSAASSLKKQYIQCLYAFECKIERGEDPPPDIFAAADSKKSQPKIQPPSPAGSGSMQGPQXPQSXSSSMAEGGDLKPPXPASXPHSQIPPLPGMSRSNSVGIQDAFNDGSDSXFQKRNSMXPNPGYQPSMNXSDMMGRMSYEPNKDPYGSMRKAPGSDPFMSSGQGPNGGMGDPYSRAAGPGLGNVAMGPRQHYPYGGPYDRVRXEPGIGPEGNMSXGAPQPNLMPSNPDSGMYSPSRYPPQQQQQQQQRHDSYGNQFSXQGXPSGSPFPSQQXXMYQQQQQNYKRPMDGXYGPPAKRHEGEMYSVPYSXGQGQPQQQQLPPAQPQPASQQQAAQPSPQQDVYNQYGNAYPAXAXAAXERRPAGGPQNQFPFQFGRDRVSAPPGXNAQQNMPPQMMGGPIQASAEVAQQGXMWQGRNDMXYNYANRQSXGSAPQGPAYHGVNRXDEMLHXDQRANHEGSWPSHGXRQPPYGPSAPVPPMXRPPPSNYQPPPSMQNHIPQVSSPAPLPRPMENRXSPSKSPFLHSGMKMQKAGPPVPASHIAPAPVQPPMIRRDIXFPPGSVEAXQPVLKQRRRLXMKDIGXPEAWRVMMSLKSGLLAESXWALDXINILLYDDNSIMXFNLSQLPGLLELLVEYFRRCLIEIFGILKEYEVGDPGQRXLLDPGRFSKVSSPAPMEGGEEEEELLGPKLEEEEEEEVVENDEEIAFSGKDKPASENSEEKLISKFDKLPVKIVQKNDPFVVDCSDKLGRVQEFDSGLLHWRIGGGDXXEHIQXHFESKXELLPSRPHAPCPPAPRKHVXXAEGXPGXXDQEGPPPDGPPEKRIXAXMDDMLSXRSSXLXEDGAKSSEAIKESSKFPFGISPAQSHRNIKILEDEPHSKDEXPLCXLLDWQDSLAKRCVCVSNXIRSLSFVPGNDFEMSKHPGLLLILGKLILLHHKHPERKQAPLXYEKEEEQDQGVSCNKVEWWWDCLEMLRENXLVXLANISGQLDLSPYPESICLPVLDGLLHWAVCPSAEAQDPFSXLGPNAVLSPQRLVLEXLSKLSIQDNNVDLILAXPPFSRLEKLYSXMVRFLSDRKNPVCREMAVVLLANLAQGDSLAARAIAVQKGSIGNLLGFLEDSLAAXQFQQSQASLLHMQNPPFEPXSVDMMRRAARALLALAKVDENHSEFXLYESRLLDISVSPLMNSLVSQVICDVLFLIGQS

SEQ ID NO: 3094 - protein, 123 aa, Homo sapiens
  MOD_RES (15)..(15): Selenocysteine
  MOD_RES (43)..(43): Selenocysteine
  MOD_RES (50)..(50): Selenocysteine
  MOD_RES (65)..(65): Selenocysteine
  MOD_RES (85)..(85): Selenocysteine
  MOD_RES (110)..(110): Selenocysteine
MDQMGKMRPQPYGGXNPYSQQQGPPSGPQQGHGYPGQPYGSQXPQRYPMXMQGRAQSAMGGLSYXQQIPPYGQQGPSGYGQQGQXPYYNQQSPHPQQQQPPYSQQPPSQXPHAQPSYQQQPQS

SEQ ID NO: 3095 - protein, 206 aa, Homo sapiens
  MOD_RES (15)..(15): Selenocysteine
  MOD_RES (43)..(43): Selenocysteine
  MOD_RES (50)..(50): Selenocysteine
  MOD_RES (65)..(65): Selenocysteine
  MOD_RES (85)..(85): Selenocysteine
  MOD_RES (110)..(110): Selenocysteine
  MOD_RES (157)..(158): Selenocysteine
  MOD_RES (189)..(189): Selenocysteine
MDQMGKMRPQPYGGXNPYSQQQGPPSGPQQGHGYPGQPYGSQXPQRYPMXMQGRAQSAMGGLSYXQQIPPYGQQGPSGYGQQGQXPYYNQQSPHPQQQQPPYSQQPPSQXPHAQPSYQQQPQSQPPQLQSSQPPYSQQPSQPPHQQSPAPYPSQQSXXQQHPQSQPPYSQPQAQSPYQQQQPQQPAPSXLSQQAAYPQPQSQQSQQ

SEQ ID NO: 3096 - protein, 1141 aa, Homo sapiens
  MOD_RES (15)..(15): Selenocysteine
  MOD_RES (43)..(43): Selenocysteine
  MOD_RES (50)..(50): Selenocysteine
  MOD_RES (65)..(65): Selenocysteine
  MOD_RES (85)..(85): Selenocysteine
  MOD_RES (110)..(110): Selenocysteine
  MOD_RES (157)..(158): Selenocysteine
  MOD_RES (189)..(189): Selenocysteine
  MOD_RES (207)..(207): Selenocysteine
  MOD_RES (236)..(236): Selenocysteine
  MOD_RES (270)..(270): Selenocysteine
  MOD_RES (280)..(280): Selenocysteine
  MOD_RES (302)..(302): Selenocysteine
  MOD_RES (400)..(400): Selenocysteine
  MOD_RES (469)..(469): Selenocysteine
  MOD_RES (493)..(493): Selenocysteine
  MOD_RES (510)..(510): Selenocysteine
  MOD_RES (513)..(513): Selenocysteine
  MOD_RES (542)..(542): Selenocysteine
  MOD_RES (569)..(569): Selenocysteine
  MOD_RES (592)..(592): Selenocysteine
  MOD_RES (595)..(595): Selenocysteine
  MOD_RES (604)..(604): Selenocysteine
  MOD_RES (607)..(607): Selenocysteine
  MOD_RES (618)..(620): Selenocysteine
  MOD_RES (625)..(625): Selenocysteine
  MOD_RES (647)..(647): Selenocysteine
  MOD_RES (655)..(655): Selenocysteine
  MOD_RES (681)..(681): Selenocysteine
  MOD_RES (694)..(694): Selenocysteine
  MOD_RES (700)..(700): Selenocysteine
  MOD_RES (762)..(762): Selenocysteine
  MOD_RES (766)..(766): Selenocysteine
  MOD_RES (780)..(780): Selenocysteine
  MOD_RES (784)..(784): Selenocysteine
  MOD_RES (814)..(814): Selenocysteine
  MOD_RES (822)..(822): Selenocysteine
  MOD_RES (833)..(833): Selenocysteine
  MOD_RES (906)..(906): Selenocysteine
  MOD_RES (918)..(918): Selenocysteine
  MOD_RES (961)..(961): Selenocysteine
  MOD_RES (964)..(964): Selenocysteine
  MOD_RES (975)..(976): Selenocysteine
  MOD_RES (992)..(992): Selenocysteine
  MOD_RES (1011)..(1011): Selenocysteine
  MOD_RES (1054)..(1054): Selenocysteine
  MOD_RES (1056)..(1056): Selenocysteine
  MOD_RES (1059)..(1059): Selenocysteine
  MOD_RES (1086)..(1086): Selenocysteine
  MOD_RES (1112)..(1112): Selenocysteine
  MOD_RES (1121)..(1121): Selenocysteine
  MOD_RES (1130)..(1130): Selenocysteine
MDQMGKMRPQPYGGXNPYSQQQGPPSGPQQGHGYPGQPYGSQXPQRYPMXMQGRAQSAMGGLSYXQQIPPYGQQGPSGYGQQGQXPYYNQQSPHPQQQQPPYSQQPPSQXPHAQPSYQQQPQSQPPQLQSSQPPYSQQPSQPPHQQSPAPYPSQQSXXQQHPQSQPPYSQPQAQSPYQQQQPQQPAPSXLSQQAAYPQPQSQQSQQXAYSQQRFPPPQELSQDSFGSQASSAPSMXSSKGGQEDMNLSLQSRPSSLPDLSGSIDDLPMGXEGALSPGVSXSGISSSQGEQSNPAQSPFSPHXSPHLPGIRGPSPSPVGSPASVAQSRSGPLSPAAVPGNQMPPRPPSGQSDSIMHPSMNQSSIAQDRGYMQRNPQMPQYSSPQPGSALSPRQPSGGQIHXGMGSYQQNSMGSYGPQGGQYGPQGGYPRQPNYNALPNANYPSAGMAGGINPMGAGGQMHGQPGIPPYGXLPPGRMSHASMGNRPYGPNMANAXSGWVRDVSPPGGMNRKXQEXAVAMHVAANSIQNRPPGYPNMNQGGMMGXGPPYGQGINSMAGMINPQGPPYSMGGXMANNSAGMAASPEMMGLGDVKLXPAXKMNNKADGXPKXESKSKKSSSSXXXNEKIXKLYELGGEPERKMWVDRYLAFXEEKAMGMXNLPAVGRKPLDLYRLYVSVKEIGGLXQVNKNKKWRELAXNLNVGXSSSAASSLKKQYIQCLYAFECKIERGEDPPPDIFAAADSKKSQPKIQPPSPAGSGSMQGPQXPQSXSSSMAEGGDLKPPXPASXPHSQIPPLPGMSRSNSVGIQDAFNDGSDSXFQKRNSMXPNPGYQPSMNXSDMMGRMSYEPNKDPYGSMRKAPGSDPFMSSGQGPNGGMGDPYSRAAGPGLGNVAMGPRQHYPYGGPYDRVRXEPGIGPEGNMSXGAPQPNLMPSNPDSGMYSPSRYPPQQQQQQQQRHDSYGNQFSXQGXPSGSPFPSQQXXMYQQQQQNYKRPMDGXYGPPAKRHEGEMYSVPYSXGQGQPQQQQLPPAQPQPASQQQAAQPSPQQDVYNQYGNAYPAXAXAAXERRPAGGPQNQFPFQFGRDRVSAPPGXNAQQNMPPQMMGGPIQASAEVAQQGXMWQGRNDMXYNYANRQSXALPPRAPPIMA

SEQ ID NO: 3097 - protein, 1901 aa, Homo sapiens
  MOD_RES (15)..(15): Selenocysteine
  MOD_RES (43)..(43): Selenocysteine
  MOD_RES (50)..(50): Selenocysteine
  MOD_RES (65)..(65): Selenocysteine
  MOD_RES (85)..(85): Selenocysteine
  MOD_RES (110)..(110): Selenocysteine
  MOD_RES (157)..(158): Selenocysteine
  MOD_RES (189)..(189): Selenocysteine
  MOD_RES (207)..(207): Selenocysteine
  MOD_RES (236)..(236): Selenocysteine
  MOD_RES (270)..(270): Selenocysteine
  MOD_RES (280)..(280): Selenocysteine
  MOD_RES (302)..(302): Selenocysteine
  MOD_RES (400)..(400): Selenocysteine
  MOD_RES (469)..(469): Selenocysteine
  MOD_RES (511)..(511): Selenocysteine
  MOD_RES (514)..(514): Selenocysteine
  MOD_RES (543)..(543): Selenocysteine
  MOD_RES (570)..(570): Selenocysteine
  MOD_RES (593)..(593): Selenocysteine
  MOD_RES (596)..(596): Selenocysteine
  MOD_RES (605)..(605): Selenocysteine
  MOD_RES (608)..(608): Selenocysteine
  MOD_RES (619)..(621): Selenocysteine
  MOD_RES (626)..(626): Selenocysteine
  MOD_RES (648)..(648): Selenocysteine
  MOD_RES (656)..(656): Selenocysteine
  MOD_RES (682)..(682): Selenocysteine
  MOD_RES (695)..(695): Selenocysteine
  MOD_RES (701)..(701): Selenocysteine
  MOD_RES (763)..(763): Selenocysteine
  MOD_RES (767)..(767): Selenocysteine
  MOD_RES (781)..(781): Selenocysteine
  MOD_RES (785)..(785): Selenocysteine
  MOD_RES (814)..(814): Selenocysteine
  MOD_RES (822)..(822): Selenocysteine
  MOD_RES (833)..(833): Selenocysteine
  MOD_RES (906)..(906): Selenocysteine
  MOD_RES (918)..(918): Selenocysteine
  MOD_RES (961)..(961): Selenocysteine
  MOD_RES (964)..(964): Selenocysteine
  MOD_RES (975)..(976): Selenocysteine
  MOD_RES (992)..(992): Selenocysteine
  MOD_RES (1011)..(1011): Selenocysteine
  MOD_RES (1054)..(1054): Selenocysteine
  MOD_RES (1056)..(1056): Selenocysteine
  MOD_RES (1059)..(1059): Selenocysteine
  MOD_RES (1086)..(1086): Selenocysteine
  MOD_RES (1112)..(1112): Selenocysteine
  MOD_RES (1121)..(1121): Selenocysteine
  MOD_RES (1130)..(1130): Selenocysteine
  MOD_RES (1145)..(1145): Selenocysteine
  MOD_RES (1151)..(1151): Selenocysteine
  MOD_RES (1166)..(1166): Selenocysteine
  MOD_RES (1181)..(1181): Selenocysteine
  MOD_RES (1215)..(1215): Selenocysteine
  MOD_RES (1256)..(1256): Selenocysteine
  MOD_RES (1265)..(1265): Selenocysteine
  MOD_RES (1276)..(1276): Selenocysteine
  MOD_RES (1282)..(1282): Selenocysteine
  MOD_RES (1301)..(1301): Selenocysteine
  MOD_RES (1306)..(1306): Selenocysteine
  MOD_RES (1319)..(1319): Selenocysteine
  MOD_RES (1359)..(1359): Selenocysteine
  MOD_RES (1467)..(1468): Selenocysteine
  MOD_RES (1473)..(1473): Selenocysteine
  MOD_RES (1479)..(1479): Selenocysteine
  MOD_RES (1499)..(1500): Selenocysteine
  MOD_RES (1504)..(1504): Selenocysteine
  MOD_RES (1507)..(1508): Selenocysteine
  MOD_RES (1524)..(1524): Selenocysteine
  MOD_RES (1526)..(1526): Selenocysteine
  MOD_RES (1533)..(1533): Selenocysteine
  MOD_RES (1537)..(1537): Selenocysteine
  MOD_RES (1539)..(1539): Selenocysteine
  MOD_RES (1581)..(1581): Selenocysteine
  MOD_RES (1585)..(1585): Selenocysteine
  MOD_RES (1603)..(1603): Selenocysteine
  MOD_RES (1646)..(1646): Selenocysteine
  MOD_RES (1676)..(1676): Selenocysteine
  MOD_RES (1679)..(1679): Selenocysteine
  MOD_RES (1721)..(1721): Selenocysteine
  MOD_RES (1737)..(1737): Selenocysteine
  MOD_RES (1754)..(1754): Selenocysteine
  MOD_RES (1766)..(1766): Selenocysteine
  MOD_RES (1822)..(1822): Selenocysteine
  MOD_RES (1842)..(1842): Selenocysteine
  MOD_RES (1868)..(1868): Selenocysteine
MDQMGKMRPQPYGGXNPYSQQQGPPSGPQQGHGYPGQPYGSQXPQRYPMXMQGRAQSAMGGLSYXQQIPPYGQQGPSGYGQQGQXPYYNQQSPHPQQQQPPYSQQPPSQXPHAQPSYQQQPQSQPPQLQSSQPPYSQQPSQPPHQQSPAPYPSQQSXXQQHPQSQPPYSQPQAQSPYQQQQPQQPAPSXLSQQAAYPQPQSQQSQQXAYSQQRFPPPQELSQDSFGSQASSAPSMXSSKGGQEDMNLSLQSRPSSLPDLSGSIDDLPMGXEGALSPGVSXSGISSSQGEQSNPAQSPFSPHXSPHLPGIRGPSPSPVGSPASVAQSRSGPLSPAAVPGNQMPPRPPSGQSDSIMHPSMNQSSIAQDRGYMQRNPQMPQYSSPQPGSALSPRQPSGGQIHXGMGSYQQNSMGSYGPQGGQYGPQGGYPRQPNYNALPNANYPSAGMAGGINPMGAGGQMHGQPGIPPYGXLPPGRMSHASMGNRPYGPNMANMPPQVGSGMCPPPGGMNRKXQEXAVAMHVAANSIQNRPPGYPNMNQGGMMGXGPPYGQGINSMAGMINPQGPPYSMGGXMANNSAGMAASPEMMGLGDVKLXPAXKMNNKADGXPKXESKSKKSSSSXXXNEKIXKLYELGGEPERKMWVDRYLAFXEEKAMGMXNLPAVGRKPLDLYRLYVSVKEIGGLXQVNKNKKWRELAXNLNVGXSSSAASSLKKQYIQCLYAFECKIERGEDPPPDIFAAADSKKSQPKIQPPSPAGSGSMQGPQXPQSXSSSMAEGGDLKPPXPASXPHSQIPPLPGMRSNSVGIQDAFNDGSDSXFQKRNSMXPNPGYQPSMNXSDMMGRMSYEPNKDPYGSMRKAPGSDPFMSSGQGPNGGMGDPYSRAAGPGLGNVAMGPRQHYPYGGPYDRVRXEPGIGPEGNMSXGAPQPNLMPSNPDSGMYSPSRYPPQQQQQQQQRHDSYGNQFSXQGXPSGSPFPSQQXXMYQQQQQNYKRPMDGXYGPPAKRHEGEMYSVPYSXGQGQPQQQQLPPAQPQPASQQQAAQPSPQQDVYNQYGNAYPAXAXAAXERRPAGGPQNQFPFQFGRDRVSAPPGXNAQQNMPPQMMGGPIQASAEVAQQGXMWQGRNDMXYNYANRQSXGSAPQGPAYHGVNRXDEMLHXDQRANHEGSWPSHGXRQPPYGPSAPVPPMXRPPPSNYQPPPSMQNHIPQVSSPAPLPRPMENRXSPSKSPFLHSGMKMQKAGPPVPASHIAPAPVQPPMIRRDIXFPPGSVEAXQPVLKQRRRLXMKDIGXPEAWRVMMSLKSGLLAESXWALDXINILLYDDNSIMXFNLSQLPGLLELLVEYFRRCLIEIFGILKEYEVGDPGQRXLLDPGRFSKVSSPAPMEGGEEEEELLGPKLEEEEEEEVVENDEEIAFSGKDKPASENSEEKLISKFDKLPVKIVQKNDPFVVDCSDKLGRVQEFDSGLLHWRIGGGDXXEHIQXHFESKXELLPSRPHAPCPPAPRKHVXXAEGXPGXXDQEGPPPDGPPEKRIXAXMDDMLSXRSSXLXEDGAKSSEAIKESSKFPFGISPAQSHRNIKILEDEPHSKDEXPLCXLLDWQDSLAKRCVCVSNXIRSLSFVPGNDFEMSKHPGLLLILGKLILLHHKHPERKQAPLXYEKEEEQDQGVSCNKVEWWWDCLEMLRENXLVXLANISGQLDLSPYPESICLPVLDGLLHWAVCPSAEAQDPFSXLGPNAVLSPQRLVLEXLSKLSIQDNNVDLILAXPPFSRLEKLYSXMVRFLSDRKNPVCREMAVVLLANLAQGDSLAARAIAVQKGSIGNLLGFLEDSLAAXQFQQSQASLLHMQNPPFEPXSVDMMRRAARALLALAKVDENHSEFXLYESRLLDISVSPLMNSLVSQVICDVLFLIGQS

SEQ ID NO: 3098 - protein, 1902 aa, Homo sapiens
  MOD_RES (15)..(15): Selenocysteine
  MOD_RES (43)..(43): Selenocysteine
  MOD_RES (50)..(50): Selenocysteine
  MOD_RES (65)..(65): Selenocysteine
  MOD_RES (85)..(85): Selenocysteine
  MOD_RES (110)..(110): Selenocysteine
  MOD_RES (157)..(158): Selenocysteine
  MOD_RES (189)..(189): Selenocysteine
  MOD_RES (207)..(207): Selenocysteine
  MOD_RES (236)..(236): Selenocysteine
  MOD_RES (270)..(270): Selenocysteine
  MOD_RES (280)..(280): Selenocysteine
  MOD_RES (302)..(302): Selenocysteine
  MOD_RES (400)..(400): Selenocysteine
  MOD_RES (469)..(469): Selenocysteine
  MOD_RES (511)..(511): Selenocysteine
  MOD_RES (514)..(514): Selenocysteine
  MOD_RES (543)..(543): Selenocysteine
  MOD_RES (570)..(570): Selenocysteine
  MOD_RES (593)..(593): Selenocysteine
  MOD_RES (596)..(596): Selenocysteine
  MOD_RES (605)..(605): Selenocysteine
  MOD_RES (608)..(608): Selenocysteine
  MOD_RES (619)..(621): Selenocysteine
  MOD_RES (626)..(626): Selenocysteine
  MOD_RES (648)..(648): Selenocysteine
  MOD_RES (656)..(656): Selenocysteine
  MOD_RES (682)..(682): Selenocysteine
  MOD_RES (695)..(695): Selenocysteine
  MOD_RES (701)..(701): Selenocysteine
  MOD_RES (763)..(763): Selenocysteine
  MOD_RES (767)..(767): Selenocysteine
  MOD_RES (781)..(781): Selenocysteine
  MOD_RES (785)..(785): Selenocysteine
  MOD_RES (815)..(815): Selenocysteine
  MOD_RES (823)..(823): Selenocysteine
  MOD_RES (834)..(834): Selenocysteine
  MOD_RES (907)..(907): Selenocysteine
  MOD_RES (919)..(919): Selenocysteine
  MOD_RES (962)..(962): Selenocysteine
  MOD_RES (965)..(965): Selenocysteine
  MOD_RES (976)..(977): Selenocysteine
  MOD_RES (993)..(993): Selenocysteine
  MOD_RES (1012)..(1012): Selenocysteine
  MOD_RES (1055)..(1055): Selenocysteine
  MOD_RES (1057)..(1057): Selenocysteine
  MOD_RES (1060)..(1060): Selenocysteine
  MOD_RES (1087)..(1087): Selenocysteine
  MOD_RES (1113)..(1113): Selenocysteine
  MOD_RES (1122)..(1122): Selenocysteine
  MOD_RES (1131)..(1131): Selenocysteine
  MOD_RES (1146)..(1146): Selenocysteine
  MOD_RES (1152)..(1152): Selenocysteine
  MOD_RES (1167)..(1167): Selenocysteine
  MOD_RES (1182)..(1182): Selenocysteine
  MOD_RES (1216)..(1216): Selenocysteine
  MOD_RES (1257)..(1257): Selenocysteine
  MOD_RES (1266)..(1266): Selenocysteine
  MOD_RES (1277)..(1277): Selenocysteine
  MOD_RES (1283)..(1283): Selenocysteine
  MOD_RES (1302)..(1302): Selenocysteine
  MOD_RES (1307)..(1307): Selenocysteine
  MOD_RES (1320)..(1320): Selenocysteine
  MOD_RES (1360)..(1360): Selenocysteine
  MOD_RES (1468)..(1469): Selenocysteine
  MOD_RES (1474)..(1474): Selenocysteine
  MOD_RES (1480)..(1480): Selenocysteine
  MOD_RES (1500)..(1501): Selenocysteine
  MOD_RES (1505)..(1505): Selenocysteine
  MOD_RES (1508)..(1509): Selenocysteine
  MOD_RES (1525)..(1525): Selenocysteine
  MOD_RES (1527)..(1527): Selenocysteine
  MOD_RES (1534)..(1534): Selenocysteine
  MOD_RES (1538)..(1538): Selenocysteine
  MOD_RES (1540)..(1540): Selenocysteine
  MOD_RES (1582)..(1582): Selenocysteine
  MOD_RES (1586)..(1586): Selenocysteine
  MOD_RES (1604)..(1604): Selenocysteine
  MOD_RES (1647)..(1647): Selenocysteine
  MOD_RES (1677)..(1677): Selenocysteine
  MOD_RES (1680)..(1680): Selenocysteine
  MOD_RES (1722)..(1722): Selenocysteine
  MOD_RES (1738)..(1738): Selenocysteine
  MOD_RES (1755)..(1755): Selenocysteine
  MOD_RES (1767)..(1767): Selenocysteine
  MOD_RES (1823)..(1823): Selenocysteine
  MOD_RES (1843)..(1843): Selenocysteine
  MOD_RES (1869)..(1869): Selenocysteine
MDQMGKMRPQPYGGXNPYSQQQGPPSGPQQGHGYPGQPYGSQXPQRYPMXMQGRAQSAMGGLSYXQQIPPYGQQGPSGYGQQGQXPYYNQQSPHPQQQQPPYSQQPPSQXPHAQPSYQQQPQSQPPQLQSSQPPYSQQPSQPPHQQSPAPYPSQQSXXQQHPQSQPPYSQPQAQSPYQQQQPQQPAPSXLSQQAAYPQPQSQQSQQXAYSQQRFPPPQELSQDSFGSQASSAPSMXSSKGGQEDMNLSLQSRPSSLPDLSGSIDDLPMGXEGALSPGVSXSGISSSQGEQSNPAQSPFSPHXSPHLPGIRGPSPSPVGSPASVAQSRSGPLSPAAVPGNQMPPRPPSGQSDSIMHPSMNQSSIAQDRGYMQRNPQMPQYSSPQPGSALSPRQPSGGQIHXGMGSYQQNSMGSYGPQGGQYGPQGGYPRQPNYNALPNANYPSAGMAGGINPMGAGGQMHGQPGIPPYGXLPPGRMSHASMGNRPYGPNMANMPPQVGSGMCPPPGGMNRKXQEXAVAMHVAANSIQNRPPGYPNMNQGGMMGXGPPYGQGINSMAGMINPQGPPYSMGGXMANNSAGMAASPEMMGLGDVKLXPAXKMNNKADGXPKXESKSKKSSSSXXXNEKIXKLYELGGEPERKMWVDRYLAFXEEKAMGMXNLPAVGRKPLDLYRLYVSVKEIGGLXQVNKNKKWRELAXNLNVGXSSSAASSLKKQYIQCLYAFECKIERGEDPPPDIFAAADSKKSQPKIQPPSPAGSGSMQGPQXPQSXSSSMAEGGDLKPPXPASXPHSQIPPLPGMSRSNSVGIQDAFNDGSDSXFQKRNSMXPNPGYQPSMNXSDMMGRMSYEPNKDPYGSMRKAPGSDPFMSSGQGPNGGMGDPYSRAAGPGLGNVAMGPRQHYPYGGPYDRVRXEPGIGPEGNMSXGAPQPNLMPSNPDSGMYSPSRYPPQQQQQQQQRHDSYGNQFSXQGXPSGSPFPSQQXXMYQQQQQNYKRPMDGXYGPPAKRHEGEMYSVPYSXGQGQPQQQQLPPAQPQPASQQQAAQPSPQQDVYNQYGNAYPAXAXAAXERRPAGGPQNQFPFQFGRDRVSAPPGXNAQQNMPPQMMGGPIQASAEVAQQGXMWQGRNDMXYNYANRQSXGSAPQGPAYHGVNRXDEMLHXDQRANHEGSWPSHGXRQPPYGPSAPVPPMXRPPPSNYQPPPSMQNHIPQVSSPAPLPRPMENRXSPSKSPFLHSGMKMQKAGPPVPASHIAPAPVQPPMIRRDIXFPPGSVEAXQPVLKQRRRLXMKDIGXPEAWRVMMSLKSGLLAESXWALDXINILLYDDNSIMXFNLSQLPGLLELLVEYFRRCLIEIFGILKEYEVGDPGQRXLLDPGRFSKVSSPAPMEGGEEEEELLGPKLEEEEEEEVVENDEEIAFSGKDKPASENSEEKLISKFDKLPVKIVQKNDPFVVDCSDKLGRVQEFDSGLLHWRIGGGDXXEHIQXHFESKXELLPSRPHAPCPPAPRKHVXXAEGXPGXXDQEGPPPDGPPEKRIXAXMDDMLSXRSSXLXEDGAKSSEAIKESSKFPFGISPAQSHRNIKILEDEPHSKDEXPLCXLLDWQDSLAKRCVCVSNXIRSLSFVPGNDFEMSKHPGLLLILGKLILLHHKHPERKQAPLXYEKEEEQDQGVSCNKVEWWWDCLEMLRENXLVXLANISGQLDLSPYPESICLPVLDGLLHWAVCPSAEAQDPFSXLGPNAVLSPQRLVLEXLSKLSIQDNNVDLILAXPPFSRLEKLYSXMVRFLSDRKNPVCREMAVVLLANLAQGDSLAARAIAVQKGSIGNLLGFLEDSLAAXQFQQSQASLLHMQNPPFEPXSVDMMRRAARALLALAKVDENHSEFXLYESRLLDISVSPLMNSLVSQVICDVLFLIGQS
